United States Patent Application Publication US 2008/0274467 A1 - sequence listing, part 5

SEQ ID NO: 532 - protein, 2487 aa, Mus musculus
GCAAAAGGCGGTTGAGATTGGCAGAGTGAAATATTACTGCTGAGGAAACGTAGCAGGGCACACGTCTCTCTTTGCGTCCTGGTGCCTCATTTCTCCATCACCTACTTACTTCCTGGTTGCAGCTTCTCTTCCTTTGGGACTTTTGCACCCGGAGCTCCAGATTCATTACCCTGCTTCACTGCGGAGCCTTCAGGAGTGGCATCCGGTGCACTGCAGAGACCCGACTCTCCTTGCTACCTTATAGCCAGAACTGCTGCAGGCTGATTCTTCACACACACACTCTCTGCTCTTCCCATGCAAATCAGATCTCAGGTGCCTCAGCGTCCTACCCTTCTGGAGGGCTGCAGTATAGCCACCCCAAGACCTTACTGCTCAGTGCCTGGAATCCTGATTGCGAACTGCGGGGCTCACTCGTCTCCCTCAGCCATTGCCCAGGGGGCGAGAGAGGCCATCACAACCTCCAGTTTGTGTCAAGGTCCAGTTTGAATGACCGCTTTCAGCTGGTGAAGACATGACGACCCTGGACTCCAATAACAACACAGGTGGTGTTATCACCTACATTGGCTCTAGTGGCTCCTCCCCGAGCCGGACCAGCCCGGAGTCCCTCTACAGTGACAGCTCCAATGGCAGCTTCCAGTCCCTGACTCAAGGTTGTCCCACATACTTCCCACCATCACCTACTGGCTCCCTCACCCAGGACCCTGCCCGCTCTTTTGGCAAGCTGAATGGCATGGTGCTACTGTGTAAGGTGTGTGGGGACGTGGCCTCAGGCTTCCACTATGGAGTGCACGCCTGTGAGGGCTGCAAGGGCTTTTTTCGCCGGAGCATCCAACAGAATATCCAGTACAAACGGTGTCTGAAAAACGAAAACTGCTCCATCGTTCGCATCAATCGCAACCGCTGCCAGCAGTGTCGCTTCAAGAAGTGTCTCTCCGTTGGCATGTCTAGAGATGCTGTGCGTTTTGGGCGCATCCCCAAGAGAGAGAAGCAACGGATGCTTGCCGAGATGCAGAGCGCCATGAACTTGGCCAACAACCAACTGAGCAGCCTGTGCCCTCTAGAGACCTCACCTACTCCACATCCCACCTCTGGCTCCATGGGCCCCTCACCTCCTCCTGCACCAGCCCCCACACCTTTGGTGGGCTTCTCTCAGTTCCCACAACAGCTGACACCACCCAGGTCTCCCAGCCCTGAGCCCACCATGGAGGATGTGATATCCCAGGTCGCCCGGGCCCATCGAGAAATCTTCACCTATGCCCATGACAAGTTAGGCACCTCACCTGGTAACTTCAATGCCAATCATGCATCAGGTAGCCCTTCAGCTACAACTCCACACCGCTGGGAGAGTCAGGGATGCCCGTCTGCCCCCAACGACAACAACCTTTTGGCGGCTCAGCGTCATAATGAAGCGCTGAATGGTCTACGCCAGGGCCCTTCCTCCTACCCGCCTACCTGGCCTTCTGGCCCCACCCACCACAGCTGCCACCAACCTAACAGCAATGGGCACCGTCTGTGCCCCACCCACGTATATTCGGCCCCAGAAGGGGAGGCACCTGCCAACAGTCTACGGCAAGGCAACACCAAGAATGTTCTGCTGGCATGTCCCATGAACATGTATCCCCATGGACGCAGCGGCCGGACTGTGCAGGAGATCTGGGAAGACTTCTCTATGAGCTTCACGCCTGCCGTTCGGGAGGTGGTAGAGTTTGCCAAACACATCCCAGGCTTCCGTGACCTTTCTCAGCACGACCAGGTGACCCTGCTTAAGGCTGGCACCTTTGAGGTGCTGATGGTGCGCTTTGCATCGTTGTTCAACGTGAAGGACCAGACAGTGATGTTCCTGAGCCGCACAACCTACAGTCTGCAGGAGCTCGGTGCCATGGGCATGGGCGACCTGCTCAATGCCATGTTTGACTTCAGCGAGAAGCTCAACTCCCTGGCACTTACCGAGGAGGAGCTGGGCCTATTCACCGCGGTGGTGCTTGTCTCTGCAGACCTCCGTGTCCTCCGTGTCAGAGGAGGAGCTCAGGGAGCTCGCCTCACTGCTGTCGTCTTCCCCACAGACCGCTCGGGAATGGAGAATTCCGCTTCGGTGGAGCAGCTCCAGGAGACGCTGCTGCGGGCTCTTCGGGCTCTGGTGCTGAAGAACCGGCCCTCGGAGACTTCCCGCTTCACCAAGCTGCTGCTCAAGCTGCCGGACCTGCGGACCCTGAACAACATGCATTCCGAGAAACAGAATCGAACTCTGCACTTCTCTCTCCTTTACGAGACGAAAAGGAAAAGCAAACCAGAATCTTATTTATATTGTTATAAAATATTCCAAGATGAGCCTCTGGCCCCCTGAGCCTTCTTGTAAATAACTCTTCCCCCACCCCCACCGCCATGCTCCCATCCTCCCCTATTTAAACCACTCTTGCTCTCTCCACCCTCCTCTGGCCCCTCGATTTGTTCTGTTCCTGTCTCAAATCCAATAGTTCACAGCTGAGC

SEQ ID NO: 533 - protein, 615 aa, Mus musculus
PLSAGEDMTTLDSNNNTGGVITYIGSSGSSPSRTSPESKDSSNGSFQSLTQGCPTYFPPSPTGSLTQDPARSFGKLNGMVLLCKVCGDVASGFHYGVHACEGCKGFFRRSIQQNIQYKRCLKNENCSIVRINRNRCQQCRFKKCLSVGMSRDAVRFGRIPKREKQRMLAEMQSAMNLANNQLSSLCPLETSPTPHPTSGSMGPSPPPAPAPTPLVGFSQFPQQLTPPRSPSPEPTMEDVISQVARAHREIFTYAHDKLGTSPGNFNANHASGSPSATTPHRWESQGCPSAPNDNNLLAAQRHNEALNGLRQGPSSYPPTWPSGPTHHSCHQPNSNGHRLCPTHVYSAPEGEAPANSLRQGNTKNVLLACPMNMYPHGRSGRTVQEIWEDFSMSFTPAVREVVEFAKHIPGFRDLSQHDQVTLLKAGTFEVLMVRFASLFNVKDQTVMFLSRTTYSLQELGAMGMGDLLNAMFDFSEKLNSLALTEEELGLFTAVVLVSADLRVLRVRGGAQGARLTAVVFPTDRSGMENSASVEQLQETLLRALRALVLKNRPSETSRFTKLLLKLPDLRTLNNMHSEKQNRTLHFSLLYETKRKSKPESYLYCYKIFQDEPLAP

SEQ ID NO: 534 - DNA, 28679 bp, Homo sapiens
cagggtccagtccctcaatgccacttttgcagcctgtctgcctgatgtcatcatctgtagacctgtgccagattcccaggttcctatcttgaaatctcagcccccgcacccagggcctaggggagagccaatgtaggtcactgcagttgagcctgcagggctgtctgctccttgagcccagagcctttcaggcacagagagaaagccttgcagagaagcaaaagaaagggctctgtgagaatcagagaaaagcttattcctcaaaaaatgaagcagggagaggccaggagtcagctgctcagactgagacagtaacaggagttctgctcctgagaactgcctgtgatggagagaaggcccaaggagaggggctgggcatggctcacatccctcccaaccccctaacccccatttgcctgtgtaagggaaccctttggatctggtgtccatccctcattctctactctctttccaggctcaggtttcattctcaggagcttttgtgatttgccttagggaccctttgtttcctctggccacagtttctgggtctcaggaaggtggagtaggccagggatgaccccgccctcccctattgaaagacttttcctgcttgttatctgctaaactcattttacccagggaacttccaaccttctgggacttcattccttctcttggtctccctaccctagcatctgagatcgcagggagtgtttgtgtgtgcctgtgtgcatggtcctcatcttcttttagttactcatgggaagtcaagagcctatggctgttaactaacttggggtccccatggccagcaaaaatagataagggcttaatttctacctccagcctcaaaacaatttaagccacaatcatttgttctaataggagcctcgggacaggaagaaaagtaggtaagatggagaaaggataaacaaataaaattctaaccttttctttctttcactctcccctcacccagtaccttccactcctctttgagatctcagctactcattagcctactactgttgtgccatttgcccgcatttccagaatctgcacacaggaggcactcaataaatgctttttactctgagtcaaactaaatctgattacgccctgtggctggactttgagatgaagcagcacaaagggggaaggtagacatgcccccagatctttttttttttttttttttttgagacagggtctcactctgtcgcccaggctggagtgcagtgtgtgatcttggctcatggtaacctccacctcccagttcaaggaattctcctgcctcagcctcctgagcagctgggattacaggcacacaccacacccggctaatttttgtatttttttgtagagacggggtttcaccatgttgaccaggctggtgtccaatgcgtggcctcaagtgatccgcctgcctcagcctcccaaagtgctgggattacagggatgagccaccacgcccagctgacatgtccccagatcttgggctagattctcctagaggactgattgttagggaccgaagacctaaagcagtgggtctcaggcttcccagaatcccaagggccttgttaaaactcagattgctgggttttgctcccagagcttctgattcaatccacctgggatggggcctgggaatttgcatttctaacatgttcccaggtgaccccagatccctatgcttatcttgagaaccactgtcttagagaaccccagcccctccccccactgtttaccatgaggacttgattggttccattttttttttttttttgagacagggcctcgctctgttgcccaggctggagtgcagttgcatgatctcggctcactacaacctccgcctcccgggttcaagcgattctcatgcctcagcctcccaggtagctgggattacaggcgcccactaccatgcctggctaatttttttttattttttgtagagatggggtttcaccatgttggccaggctggtctcgaactcctgacctcaaatgatccgcccacgttggcctcccaaagtgctgggattacatggttccaattttatataggaggaaggaactggtaccaccctaaccagtacagagatcttaagagagggtaagggcaggcgtaagtcggtctctaactgattatccattctgtctctttttaaatagtccattgattccatccttattgaaagtcacttccccaaaacatgttttgcagcagcaacaggagcactaggaatttcctgtgacgaggcagcgccagtgctggggaggggtggaggcagtgctgagcgagcgccttcccttggctcgggcagggccacgtgccccaccccctcgcttgcacatgtctccaccgccaccgccgcagcagccgggctgtttatgagcgagttgttgtggtagaaatggagcaggctgcacatgcccgggccatgtgaccccggcagcccgcgtgagcctcgagccggcacaaacacactgggccccttcctccgtgggccagagaaacaggaggcaagatgaggaaggagggaaagcgcgcggggctcccttcttgtctccttgcgctttatcctgcttctgtctccttttgtctctcctgagccaccaggggagcaaacacccagaaaagaaacatggtctccccaagcatattttcctcccaggcagccccttggtgttttcacaacccagaaccctaagcctcaaaagaacaaaggaccttcccaagccaagaacacagaacagcccaccccagccctcatggtgatgtgttgatgtctgcccagagccaagacttggcttccctgtagcctgggctccccaaatcaggctaccctgtcccctctttctaggaaggaggatgacacacacacgcagcaagtgccccctccagggttagaacaaggacagttcagggatttgtgtgtttggggacatgaagcaaaggttctgcaacagtggtctgtgaggttagtggaccggaaggggaaagtccctctgctacttggagatggggaagagccgagggctggaggaaacctagaagggctttcccaataacccctgtgtagctgcagaacaaatgcgtgtgcaaaaggcaaattcagcctccatccctcattgaagtgcccccttccatctgcctggccctctaacctccattggtccttctctgggcactctaaccacagacccccacttctggctctctgcttctgccccctactcgtgaccccatttctaagctgcggtgcctcttgctgggctatgagactatgctagagtcagggggacagtaggttagcaggaacaagcaaatgaaatgagcacgacccacatttcctcatcgcaccaaaacttcgcagatcctgcattgcagagctagcgctttttttttttttttttaatctccgctgggcccctacacacgtctgcatttttgcaaccagcacagattttttttttccagggtgcaaactgcgcattctaatgagccaaagctccttcctgcggcattgaaaatctctttggcaaactgcttcttccccactcgccctccccccaatttagaagaggaggagggatcccaaatttgtgaagtcgcatcctctctctctccttctcctgccccccctcccccaagataccgcagtctttccagcccgactaacagctgcagaccaggggagaggagtgagaggagggaaagtaagccttgttccttctttccactcaggctgagccggccgggcgggggttgcttttttccctgggcagccattgcaacccccctttcctccccatcccagccagtgtttatgtaagcctcccagaagctacacaaggcccctaatgcctgcccaggccaccgctcctccgaggtccattctgctcacgaggactgtcatgagcctctggcctccccaggcagctaatggtgatctgcagaggcccaaaggatggagagacactggataaggagagggtttgagatggagcttgggataaagggtagagatggaagcagatgcagagcaccccctctccctttcctccacctcccccacattctccctgcatctgagttctacagaggctcaagggcagccaatgggcaggtgcaggggcctggaagatgataccactgtggctccagcagcatggcaaagattggacaggaggccttagcagagcatgtactggatgccagaaaaagggtcatctggggcttagtctccactgccaaggacaatccatgcctcctccaggatcctgtgatgtgggtgagatcctaggttctgagagaggggacccttcttcaggttcttcaaagcatctgctgaagaagcattggcccaggacagtggctttcggaagggctggttttagaggtgcacgttgctcaagcaggtaaatggggaagtgggatgctgtttccttaaggctttggacacaacttttgttggtccttggtggccttccacacgctccctcaaccaatcttcttaatacagctcctggaatgaagcaccatgggacttcagagggccctgacctacttgccccactctcctcaccaccagcagcagaccccaaattcagagggtttgggtagagaagagagttcagacgcctgtttctgttagtcacctctatagcagtctgtggtttgtgcaccctgttcctgccccttctacttttagaaccagatgagggaaatgtaggacggggagtgggaagagtttaggggaagaggaaatgtgcctggggttaaaagagagattttggaaagctgaggtactccctgggacagggacaaggggtgcttcaggcttctgttcttggtgatatatcccacttccaagcatcaccattgcttgggaaacaccaggatgagtttgctgctcagacgttcccctagggtggcagtaatctctctaggaggggcagtcttgctagcagaaagagtttcatcttcacgcctggggttgaatccccagcattgccattttcattgtgacgctgacagtggtagttcaagagatagctagaggggagatttagcccctccaataatctccatccgcgctatcattctttgatggacatcttctcagtcttaagtgctatgcaaattacagcttcaagactaatcacctagaccctctggcaccctgggcaagttaataaagttctctaagtctcagtttccccatctctaaaataagaatgagacctacagcatagggttgttgtgaatattaaatgagataatgtgtacaaaacactttgcacagtgcctggcatacggttggtacttaatacatatttatggtttcctttccttggaaaaagcagtagtgaggtaaagatagaatctgaggcaaaacacatccatggaacccagccctggctcatgcctcgcccttgctttctccatccccctccccccaccacactgagaaacaagttagctcagactctgtccttcctgtggcatgttcttaaagttctccccaaaacatccaggctttgggtggggttgggaaagatagctggccttttagagacaaagaaaaggatttaggagggcagggagtgagtctctcccaggcacatggctggttccctgattcaggggcatccccagcatttctataccaggtttgcatcacctgggcagacaggtttctactctgggcaatggtttcttggtgagaaaggagggggatgggaaggcatctacagaagcctgacctgtttccagcaaggacccaccctcagtcagtcagtcagtcagtcagtcagtcaagcagttggcccaagatttaggccacccagaatttgcacagggtgttgccctgttacccagaacaacctactgacagggagaacagatctcagatcaaacatgcacacccacacacacagcattcacactcacacacaaacatgcagtctcactcatagtcatagaatcacacacacacacacacacacgtgcacacatacataactgaccagagcttagtgttctcaatacctttccttcttctcctctgtgtctgctgtcctctgcagtccaaataaatcaaggaaaattaaagacatatttggaaacacacaggcaggatccaacactgcccctaatgggaaggttcgtccccagaatcccagacttgggaatccaagtggaagtgtatgcagaaccagggcagtgccttgctgtaccaggttgtgaatatgcatcttttctacctggatccaatctgagtactatttatgaagagttaagtgctttcttgagttgaactgggctatgggagaaatggggtgtgtgtgtgtgtgtgtagaagtgaacagcaggccgggcatggtggctcacgcctgctatcccagcactttgggaggctgaggtgggtggatcaccttaggtcaggagttcaagaccagcctgactaatatggtgaaaccccatctctactaaaaatataaaaaaaattagccaggcattgtggcgtgctcctgcagtcccagcaacttgggacgctgagacaggagaatggcttaaacccggaaggtggaggttgcagtgagccactgcactccagcctgggcgatagagtgggactctgtctcaaaaaaaaaaagaagtgaacagcaatgtccagctggagggataggtgaggaaggttgtgttgagatacacctgttgtcttaaggtcttacagccaaggttgaggtcaaagagaaaccaagattctactccgaatcacccagagccagacaacccagcctttcccccctccctttggtggctttgggtctcagagtttctgcccttctcccagcagctgctgacagagaaaggagcagggtacacagactgactagaagcttctggggccaagagagaaccctgccttttcattctgtactcctctcaccagctgtagaagaaagacacccgaattacttgtgagggagaaaaggaagggccctataagaaatggaaaggaaggaaggaaggagcaagggggtaacccctctcctttgccccctccctcccagcctctgccttcacaccacacacagactgcagaaccacccaggttttgccaagaggagagtcaggctgactgaatttcagctctctctacctctgctccctcctccttctcactgattgcagcaggcgaggagtcttgacccaccccagctcccactcctagaagaacaaacatccagcaagtatacagggggtgggtaggacctccacagcagcaaacagagctgtgggccttggggaggaccccggccaagtaaagggagggtgctagtggtggtgctgtgctgtggggagctagatgcacgccaggggtcctgattttgagtccagccctgacagacacctgggctctggccctggctctgacttggagtcaaggtcacagagagcaggcaagggcaggacagggcaattcacctcctagctttccctccagagcccagagggtggagggagagggggtggaggctgagaaccaagttttcctgaaaagcctctttccttgtttgttttagcccctcccagttgctcccacactctgctgcagcttcccaactctgggccaaagggccagagaagagcccactgccctctctctcccacttttcttgggagcaggagaacaaagctaaagcctagcccattccaggaagctcatcttctacaaggagtcagagggtgagtggtcaagctcctgcagtcaacctcactgtcctcactacccagtttactcctgtgctcatattattattcttttttttttttctttttttgagatggagtttcggtcttgttgcccatgctggagtgcactggcgcgatctcaggtcactgcaacctctgcctcccgggttcaagcaattctcctgcctcagcctcccgagtagagtagctgggactacaggcgtgcgccaccacgcccagctaatttttgtatttttagtagagacgaggtttctccatgttggccaggctggtctcaaactcctgacctcgggtgatccacctgcctcggcctccccaagtgctgggattacaggtgtgagccaccaccacacttggccttttttttttttctttgagatggactctcaccctgttgcccaggctgttgtgcagtggcatgatctcggctcactgcaatctccatctcctgggttcaagcaattctcctgcctcagcctcccgagtggctgggactacaggcgtgcgccaccacgcccagctaatttttgtatttttagtagagatggggtttcaccatgttggccaggctggtctcgaactcctgacctcaggtgatctgcccacttcagcctcccaaaatgctgggattacaggtgtcagccaccacccccggactcccatattctttttctctaccttttcggtggctttcatgtttcccaggcatccatcaataccatcccaggagctgcctgtggagaagggcttcctatgtgaagaaaaccctctctagaagcactgggactggggaggaattagcgggagcagcaggtggctcaggctccctctcccttcgctgcctaagaagcttccatcccctccatgacccaagccctctaacatgatagatctcctctacttgagatctgttattactcatgggacagttgctgctctgaagcgaaatactggctgttttttgtttgtttgttttggagacagagtctcactctatcccccaggccggagtgcaatggcgatctcggctcactgcaacctccacctcccgggttctagcgattctcctgcctcagcctcctgactagctgggattacaggcacccaccaccacatccggctaatttttgtatttttagtagagacgtggtttcaccgtgttggtcaggctggtctcaaactcctgacctcaggtgatcaacccacctcagcctcacaaagtgctgggattacaggcatgagccaaagcacccggcaatgctggctgtttctaacccctgttcagtatttcacttgtacatctacccaccttcccattcggggtgggcagatgaaactagcaatggacgtctgaccttgggtcggtcacttctcctaagcttcctgttccccactagtaaaaagagggaggcttaagatgatctacatgttcccctctgagtagtaatcttctgtggaattcatattttatcctccagcaccgaggggcaggggtgtcactctgcccccaccccctgcctcacctcttccccattactttaggacctcaaagcactttcactattagttcccctctgttgtcctttttatttcccagacaaagggaaatgactcaccccaaagtcaactggagtgggtggaatggtgtcatacaagcaaacagggagtccctacagacatccctacctctgtgggaactccttcccctggaggtgttctccctaaggcgagtagaagggaaagggggtcacatttcctttccttctctggactttgccctgaagcagagggcagcctaagctcctgactccagggaaatctccctccccggcttctctctctcccggtcaccagtaacctcaggacgaggtcagtcctgcaatcacgtgaagccctcacgtttgcaaggtttgcagaaagggcctcttagctttgatctcccagacagcaaacaagcttgccagtccctccccagaaattcacatgcccctgccatacaggctttctaaacacgccaccctgactcttcagcgcaccccatcccaccccactctcagctcctcccaggtcccggcaagcgctttgccaggcagaaagggtaaaggcacgcagtccgcccactttgtcggtggactacaaatcccgacagtcttgtcgttgcgcaggcgcgcaagagctcaacgtgccggctgttggaaaagtgtgtcactggggcacgaggcgctccctgggatcacatggtacctgctccagtgccgcgtgcggcccgggaaccctgggctgctggcgcctgcgcagagccctctgtcccagggaaaggctcgggcaaaaggcggctgagattggcagagtgaaatattactgccgagggaacgtagcagggcacacgtctcgcctctttgcgactcggtgccccgtttctccccatcacctacttacttcctggttgcaacctctcttcctctgggacttttgcaccgggagctccagattcgctaccccgcagcgctgcggagccggcaggcagaggcaccccgtacactgcagagacccgaccctccttgctaccttctagccagaactactgcaggctgattccccctacacactctctctgctcttcccatgcaaagcagaactccgttgcctcaacgtccaacccttctgcagggctgcagtccggccaccccaagaccttgctgcagggtgcttcggatcctgatcgtgagtcgcggggtccactccccgcccttagccagtgcccagggggcaacagcggcgatcgcaacctctagtttgagtcaaggtccagtttgaatgaccgctctcagctggtgaagacatgacgaccctggactccaacaacaacacaggtactgagatttctttactatcatcttttccctgtcactgtctccccacctccatctacgccttataaaaagaggaactttgtaagggactggggtgtccctcggcccggagatttgctaacgtgctgcggtgctttagtgtgggatttccagagcggcttgttcgggctggaaatgctctcagaaacgccccatcaccacccctcagagtcccaaagctcccttgagcctcgaatccctgggcaggaggaaatggagaggaggtacgggtggtgaagcgaagaatttagggggactgggagctttggaacagtgccccgaaacggccccatctgtccactacctgcagctgtagtatgcctggcctcagaaaacggaccccctcccctcttgtcttccccctcctctagttcctgcaggcgcgagggaatctgagaagagtggcgcgatggggttcagggaaggaggggctgggagaatcgttcggatctcactggggaatcctcagtgacaggagggagcgacacttgaggagtccagagcgtggtgcccggcccgagggagggcacctacagggctccggccgccgggagggctcacatggctctagagccgggcccacgtgctgcgtttgttttcattcagcagaagccgtggctgccaccccattggtcgttgcctcccggcctcgttacataatgagctccgcccccccggtcgcctcggcaacgcgtgttcccttctctcctcctctaggttgtcctggccctgctatcgttcggggtccagcccacgacctggtggccggggaagggcgggtaggaggcggggcgactgctctcgattgacgggaagcgaggagggcggggcctcgagttccggggttcctcgttggggagccacgtgcgagaggcacacgtggagcagggacgtgaggccggctgagggcccagctcccgccctgccccgccccgccgagatctgggtgaagctgggctgactcaccgcccccgcctgcctccttttccggtccgcctgcccggccccctccccccatcaccaaaacaaagtaacatggagccattcctgacctttcatggccttctgttttacactccctaaagagacctcacccctaaccacccttctcactcctttccacttcactcttatttgcacctacttcaccgtactgcatttagactcagcttccccacattacaaattcctgttccccaagcttctctctccttagttctgcgagcattgtcttacccccatctccaccagacaagctgcagtttgcctactaagggctccccaaagcaactgcaccccacaatcatagctgaaatgatactgtcctttttttctcacagaaaggaaaactgagacccaaagaggggagttgatgtcctctaggtcacaaaataagttggtagtgatgggtctagacctagacctagactcttgagtatgctcctcacttccacgttggaagcctctgcatgaaggtctcactcctttttgggggatgggtgaactaggtcaacttcatttactgccaactaatgattccatcccccacctcagccctgaaaccgggggagctgatctgttgtgcaactattttccaaggagctgggttcaccctgaccaaccttgagctattttagggccgccctgcccagttcagtgtgtgtcagtgggtgagcaagacatgtgcctctgcagacacagtggcatggcatgtgttaggtcacatgtgtcctgggatcctcccttctcccaccccgcccatggcagaccaatctaggtgcttgccagaggtgtggcaggcaggtcacctttttctcctgctaataccacgggagcacagccacctcattggcaatgtaaccagagggtcaaagtccctgaatggccagagagccaaggtcattgttaccaggctgagatctgaagggggaattttagagccccaggctggacagtttgtacttccacctcctgcaactcgcacctcgaagtcctttttggacacagggatagactccactgtggctcactctcttaagaggccaggggaaccaggctgggcagattccttcccttcatttccttcagagaatatatgtccccaactggggggaatgtgactgtcttacttttgtaaaccctccattctctttactgttggctacctatctctccatggtccatggtctcattcctggaatggtcttagtgttaaaatcagcagctgggtttttgtttttggaggactgggcactttgaatggtgctcagctgcccatcccatccccagatcttcaactgacaactaagtcattagctgcagtcgatattcccaaggaaggcaactaaggaaggggggcacatatgcgagatgccacaggggtcatgcctcatactgaaagcagaagctgaaggtggcctgcaaagggtcgtaggtgttgcttggccatgccatgtctactgtgtgttggggaattgcttattaactccaagattaggggctccacatggtgaactgagtggccagcaatgttttgggcagacaggtggggatgagcacagtggcaccctaggtccggagacatggcggctgacaccccctttccttttgttctctctccaggtggcgtcatcacctacattggctccagtggctcctccccaagccgcaccagccctgaatccctctatagtgacaactccaatggcagcttccagtccctgacccaaggctgtcccacctacttcccaccatcccccactggctccctcacccaagacccggctcgctcctttgggagcattccacccagcctgagtgatgacggctccccttcttcctcatcttcctcgtcgtcatcctcctcctccttctataatgggagcccccctgggagtctacaagtggccatggaggacagcagccgagtgtcccccagcaagagcaccagcaacatcaccagtgagtacctttccagctgattcgggggaagggaagcaggccagggccagattgggaatgggtttttacgtgacaccagtcttgccagggcctattctggcttcagggatttctcctagagtggcaccagcccctcttcagcccagttttgtcactccagtgcccctcaacactggagttcctccttagcttttccctccctggatctccggcccagaaagcctccacacctgtggccactcagcctggcctctcctgctcacctgctgcccgtctcttccacagagctgaatggcatggtgttactgtgtaaagtgtgtggggacgttgcctcgggcttccactacggtgtgcacgcctgcgagggctgcaaggtgaggcggactgggggtaagggcaggggcaggtggccccctccccctggacacagaggcccagccatgatggaggtggtcactaaccacccctgccctccagggctttttccgtcggagcatccagcagaacatccagtacaaaaggtgtctgaagaatgagaattgctccatcgtccgcatcaatcgcaaccgctgccagcaatgtcgcttcaagaagtgtctctctgtgggcatgtctcgagacggtgaggcagcatccccacatcctccccctttcttccgcccaaagtttctgaattaatccttccctttaaaaaagtcacaaatggagacacatcatactgtgaatcacatgtgccaggggatgtccatccttcatttgcttgggtcaacatatacttctatcccattggtccctcgggtcacctcctaccagcaatccctcctagggaaacccccttgatgggtggggacttgctggttttagttttgatgtgaaaccccaagccttcagggccttgccctttcaggaggaaggaaggaagagaagcacgtgagcatggttgagaacttcctgatgctgttctcatcctgttgcagctgtgcgttttgggcgcatccccaaacgagagaagcagcggatgcttgctgagatgcagagtgccatgaacctggccaacaaccagttgagcagccagtgcccgctggagacttcacccacccagcaccccaccccaggccccatgggcccctcgccaccccctgctccggtcccctcacccctggtgggcttctcccagtttccacaacagctgacgcctcccagatccccaagccctgagcccacagtggaggatgtgatatcccaggtggcccgggcccatcgagagatcttcacctacgcccatgacaagctgggcagctcacctggcaacttcaatgccaaccatgcatcaggtagccctccagccaccaccccacatcgctgggaaaatcagggctgcccacctgcccccaatgacaacaacaccttggctgcccagcgtcataacgaggccctaaatggtctgcgccaggctccctcctcctaccctcccacctggcctcctggccctgcacaccacagctgccaccagtccaacagcaacgggcaccgtctatgccccacccacgtgtatgcagccccagaaggcaaggcacctgccaacagtccccggcagggcaactcaaagaatgttctgctggtaagggcatgggggcgggcgagtgcgttaagaagattgggggggcctggcagaatggacttagtgtagggcagctgggggttcctggaggctgagtgtggggatagcatcttcccaggagaaaatgtcttgccttgcagtctggactctgcctgggaatccctaatctccacctggcacctaattgctactttatctgaaagacccatccttcagggccacagcccctagcccaggcagaatctggggtccagctctgctcggggcgtccatctgacccagcctggctgacactcccctccttcaatcttttcctcccccaggcatgtcctatgaacatgtacccgcatggacgcagtgggcgaacggtgcaggagatctgggaggatttctccatgagcttcacgcccgctgtgcgggaggtggtagagtttgccaaacacatcccgggcttccgtgacctttctcagcatgaccaagtcaccctgcttaaggctggcacctttgaggtgagtgaccgtttatgcttctggtttttgttttttttgagacagagtttcgcttgtcgcccaggctggagtgcaatggtgcgatctccactcactgcaacctccacctcctgggttcaagcaattctcctacctcagccttccaagtagctgggattacaggttcccgccaccacgcttggctaatttttatatttttattagagacagggtttcgccatgttggccaggctggtctcaaactcctgaccccaggtgatctgcccgccttggactcccaaagtattgggattacaggcgtgagccattgcacccagacgcttcctgcttttgaccttgggaaggatccaacagaaagccctgctgtctggggtgggcaggacctctgaaaggttttggaacccagtatctttgtccttatagcctgattggtgaaaggggctgagcggctcctgctgcttcctcttgatggctgggacttctgtcatctcagctggaatttaatcacaacccattacactgaaataatgccttgggtgcactgctgcccccattctagacaagagcagattaactttggtgaatgccttgcccaaggtcacaggtagtgacaaagctgacactcagattcaggcttattggatcccaaagccatccttccacctgggctccctcattggccattcagaaacaacccccactctactgagaaatcgaaggcagcaccgctaaaccctctggcaaactacaggggcgatttggtcagtgctcctcccaccacacccaggatgactgttccccttccctcctaggtgctgatggtgcgctttgcttcgttgttcaacgtgaaggaccagacagtgatgttcctaagccgcaccacctacagcctgcaggagcttggtgccatgggcatgggagacctgctcagtgccatgttcgacttcagcgagaagctcaactccctggcgcttaccgaggaggagctgggcctcttcaccgcggtggtgcttgtctctgcaggtaggtcaggctctcgcctgacccgggggaggaggcagacgcagttcaattcaacacaccttttatggagtacctactctatgccaggccctgcaccgggcactggggatacagacatgattcagacacagtctagcttgggaaacagactcatgcccgactaattataaaacagtgagataagtgtcacagtagaagcatgaaccaaggaagcacagacaactatttctgcctgggggagctggggaaggaggtgacacttgagttggggcctcaaaggacaagtaagatgttgccaggcagagaaagggggaagggcatcccaggcagagggaactacacagcaaaaagcaagggagtctggccatgtttggcctgctgaggaagggaaggtggtcttacgggatgggaggtgaccagccctgctgagcccacgctcccagctttcaggcacctcctgctcttggggcagaggcctgggagaaggtatggcactccttctccttccccatcggccttctggggggcttcagggagaggctgcattgcctgccaggtcctcgcagacctccggttcctcctcagaggagctcggggagtccgcctcactgctgtcgtcttccccacagaccgctcgggcatggagaattccgcttcggtggagcagctccaggagacgctgctgcgggctcttcgggctctggtgctgaagaaccggcccttggagacttcccgcttcaccaagctgctgctcaagctgccggacctgcggaccctgaacaacatgcattccgagaagctgctgtccttccgggtggacgcccagtgacccgcccggccggccttctgccgctgcccccttgtacagaatcgaactctgcacttctctctcctttacgagacgaaaaggaaaagcaaaccagaatcttatttatattgttataaaatattccaagatgagcctctggccccctgagccttcttgtaaatacctgcctccctcccccatcaccgaacttcccctcctcccctatttaaaccactctgtctcccccacaaccctcccctggccctctgatttgttctgttcctgtctcaaatccaatagttcacagctgagctggcttctgtggtgtgtgctcgtttggggggtggggtggaaatactgccaaggctggggggggccacctctccatctggtcagtttgtggggtgggtactctgccagcagatgggaggatatagggaaacagcacacaagtctaaggggggtgcccaagggggttattttcatcatatatttattacataaatatatagtaaaatagacgagcaacaattaccataaaaatatctttctttaaaatcctgacccaaaacacaacggggtgaaaaatcgcacataacagacatactgattgtcaacgtggggcaggagtaggagcccctcaagtcacccctgccggtcccacccctccctggggaagagacctacctccttccctgtttctggccacaacccccctccccccagcccagcaccagcttctcatacattcagtagcgcctctgggcagtgtccccctcccccccgcccaggagttcccagggcaggagttactgtcctccttatggacggtctctctctcacaacgccctgccctctcccagccctgcagacccgccaccaggagaaggggtaggggctcctcccccaccctccccaagtctgagcagggaggaggctggatgaggtatgtgtgttatgagtgatgggaggggcaatactgagatggagaggcgggtggtgggggcggggtagtggtcatggctctggcaaccccttgtcctggcctggccccctcgtcctattcccagcaacccgtcctcccaccgatactgcacctgctgctccaccctgcctgccctagtgccccgggccaatactgggggaggcatgctgagcacccacatcaaggccatccccctcattagcaccaatggcccccaggagagggccctgtcccccacttccacagcagggactgggacagctgccgctctagagcaggtgcgtggcactcctgagtcgccctggctcctcccctaccatgtgtactcactcacacattcacgcagaggaacgcacacatacaccccacatcaccgagggggaagggaggggtccggggaggatgggatcacagctcatatgattggggagggtgggggagtcccaagtgcctataagaggctaaggctcttcaaggccttttctctgccgtgtccatggctgagaatggggatggaggggttggggtggggatggagggatggggaagacagcagacaggtcaggaattccactgggcccccaggcgtggtaggaaggtacaagagggcctacccatgggactggagtaatacaggattcagtactccaggagagagagagaggatagagacaaagacagcgcgggcagcccgaggccccagcagggtgggacaggcacatgcacaggtgacagcgggtgctcctccaggccctccacccctgttggaacacctgaacgattggggaaggacagtgccctgacgggcagcatagcattgccttcccatgtccgtgtgtgcatgtccgtgtgtgtgtgtgtgtgtgtgtgtgtgtagggggctgtggcaggctgagggtcagggtggggtggcaggttccccactgcttaagacatttttgccccaatagtgcaaagcgcaggaagccctggaacccttccccccaccccctgccccaatccccatggcttccgggggcatctgtgtccacccatccatccctgccgacatgcagccctgagcccagcaccctctggtctgctctgtcccaccccacctcctgctcccatgggaggaccacctcctctctccctctctcccctgaggagtgggcggcagccacagggagggggaggaggacagctcacccaagtgcagaccaacagagcaccctcaccaggagggcgagaggggctcaagccaaagtccctgaattagagaaaagaagaggggaaggggtcccggggcagaggggcagctggccaaaagagctttaaagaaaaaggagcaccgaccacccctcccctggggccccaactaagtgtcacttatctaaacacccccattctggtacctgcctgcccagagttagtgcagtgagtaggagctggggaggagggcagaggttagagagagcccagaagacagatgggaaacagggaaacagagtgctaaaggggtggagggttctgggagacgctcacgcacagccctcctacccccgacccaaccaatgcagcagcatccggtttctagctaatactgcaggatataaggagggtaggagttggagccacagttttttcctgggtgggtgccaaggtgtggaaggaggaggtggatggggagaggcccctagggctgggcacttaaaggggagctgtgtgggcagcagggcaggctggtgaggggccagctggcatccagcatgagaggtagatggaactcagcgggcacgagtggcagaaagcagaggacatactagggttggggggtgccaaaggggcacagagggcggggtatggcaaggggggtggccaggaccctgttgtgttaactcacagctctgatcggcagccctacccttggggctctggtgtgggggcatttctctctgatgtgggggaagaaggggcagctcgcaaagtgcatggggtggtaaagggggggtcctcccctctggtcagcctcagttaataacttaatatcatctctctctatcgctcgctctctcttttttgtatttttctctctgtctagtttttcttcatttgtcttctccccttgcttggtttccaaagtgcagttagaatgactataaattttaacctccagaggaggagccaagccaagccgttctttgcacccaggcatctggggaagtagagaggccctcagcctggaggggagacctaggccaaggaactgggtgggggctctctctcatgtgtgtgtagggggtgagttgagggcatcttcccccagcccacattcctccttcccctacggtcaaggtggcttgtcccttctcaatcctcccgcccttcccctaccttctgagaggatggggtcctgggaactgcaggacacagctcccccagcctcccacactgtcctttccatagcaagttcagttgtttgccctgtcccagggctggaggtctgaggagggacctgggcagtgcgggtgtgtgtgtgggagctgaatctatccaaggacgagaggaaggagagaaggggtgtgggggggtctccctcagcccccagctctgccccttctctccaggctcctccccaccagctccgcacaccctctggccgcctgaggctttagacttcctgatcctcaaagacctcgaggaagagtggggggaagagttcggtggggcactcgactttcatgtggaggaagcggctggcgtggcaggccccgatcatgcggaggtcagtcaccttcatcagcagcttgggccagaagtgcggaatgttgtgtttgcggtggttgacgtagtgctcgaacgccagcaggtacgcctcctgactcttctcgatcttgtccacacacagcaggcccgagcggtctgtgagggaagaggggcgtgaggggcgaggggctggccgaaggcctggagatggggagggtgaggtgtggggacgtgggaagaaaggactagaggggagatagaggcagagaggctgggggaggggaggggagaagctccccctgagagacgtggacaggagaagcacagggagagggaggcagctgggaagtggagaggggcaggggggtactggggggagggggcaatgcaaggaggacagagggacaggccgggggctgggggagagagaggagccttggagtggggaggactgaggttggtggtcagagaggcggggtgcagatggggttagggaggggactgaggggtaagagatgggactgggagacagaggagggatgaggggatggaaggtggctgagaacaaagtggggagtggggaacaaaggggaatgtgagtgacagagggacagggcagcgagaaggaaggagacaaagacaggaaaaggcacagagcagggatggggaggcaagggatgggcctggggaacgagtgagaagtgtgtgacagagcaaggaacaggggataggggatggcccaggtgacagagaggtagcccagaagaagattcaggagggagttgagcaacaggcccagggtccagccaatctctgggacccctggaagcttctgagccctcccgactaatcagcaggtacctgttgacattagcagcacagcctgcagcagagccacttccgtgtcatccaggttaaaggcagagagtgacttgcccagttcaaagatggcgtcggagactacgcccaggccgccattcttgagctgctcccgcttgacagccatctccccactcagcgtcagggtgtcgctctcagggtcgtagcggacagccgcccgcagggacatgatctccatgcagcaccccttcaggaggatgatctggtcttcgcaaggcagctgtggagcggcagggccacaggagcactcagcatacccctccccgcgtccttgagtctcccctagagtgtcctacgggagccgtgaggcccgcaaggcccccatggactctgaacggctgaccttgtattgggccatgtgcatgccctattccatttaagcctcacagttatgcctgtgaggcccggcgcagtggctcacgactataatgccagcactatgggaggccaaggcgggtggatcacttgaggtcaggagttcgagaccagcctggccaacatacatggtgaaacccatctctactaaaaatacaaaattagttgggcgtggtggcacatgcctgtagtcccagctactcaggaggctaaggcaggagaattgcttgaactcaggaggcggaggttgcagtgagcccagatcgcgtcactgcactccagcctgggtgacagaacgaaaatctgtctcaaaaaagaaaaaaaaattatgcctgtgagttagcacccatcattatccccagcccactccagatgggaacactgaggcacaggggatggaggtaacttaccccaggtcacatggctagtagggcagcctgtctccagcactagtgctctggaaaatgagaactttcaggctgcctggagttgggtggccgcatagacttgaaggatgaggggctgtggaggggagcacttggagccggctgatttcttagagcagccagaccttggcgtgtgtctgtatgctgtgtgtgtgtgcctgtgtgtttgtgtgtgtgtctgtatgtatctatgtgtgtgtctgctaggtgtgtgtgtgtgtgtgtgcctgtgtgctgggtgtgtctgtgtgtgtgtgtctgtgtgctaggtgtgtgtctatgtatctgtgtgtctgtgtgctaggtgtatatgtctgtgtgtgtgtgtgtgtctgtatctgtgtgtgtgtgtctatgtatctgtgtggctgtgtgctaggtgtgtgtgtgtgtgtgcctgtgtgctgggtgtgtgtctgtgtgtgtgtgtgtgtctgtgtgctgggtgtatatgtctgtgtgtgtttctatgtatctgtgtgtgtgtttgtgtactaggtgtgtgtgtgtctgtgtgctgggtgtatgtgtgtgtgtatgtgtgtctgtgtacgtatctgtatgctaggtgtgtgtgtgtgtccgtgtatgtgtctgcatgtgtgcctgtgtgctgggtgtatgtgtatgcatgtgtgtgtgtgtgtctgtgtatgttatctgtgtatgttgacctacaggaattgctccttgtccagagaacctcagatgagcctgtactgggtgaccgggggagcaggtttccctccagcacagcatcacatctctccccacttctgccactcacctcggagaacatgggcagttttttggcaaagtccaccacacgggtgatggccggggtgatgatcttggtaaactcgctgaaggcttccaggtccaccttgtctccgtccggcatggagacaatgggtgactggccaatgtcatcgggctagagagaaagacgggggtcagctggggccgcagacccctttcagcctctcactgaggctccctgcccaccagggggagctccaaggcagcttggggaagaggggccgcccgtgcctgagtcccaggcccaaagcttttccttcatcttgagcagagaatagaccagaaccagagctccaagtcagctaataataacaacggtagtaacagtagtagcagctataatgactgaatacttaatatatgatcaggcatcaggctacatgttttacatgtcttatttcatcctgaccataatcctaaaaggaataattataataatcaccatttcacagatgtggaaactgaggcatggggcagctaaataataaggttaaagtcatatgaccagcaagtggtaggaccagggtttgaacttgggcagtctgactcgtgactgttacacatctgcttggaatcagagcccgtgcccttaacagtgtgcactgtgccaccccccggcatgctccaccatgaaccaggtgctggttttctgccttccttcaccacgtatagccaactgtccatctcctcccaaactgatcatattttttgagagagggtcttgctctgttgcctgggctggagtgcagcggtgtaatcatggcttactgcagcctcgacctcccaggcttaggggatcctcctgcctcagcctcccgagtagctgggaccacaggcacacacccccatgcccagctaattttaaaattattcgtagagaggccgggagcagtagctcacacctgtaatcccagcactttgggaggccaaggcaggcagatcacctgaggttgcgagttcagacaagcctgaccaacatggagaaacaccgtctctactaaaaatacaaaattagccgggcgtggtggcgcacgcctgtaatcccagctatttgggaagctgaggcaggagaatcgcttgaagccgggaggtagaggttgcggtgagccaagactgtgccactgcactccagcctggacaacaagagcgaaactccaactcaaaaaaaaaaaaaaattattcatagagggtgggcatggtggctcacatcttgtaatcacagcactttgggaggccgaggcgggtggatcacttgaggtcaggagttcgagaccagcctggtcaacatggtgaaaccctgtctctactaaaaacacaaaaattagccaggcatggtggccagtgcttgtaatcccaactactcgggagacggaggcgggagaatcgcttgaacccaggaggcggaggttgcggtgagccgagatcgtgccactgcactctagcctgggtgagagtgagactccgtatcaaaaaaaaaaaaaattattcatagaggtgggatctctgtatgttacccagactggtctcaaactcctgggctcaagcgatcctcccaccttggtctcacaaattgctgggattacaggcatgagccactgcacctggtcccaaactcatcatttacttagcaactagcttgaccagggcctaacataatgcctggcacccagcaggtgctcaaaaatactgtgacataactgtatccttaccctctcctcccagtcactaagggcaggaaaaagaagaaaggtcgctcccgctccctggaaattcgatgaggaaggcaaggccctgtcctcattgagctcccagttggatggagtagacagtccagacagcaaggacacaaacacaagtgtataaaatctggacagcaaaagtgtgaagagtatgtattttgggttggattacactaagaagacttcctggaggaggcaagactccgagctcactctcttctccctgccacctggctactgctctccccatgccccctttctccttaccaggaatttccgcctctgtttccaatggctgccctgggcattggtgctgcgatgggcctctgtggcaatgtggatcagatcccactcttcaggagtgggctctggtcgctgctgcagtgatcggatcatctcctccttccgccgccgctcccggttctgctcaatcagcttacgcttggccacccgcttcgagtcatctagaaccactgtgaacagagaggcacaaggtctaacgcatggcaccctccatcccctttccataatgctcccggaaactactcttcctagagtacaggttggagaaaccgagggccatggaggctaaatgacttcccaaatcacctagcagttgggcagcacaacccggatcatgattaatccccgggaccatgtcaacaacagtttgggctgatccagatgaatatcatgttctggtctaacggattatggtgacggtggttactcgaatatcctgccacccaatccccagccaatggaagatgccctgtctcatctagaagtggggtgccttcgctgggagtcaagaacagtgtgctagagtgggtgcccaggagctctttctaccaaacgactccctctctaaggccctcgagtgttgtaaggcaggtaggcattggggcccacacagggatcctgtttccttttgcgcaggaaggaggacagcaaggaccaagacactgaacattctgacctagactggattgccactctgccctgtgggctctgagggtaccctggaaggaagctgccctcccagaactcatccccaccccaggccacctggctctattccctccacctgggccccttacagtccatggccatgcccacggcgatgcacttcttgaagcggcacagctggcactgattgcgggtgatcttgtcaatgacacagcagctgtcatatttgcaggaataggtgggatggaggttcttctggattgtgcggcgaaagaagccctggggtgggggagatggagcaggctgtgatcatgacatggcttccccttcctgaaccaaccatgcagtttactaggggtcaggggtggagagcaaggaaggcaagatcagtgaggggacctggcatcctcctgacaccatgagcccaagattactaggctcaaggacctgagaaatatatgccctcagcccccaggctgctgaggggttgggggtgtctgggtagtgtttgtggcagaggcaggaatgatgtctagagcaggcagctttgaacctgggataatgtgaggccttaaggaatagcagctttggaaatccaagtcgccgggcgcggtggcgcacgcatgtaatcccaacactttgggaggccgaggtgggcagatcaactgaggtcgggagttcgagaccagcctgaccaacatgaagaaaccctgtctctactaaaaatagaaaattagccgggcatgaggttgggtgcagtggctcatgcctataatcccagaactttgggaggccaaggcggatgaatcatgaggtcaggagttcaagatcaccctggccaacatggtgaaaccctgtctctactaaaagtataaaaattgggcgtaggccgggcgcggtggcttatgcctgtaatcccagcactttgggaggctgaggcaggcggatcacaaggtcaggagatcgagaccatcctggctaacacggtgaaaccctgtctctactaaaaatacaaaaaaaatagccgggcatggtggtgggcgctgtagtcccagctactcgggaggctgaggcaggagaatggcgtgaacccaggaggtggagcttgccacgagccaagatcgcgccactgcactccaggctgggtgacagagcaagactccgtataaaaaaaaaaaaaattagccgggcgtggtggtgggcgcctgtaatcccagctactcaggaggctgaggcagagaattgcttgaacccaggacacagaggttgcagtgagccaagatcgcgccactgcattccagcctgggtgacagaatgagactccatctcaaaaaaaaaaaaaaaaaaaaaaaaaagcatgcgattctatagtgtagcagttatcacatctgctttacatgcagaaggtcctaggtttgagccgcggtggaaccacggcggggtccaccccttggccgggcgcggtggctcatgcctgtaatcccagcactttgggaggcccaggcgggcagactgcctgaagtcaggagttcaagaccagcctggccaacatggtgaaaccccatctctactaaaaatataaaaattagctgggcctgcccctgtaatcccagctactcgggaggctgaggcaggagaatcgcttgaacccaggaggtggagctcgcattgcactccagcctgggtgacaagagtgagacttcatctcaaaaaagaaaaaaaaaagaaaaaattagccgggaatggtggcacatgcctgtaatcccagctacttgggaggctgaggcagaagaattgcttgaacccaggaagcagaggttgcggtgagccaagattgtgccattgcactctagtctgggcaacaagagcaaaactctgtctcaaaaaaaaaaaaaaaaaaaaaaaaggaaatccaagtaaaacctcattttccattttgctaaatgactttaaaaacaacactgacccaaaaaccattctcatatatgttgcctgttgtccatgcaggtggaattcataaaacaggggaaccaaaaaagtcaaggaaagggactgagtatgaactctagtagg

SEQ ID NO: 535 - DNA, 3511 bp, Homo sapiens
cactggggcacgaggcgctccctgggatcacatggtacctgctccagtgccgcgtgcggcccgggaaccctgggctgctggcgcctgcgcagagccctctgtcccagggaaaggctcgggcaaaaggcggctgagattggcagagtgaaatattactgccgagggaacgtagcagggcacacgtctcgcctctttgcgactcggtgccccgtttctccccatcacctacttacttcctggttgcaacctctcttcctctgggacttttgcaccgggagctccagattcgctaccccgcagcgctgcggagccggcaggcagaggcaccccgtacactgcagagacccgaccctccttgctaccttctagccagaactactgcaggctgattccccctacacactctctctgctcttcccatgcaaagcagaactccgttgcctcaacgtccaacccttctgcagggctgcagtccggccaccccaagaccttgctgcagggtgcttcggatcctgatcgtgagtcgcggggtccactccccgcccttagccagtgcccagggggcaacagcggcgatcgcaacctctagtttgagtcaaggtccagtttgaatgaccgctctcagctggtgaagacatgacgaccctggactccaacaacaacacaggtggcgtcatcacctacattggctccagtggctcctccccaagccgcaccagccctgaatccctctatagtgacaactccaatggcagcttccagtccctgacccaaggctgtcccacctacttcccaccatcccccactggctccctcacccaagacccggctcgctcctttgggagcattccacccagcctgagtgatgacggctccccttcttcctcatcttcctcgtcgtcatcctcctcctccttctataatgggagcccccctgggagtctacaagtggccatggaggacagcagccgagtgtcccccagcaagagcaccagcaacatcaccaagctgaatggcatggtgttactgtgtaaagtgtgtggggacgttgcctcgggcttccactacggtgtgcacgcctgcgagggctgcaagggctttttccgtcggagcatccagcagaacatccagtacaaaaggtgtctgaagaatgagaattgctccatcgtccgcatcaatcgcaaccgctgccagcaatgtcgcttcaagaagtgtctctctgtgggcatgtctcgagacgctgtgcgttttgggcgcatccccaaacgagagaagcagcggatgcttgctgagatgcagagtgccatgaacctggccaacaaccagttgagcagccagtgcccgctggagacttcacccacccagcaccccaccccaggccccatgggcccctcgccaccccctgctccggtcccctcacccctggtgggcttctcccagtttccacaacagctgacgcctcccagatccccaagccctgagcccacagtggaggatgtgatatcccaggtggcccgggcccatcgagagatcttcacctacgcccatgacaagctgggcagctcacctggcaacttcaatgccaaccatgcatcaggtagccctccagccaccaccccacatcgctgggaaaatcagggctgcccacctgcccccaatgacaacaacaccttggctgcccagcgtcataacgaggccctaaatggtctgcgccaggctccctcctcctaccctcccacctggcctcctggccctgcacaccacagctgccaccagtccaacagcaacgggcaccgtctatgccccacccacgtgtatgcagccccagaaggcaaggcacctgccaacagtccccggcagggcaactcaaagaatgttctgctggcatgtcctatgaacatgtacccgcatggacgcagtgggcgaacggtgcaggagatctgggaggatttctccatgagcttcacgcccgctgtgcgggaggtggtagagtttgccaaacacatcccgggcttccgtgacctttctcagcatgaccaagtcaccctgcttaaggctggcacctttgaggtgctgatggtgcgctttgcttcgttgttcaacgtgaaggaccagacagtgatgttcctaagccgcaccacctacagcctgcaggagcttggtgccatgggcatgggagacctgctcagtgccatgttcgacttcagcgagaagctcaactccctggcgcttaccgaggaggagctgggcctcttcaccgcggtggtgcttgtctctgcagaccgctcgggcatggagaattccgcttcggtggagcagctccaggagacgctgctgcgggctcttcgggctctggtgctgaagaaccggcccttggagacttcccgcttcaccaagctgctgctcaagctgccggacctgcggaccctgaacaacatgcattccgagaagctgctgtccttccgggtggacgcccagtgacccgcccggccggccttctgccgctgcccccttgtacagaatcgaactctgcacttctctctcctttacgagacgaaaaggaaaagcaaaccagaatcttatttatattgttataaaatattccaagatgagcctctggccccctgagccttcttgtaaatacctgcctccctcccccatcaccgaacttcccctcctcccctatttaaaccactctgtctcccccacaaccctcccctggccctctgatttgttctgttcctgtctcaaatccaatagttcacagctgagctggcttctgtggtgtgtgctcgtttggggggtggggtggaaatactgccaaggctggggggggccacctctccatctggtcagtttgtggggtgggtactctgccagcagatgggaggatatagggaaacagcacacaagtctaaggggggtgcccaagggggttattttcatcatatatttattacataaatatatagtaaaatagacgagcaacaattaccataaaaatatctttctttaaaatcctgacccaaaacacaacggggtgaaaaatcgcacataacagacatactgattgtcaacgtggggcaggagtaggagcccctcaagtcacccctgccggtcccacccctccctggggaagagacctacctccttccctgtttctggccacaacccccctccccccagcccagcaccagcttctcatacattcagtagcgcctctgggcagtgtccccctcccccccgcccaggagttcccagggcaggagttactgtcctccttatggacggtctctctctcacaacgccctgccctctcccagccctgcagacccgccaccaggagaaggggtaggggctcctcccccaccctccccaagtctgagcagggaggaggctggatgaggtatgtgtgttatgagtgatgggaggggcaatactgagatggagaggcgggtggtgggggcggggtagtggtcatggctctggcaaccccttgtcctggcctggc

SEQ ID NO: 536 - protein, 612 aa, Homo sapiens
MTTLDSNNNTGGVITYIGSSGSSPSRTSPESKDNSNGSFQSLTQGCPTYFPPSPTGSLTQDPARSFGSIPPSLSDDGSPSSSSSSSSSSSSFYNGSPPGSLQVAMEDSSRVSPSKSTSNITKLNGMVLLCKVCGDVASGFHYGVHACEGCKGFFRRSIQQNIQYKRCLKNENCSIVRINRNRCQQCRFKKCLSVGMSRDAVRFGRIPKREKQRMLAEMQSAMNLANNQLSSQCPLETSPTQHPTPGPMGPSPPPAPVPSPLVGFSQFPQQLTPPRSPSPEPTVEDVISQVARAHREIFTYAHDKLGSSPGNFNANHASGSPPATTPHRWENQGCPPAPNDNNTLAAQRHNEALNGLRQAPSSYPPTWPPGPAHHSCHQSNSNGHRLCPTHVYAAPEGKAPANSPRQGNSKNVLLACPMNMYPHGRSGRTVQEIWEDFSMSFTPAVREVVEFAKHIPGFRDLSQHDQVTLLKAGTFEVLMVRFASLFNVKDQTVMFLSRTTYSLQELGAMGMGDLLSAMFDFSEKLNSLALTEEELGLFTAVVLVSADRSGMENSASVEQLQETLLRALRALVLKNRPLETSRFTKLLLKLPDLRTLNNMHSEKLLSFRVDAQ

SEQ ID NO: 537 - DNA, 3012 bp, Homo sapiens
cactggggcacgaggcgctccctgggatcacatggtacctgctccagtgccgcgtgcggcccgggaaccctgggctgctggcgcctgcgcagagccctctgtcccagggaaaggctcgggcaaaaggcggctgagattggcagagtgaaatattactgccgagggaacgtagcagggcacacgtctcgcctctttgcgactcggtgccccgtttctccccatcacctacttacttcctggttgcaacctctcttcctctgggacttttgcaccgggagctccagattcgctaccccgcagcgctgcggagccggcaggcagaggcaccccgtacactgcagagacccgaccctccttgctaccttctagccagaactactgcaggctgattccccctacacactctctctgctcttcccatgcaaagcagaactccgttgcctcaacgtccaacccttctgcagggctgcagtccggccaccccaagaccttgctgcagggtgcttcggatcctgatcgtgagtcgcggggtccactccccgcccttagccagtgcccagggggcaacagcggcgatcgcaacctctagtttgagtcaaggtccagtttgaatgaccgctctcagctggtgaagacatgacgaccctggactccaacaacaacacaggtggcgtcatcacctacattggctccagtggctcctccccaagccgcaccagccctgaatccctctatagtgacaactccaatggcagcttccagtccctgacccaaggctgtcccacctacttcccaccatcccccactggctccctcacccaagacccggctcgctcctttgggagcattccacccagcctgagtgatgacggctccccttcttcctcatcttcctcgtcgtcatcctcctcctccttctataatgggagcccccctgggagtctacaagtggccatggaggacagcagccgagtgtcccccagcaagagcaccagcaacatcaccaagctgaatggcatggtgttactgtgtaaagtgtgtggggacgttgcctcgggcttccactacggtgtgcacgcctgcgagggctgcaagggctttttccgtcggagcatccagcagaacatccagtacaaaaggtgtctgaagaatgagaattgctccatcgtccgcatcaatcgcaaccgctgccagcaatgtcgcttcaagaagtgtctctctgtgggcatgtctcgagacgctgtgcgttttgggcgcatccccaaacgagagaagcagcggatgcttgctgagatgcagagtgccatgaacctggccaacaaccagttgagcagccagtgcccgctggagacttcacccacccagcaccccaccccaggccccatgggcccctcgccaccccctgctccggtcccctcacccctggtgggcttctcccagtttccacaacagctgacgcctcccagatccccaagccctgagcccacagtggaggatgtgatatcccaggtggcccgggcccatcgagagatcttcacctacgcccatgacaagctgggcagctcacctggcaacttcaatgccaaccatgcatcaggtagccctccagccaccaccccacatcgctgggaaaatcagggctgcccacctgcccccaatgacaacaacaccttggctgcccagcgtcataacgaggccctaaatggtctgcgccaggctccctcctcctaccctcccacctggcctcctggccctgcacaccacagctgccaccagtccaacagcaacgggcaccgtctatgccccacccacgtgtatgcagccccagaaggcaaggcacctgccaacagtccccggcagggcaactcaaagaatgttctgctggcatgtcctatgaacatgtacccgcatggacgcagtgggcgaacggtgcaggagatctgggaggatttctccatgagcttcacgcccgctgtgcgggaggtggtagagtttgccaaacacatcccgggcttccgtgacctttctcagcatgaccaagtcaccctgcttaaggctggcacctttgaggtgctgatggtgcgctttgcttcgttgttcaacgtgaaggaccagacagtgatgttcctaagccgcaccacctacagcctgcaggagcttggtgccatgggcatgggagacctgctcagtgccatgttcgacttcagcgagaagctcaactccctggcgcttaccgaggaggagctgggcctcttcaccgcggtggtgcttgtctctgcagaccgctcgggcatggagaattccgcttcggtggagcagctccaggagacgctgctgcgggctcttcgggctctggtgctgaagaaccggcccttggagacttcccgcttcaccaagctgctgctcaagctgccggacctgcggaccctgaacaacatgcattccgagaagctgctgtccttccgggtggacgcccagtgacccgcccggccggccttctgccgctgcccccttgtacagaatcgaactctgcacttctctctcctttacgagacgaaaaggaaaagcaaaccagaatcttatttatattgttataaaatattccaagatgagcctctggccccctgagccttcttgtaaatacctgcctccctcccccatcaccgaacttcccctcctcccctatttaaaccactctgtctcccccacaaccctcccctggccctctgatttgttctgttcctgtctcaaatccaatagttcacagctgagctggcttctgtggtgtgtgctcgtttggggggtggggtggaaatactgccaaggctggggggggccacctctccatctggtcagtttgtggggtgggtactctgccagcagatgggaggatatagggaaacagcacacaagtctaaggggggtgcccaagggggttattttcatcatatatttattacataaatatatagtaaaatagacgagcaacaattaccataaaaatatctttct

SEQ ID NO: 538 - protein, 612 aa, Homo sapiens; identical to SEQ ID NO: 536

SEQ ID NO: 539 - DNA, 58478 bp, Mus musculus
  misc_feature (1)...(58478): n = A,T,C or G
aggtcgtggagacgagtgtcgagcgcagggctagctcgcccgggatagcctgagagcgtcttcttcgcgggtgctggtgccgccatcttggatggcgggagttagagccgagcggacttgaggcgggaaggcttctctgttgttctccgcaggccctcggacgggccagctggccgagctttggggcgcgtgccctgaggcgcggggcgctagtgcagcgatgcggggcctccccggggccccgtcccccgggctggggacacgccgaatgtgaccgcaaccaacgcgttctctcaaccaccgctgccgctgcacgacgggacccggcactgcccggctccctcaggtaggccacagggctgacggtgcgaccgtggggcgcagggtcggccaggccgctgtcatcctggtggcgggccgggcgcgggccgggtgtcatggccggcgagccagtttccacacccctgctcagatttcccagtgtttctcggaaacgtgccagcgccactccggtgcccagcgagcattcctcatattttggcaatgggggaaaaaaaatcctcccagagctgcccagtgactgtgttgtcactgggatgggctcgttcttttttctctcgggctgcagaagtggggggagcccggccttgcacctcctctcgggctgcttcgcttaagtgacacccttttagggaagacaagaggaatcggggaaggcagcgagagaaaccggtcagggtcccgcctcaaaggcttgcgacctcgcctggggcttccaaatgggtggcccgggatgctcgcgatcgggagccaggctgccttttgtgtgaagcgacaacctcccaggcttttgcagagccggtgcatggatgcagagttgggacacaaacgaggtgaccgtgttcattcattgttctctctccagggcccagggtgtgcctctggttttcattctttgttaggagggacagtcgaatctcttctttcccggttgagacgtaactgggtcctggggaatgggccaggtctgtgtatagaagtggggaatgaattcagggcacgtctgaatgcctgcaatgcgtcctgtggggtcgttggagactcagctcctggggcgtgaaaacaaccggaggtgataaggcttgttttcccaagtgttcttgggatttagaacagttaggtgcagagtcgagaagccctgaggttccttgcttgcttctgcgcggagtttgaaggactgttccgccaggtgaggcagaggggaggacattgtcggcggagggaacagctggcaccaaggctcagaggcatagcctgcgggagttgggatgatttgggggagcagctagtaaatgtggggtgcaggaagacagacgtcagggttcaaaaggaaaaattgatcgcttgtgaagggtctgtgtgatggatagtaatgaactagttcatttattaattaacttcatgttgtgaatgtttagttcttgctggttactgctttgctcccctcccgctatggtagtgaacaaaatttaccttgttaagtcttgctaaccagttttggtaattgatagaaaatgttttgtgcttgcttgatcactggttcctatttggagatactcttgcagctatttctaaggttaacacattccccaaacagacagaaattggcagattatagaaagcacctgaagaagtgtagcatgaaagtatttttaattaaccctatttatgtagtagactcttttctttggacagagtccccaggttgcagctttgttaagacgtctgcagccctgtgaacattcttcttctaaaatagctccttcgattaaggcttatgctgaagtggctatttggaagtgaagacatcaggagcagtgtccaaatctttggtgctgtgaaccactgaaaaccactgaggttcttttggtttggttttactcttatcacttcaagggctaagtaagctgtttaaaatccagcagcaacatttgacctagccgagactggagacttggaaaaataaacctgctgatgtttctgttctgaaggcttatcttcaggtctgcaaggctgtgattgtgccctcaagtgcgatcaggcagcttggtgaaggtcttgtccatagttgaaaagaccttgtgtgcctgtgaagtagagggcttgactgaagggcatttgaatgcattttaagggatttggcccagtagtaaaaagactgagaaccttttacttatttatgacaaaaagtatccaaagattaacaatgacctgcatcacaactgctcggaacccagctgcttttggcttcaagtcaattatgctctgatgattaagctacatgacagttttggaagttaatttgatatttgcagaaggactaaatatttttaatggaaatacaatgactaacttcaaattgctcttttaggaagtctattaatgaatgtttgattatttaatgttaaaattcagacagaaggttgttactcacctgctacctaaaaacatgaaagaatgctttggtttgcctgttaggtttactagtaatgagcctgatcttgggaggagcttgttaactaaacagcatgccttaatgttgacttgcagatcagaatttaaatattgtctctgccagacagtgaacaaatgtaccagtgaggggctttatgaaaccttaaaagtcaagcttcaacttaaaattttgttgtgttatttttctaaagttgtaagtagaccataaaaaatcagaaatgtttttttttttcctttcttgattttttttttcctggatctcactgtgtagtccttggatgacctagaactcactacgtagaccaggttatccttgaactcatagagatccccctgcctctgcctcccaactgttgggattaaaagtgtagattctttaggaggttgttgagtttttgttttgtttgtttgtttgtttttatatgtgtacacatggatgggtgaacttgctaattgttcatccagtgggttcaaaatatactaatataactaaatatttatgttaagattcctctgttatggggtaggtctaaacccttgtctgcaatcctaggatagtaatgtcagattgttttattttgaccttcaaagttgtgagtaaaaagtctttagttagtcattaaaattgacacttaagttttgtagtgtctgagtcattctgttacttctttgctcccaggattatttgtatagctcttagtgattttagtttttaaaattttaattatccatgtatgggtattttgcctgcacatatgtctgagaaccacacctgtgcctattgccttggaggttagaagcgggcatcatctggagctgaggtcacagacagttgtgagctagcttgggggtgggtcctggaaactgaacccaggtcttttaattgctgagccatctctctagtcccttagtggtttttgttgtggtgattgttttcattttattttatgttatttatttatgtatttattttacttttattgtacatgtgtgtatgtttgtgtgtctgagtgtatatgcaccaatgtctgcagtgttagtggaggtcggaagagggcatcagatcctctagagttggaattacaggtggctgtgagctgtgtgggttctggaaactgaaccagattttctgcaagagcattaagtactctaattgatgggccattgttccagtccaactgttgtttttaagtacatagtctcagggctggagaggtggttcagtaggtaagaggacttgttggttttgcagagaacctgggtgtgggtgactaagcacccacatgggggtttacaactgtctgtatataactccagttcctaaagatctggcaccctcttctgtcctcatgggacacaaggaatcacatgatacatagacatatatgcaggccaaacacccatatacataaaataaaaaaatgcatgctttattaaatatatatatgtagacaaggctagcctcaaatttgtgatgcttctgtttcagttatcctgagatttgggattacaggtgtgtgctacaacacttagtgattgtagacgctcgagttctgaaattgtactgagaatctcagtttaactgaaggaaatttcaagtggatggtatttctttgttatttatttagcttggtgcaggctatttgaattttctttttttaattgctcagtgtgttaattggcatttcatttcagtcagtgtacatagtatattttgaaaaacacttgacacagttcacagttttatttttagaccaggttctaaaggatttagttgggtgttgatgaagaattctaaaagagctattttagaatttgcaaacccttgcgatttagctgtatttacatttttggttaaagaatggaaaacagccggcaatgagagtttttttttttttttttttctcgagacagggtttctctgtatagccctggctgtcctggaactcactctgtagaccaggctggcctcgaactcagaagtccgcctgcctctgcctcccgagtgctgggactaaaggtgtgcaccaccacccccggctcaatgagagttttaagtaaactcttgtatggcacattccttcagtgaagtggtgtggtctgtgttgtgtagaattactgtcctctgtctgtctgtctctgtctgagacagggttcctttgtggtcctggctgtcctagaactttcatacaatgtagacgaggctgacctgagcacacagagattcatctgcttctgcctcccgagtgctgggattaaaggtgtgggcaaccatgccttgcttcttgccctgcttcatcttcctttgtctaactattgtttctaatttattgtcatccagcagcaagagtaatcacactgactgcttgaatcaagttctcccctctttatttccttccatcctattatgaagtaaaagttctctctgattttttccttgactctgtaatgagacatgatgtttgggcaaaacatctcccttttctgtttttatggatacagtcctggggattaaacctagggctttaagtggaccaggcagacattgccattaacaccgccagcctgtttgcctttcttcagcccagcacatcaatgtagaagaatcagagtgggctgggattgtgtgctcatctccctcctccatgctgggatttggtctggtgtgctttgcaaaggttttgtacatattgtcccaattgctgagagttgatatatgcagctgctctgttgtgtccagaggtgtttccttgtagtcaccactgcctctggcacttagatgttctcctgccttctgttcctcagtggatcctgaatcttttgagatgtagtgtgtcttttcccttcaaggctgaacatgctgcagtctcttattttctgcctcttggccagttgtgggcacagcacagttatctactgcaaatagaagcttcccagatgaaggtagagagatacactgcactatgtatctctatgtaacaagaagtcttttaaagagtcagtttaatactgtgctcttttagcagcctaatagtagtaaattttcccctagggcctatgacctatgtagtcatagggtttttagcataataatgttaccaggtattgggttcttactgtggagtgggacttaaaatccaatcagaaatgattggttgctcacatgctgtttgtgccaccattgtaccagtgggtatgtcctgccaggctagtcattattgtagcttgcttttctcctttagcactgtgcatagcactctccagccctttgaaagctagccaataaaggtgaatcttccaggtccataccagcttaatttcaccatgtcctatgactcaaggatgtggtgtcttcagcaatggaggatatccaagaacagtgacaatatcctgtaatgctgggagggtggtgtccgtgagacctcactaaagtagtaagccatttctggcatgggtctttttattagtaagcttctgatgtctactacttgtaactcagctccagggggggtgcttctgcgctcacatgcatgtacccctcccatgcatgtacataacattttaacgtgtgtgtgtgtgtgtgtgtgtgtgtgtgtgtgtgtgtgtttagatatagatattttccatgtgtcttttttgaaaggtctttctcatgctccctcctgtaccctactttctgttcccaccccagtttaacccttcctgttccagtattctcctttaaatcttttttttttttttttttttttttggtttttcgagacagggtttctctgtatagctctggctgtcctggacctcactttgtagaccaggctggcctcgaactcagaaatccgcctgcctctgcctcccgagtgctgggattaaaggcgtgcgccaccacgcccggctcctttaaatcttgattcctttatgtagttggtcttgaacttgctatgcttccaagaatggccttgaacttgtgattttcctgcctctacttctcagttgctgggattatagacttgagtcctcacatccaatttatgtgatgctaagtatcaaacccaggacctcctgccccagatttaaaagtgatttctaatttatttactttacatatatgaatgttctacctgcatgcatgtatgtgcatcctgcatttgtctgttggattccctggaactagaattatggatggatgatgcatactcataatcacccagccatgtgggtgctgctggcaattgagtctggggcctctgtaagagcaagaaatggagccatctcttcagctactaaatttctaaatttttgagatagggtttcatgtagtctacactggctttgaattcattatatagccaactctagccttgatctaatcctgtttcagtctcccatatgctaggattacaggtgtttgttatagcctacgaaaaattattaagattatgtgcatgcatgtgcctgttggggtacatgcatgtgagtgtagaagcctaaggtatacgagaggcactagatctccctggagctgagttacaagtagatgttggtcacccgacacagatgctgagactgactcaggtcttctgcaagaatagtaaatactcttaattacttacccatctatctgtccagcgcacgaatgaaggtcagaggaagcagtctattctttccctctatgcaagtcctgggaattgaatcgagatcatcaggtaagcatttaaccactgaaccacttgccagccttaaaagcggtttttaaaagtactagtagagggggctggtgagatggctcagtgggtaagagcacccgactgctcttctgaaggtccggagttcaaatcccagcaaccacatggtggctcacaaccatctgtaacaagatctgactccctcttctggagtgtctgaagacagctacagtgtacttacatataataaataagtaaatctttaaaaaaaaatactagtagatgcaagcactctttgtgaatggtacagggtaatgagtgcaagttgttactgtgaaggattttgtctgatagaggagcttcgccaagcttactgcttgttgttcttgctcctcggagagtcactccctgaccttttgctttatggcctttattgtacagttatttgtgagctcctatctaggtagataataaactccaatgattgatttcttctttatgcttatttattgatatttgtggggaaatttcattggagaggttgagggaccaggctgtttgagaatgaattgaaatcccaacactacttgttttatacttctctctgtctgtctgtctatctgtctctgtgtgcagacatgtgtacatggtcagaggacagtttgcaggagtatattttcctaccaagtgggtcctcaagatcaaactgaggttatcagacactgtggcaagtgtcattgtctgctaagccatcttactggtcctattctatgctgggtaatcacaggctggccctgagtccatattcatctttctgctttagtctcctgagtgctgggattccaggtattgtgttatcatgtccaccaacactaagcttatgtgtggattttttgagcagagatcttttgtagttgacgttgtcctgtagctctagctgaggatgaccttgaactcccaaacgtttgccttcatctcgggagtgctgagattccccatgttctccatcatcgttctgttgattctgtactgagtgatgaggaagaatatcatgtggtggaggctacttgcctcacggtaaacaggaagcagaaacaggggccctgggacaagctagagcccctaagaacatgcccttggtgacctactccctaaaattttcagaatttcccaagagcaccccactagctgtgaactaaaccttactgtaagagcctttcagcagagatggaagcatacttcatatccaaaccattacagctgcttccattttcctttaaattgatataaagttctggctaagtggtgtgggctggcttcaaactctcatttttgagctcttgttcctcttgcctcaactttctaagttctagggttacaggtgtaatgtgatagcatttgcatgagaaacaattttttaaaaatcattattgtatagggcaacttttaggagtcagttttcttattttatgatgttagacctggggattgaacttgggtagtcaggcttggcagcaagttcctttacctgtggatctgtcttgctggtatgagaacggttactttttcattcattcacttatttatttagaaataggatctcactgtgtatcccttgctggctcaaatcttgcagtttagaacagactgtctttgaactcagagatccacctgcctttgcctcctgagtgctgggactaaaggtgtgcattaccattctgcaaaagactagtttttaaaactacttgttgtgtatgtaaggtttgccacaaaaatgtctgattttaatgtgaaatgaagtcattagtgtttctgtctggtgagcctgagtgagataacattggcttttgctgctcctgttctcctcagactgtcactttagcttcttattgtgggcatcagactttgcacattgtatatttaggtatttgtgctaatgttcgactttgtaatttgttcatttaaaaattattagctactacctaaatgaagaagtagttactgatttggagatgaaaagaaaagctgagtttaaaaacagttcaaagccacagttttggctgtaccgttgacaatcactctgagcagtcagactctgagatagaaggaccacaaaagtgcaagaccagcctaatctacacagtgaaactcaagatcagtcaactaaccagccagccagccagccactggctatccaaaacagttcaaaagatttaaagaggataatgaaaaaactcattttgtggtgaggtaaaaatgaaattggtcccaggcacctttcactgtggactgattgtttctgaactacctcatactcagtttgcattttagaatcagttacacttcaaaacaacaaaatctgcttctcatacttgggtatcgaatcttcgcttgctaacatttagaagggtagactggtccatttctttatgtaagcctgtgtcggccagtcatctgatgaagtcaccagtttgtggccagaaattgagaaagagttgatgaggaaactcaaaatattgacacatcctgaccagcttgcagtgcatgagactgcccttttggactggttgagaaatggtagcataagccttgtgcaaacgagaccattgctgttttctagctgggatgagatgagaatcagaacagctcatgtttgctcagcagaaactttgtgaggcccctccccccagaatgtatgctcaattgcagtggtatcttcaaactgattactagagttttggcttcgtaggtgtacatgtccagaacattttatttttttaaatgtgattttatttagttaggctcctttaaaaactgtttttataattgtgttcatgtgggttcaggtgcctgcatatctctctctctctgtcgctctctctctgtctctgtgaaatcactctgtagaccaggctggccttgaaataagaggtctgtctacctctgcctcctgagtcctgggattaaaggcgtgttcaccactgttccgcagtgtttgttattttaaaattatgtgtctctgtgtaggttgttagtgcaggtgctggtgggtgccttgaggacatttgatcttctggagctggagttacaagtggtggtgagctacctacctaacaggggtgctcgggctaagctctagtcctttgcaagagcagcagcaaatgatcttaaccactgaaccagctcttcagttcccagagccttttaaaaattttgagaagcggagagatggctcaacagttaaagaacattaaccaaccttccataggatgaggtttgactcccagctcccacccggtgtctcacaaccatgggaatccagacatacattcagccaaaacaccatacacttaaaaataattaagaaaagaatttggagataatctgcaaacaagaatggacatgatgatgtataattgatacagaggagattcagaattctccaggtaatgtgagcagatggtttataggctcacagttggtcagcccttatttcagaacctggagctcttttggaataggtaacattgttaggtagctaactcaggaaatctactcaggagtagtttctgatcaatagagccatcactgcttctataacaaagaacaacggcatatcatttggtagcttatgctaatagtttgctttctctgtaatcttaaaagactaagaaacatgtcaggctgcgtagatattcatactgtaatcccagcagtgaatatgaaggaaggagggttggtatttcaaggccgacctgggctagacaatcaggccctgtgttaacagagcaagggctggggatatagctctgtagtagagcactcaccctgagctttattttccagctcctgggttgtggggcacagcatggtgacactagacatgtacatgtcaagtagaagagaaagcaacacaggtatcctgccagaagttcacttagctcttattaccttattttgtcttctgctttcaagtcaactagaaactggccacagcatgtaacattgtagcacaattgtaactttaggacggtgcccagtttttccaacaagtaggaatttctttgtcttgactaatctttagaactagtcatggtttgtagttgagcagtcttgtgattacatggggatttattttacccaacctacatttattaccacctatgaggaaattttttctgtaataaagataaaaaagaatgataacacaaagttttcatgtatgcatgtacacaatgacttaatagacattttaatctctacaatatatttgcagattgttagctgcataaatagaagttcataattttaatgtatcttctttcatttaatggctaagaagaaggaagggccaaattggaaagcttgggaggatgactgctaagagaactacagattgctaatgacgtgtcagctatagtctgtattttctgttctgtcacacgtcctataaattactccaaagtagtagaatactagcatcattacataataattacctcaagtccagatgtatataaaatttatatcatttaagtcaatactacagtagatcagtaatgtaaagcctgaggacccgattattatttttcatatatccgttgtgcatagtcctgggtctcaccaatttgtttgtttaactcttaagttgttccctgtttttttaaagcttgactttttctttgtattctttttcaggtgtaggtaattaaacttcaggccttatctgtgctaggcaagattttgaccatggagttatttcctagccccaaattttactttttcttcgtctaaagaagagataagaaaaatacttgcttgatggtggtggtggtggtgacgatgacttgaagcaggtctcactatgtagttatgtctgctctgtaacttatcatcgtagaccagtctggtcctgaatcagggccacatgtcaccatgcttggccctgacttgattaattctaacagtactgtgagacaatggagagaactaaataaactgtcttctacagttctgagtttctctttattgatgaagactttctacagtcaatactaaccacatagtatattgttatattttcagaaactagaggttttttgttgttgttgttttgtttcccaagacagggtttgccctagttgtcctgaaactcgatttgtagaggctgtcctcaatagagagatctatgtgggtgctggaattcaaggcttactagttttttttttataaatgcagatgaaattttatgtatgtatttatttatgtatgtgagtacactgcagctgttttcagacacgccagaagagggcatcggatcccactacagatggttgtgaccaccatgtggttgctgggatttgaactcaggatctctggaagagcagtcagtgctcttaactgctgagccatctctccagccccagcttgctattttttaactgtagtgattagacctggggctatgtgcgtgggacataagcgtttgtcacttaccaccgagctctatgattttaaatcgtcttacatctcccaggtcagggactggaatgttggcccagcagttcagagcactcactgttcttacagaggatctgggtttggttcccagcctctacatgatagcatgcactgtcttcaagttcagttacaggagatatggtaccttttagcctctgcagacactgcacacagatggtacacatacatacatgcaggtgaaacacttgtatacataaaataaaattatttagaagtttttcaggctggcggtggtggtgcactcccagcacttgggaggcagaggcaggcagatttctgagttcgaggccagcctggtctacaaagtgagttccaggacagccagggctacacagagaaaccctgtctcgaaaaaacaaaaaagaagtttttcaggtcagccttgaacttactctgttgtccaaatagaccttacacttgagactcttctgcctttcctcctcctcttctctttttcccttgtgctagggattgaagtggcttgggcaagtgctgtagctttgtgtcatcttagtttgctttctttttataaaatggatgttatttatgtattttgtgtgtgcgtgcatgaatgctgtagtatgtataggtaggtcagaggacaactttcaggagtcatttccaccaagtggatgctggagatggaattcaggttgtcaggttggtggcagccacttttaccagttgagccatctcaccagccttgtttctttgtattaaaaacttatttatttttcattcatttgagtgcgagtacctttgttactgtataatacatacatgtgatcagaagaaaaagtgtagaacctcctagagctataggtgcctgtaagtggccagatgtgggtgctaggaattgcacttgggtcctttggaagagtagtaactcgcaattgctgagctagctctccccccccacccccaattttatttttaagatgtgatctcatagtatagctcaagctggcatagaacttactatgtagaacccacccctttcagtttcatacttttaaatgaaagaatatttgaagaaaaactccagaccttagtctcatgtatgcaggcataactagaacttcatgtctagctgagtatgactttgagccttcttctggagtgctggcctctccactcctggtgctaagacttaggtaggtttcttagtgtgaatgtaataactcatttgctgaagcatttttggagaaagtttaaaaatgggcttgtatatacagtatttagtgcttgtagatgtgtccttacttgggaaggacaattaataagatttggctggtttacttaagcagagtcaaggaatagtgcagaacaaatctgacgtcgagcttttcagttgcttctaaatccctaccccctttcttttttgacagactgccctgcctgggctgggactctgtagcctccaactcacagagatccgcctgcttctgcttctgcttcttttgttttgttttgttttgttttgttttgtttctttttgagacagggtttctctgtgtagccctggctgtcctggaactcactttgtagaccaggctggcctcgaactcagaaatccgcctgcccctgcctctgcctcctgactgctgggattaaaggcttacaccaccacgcccggctctgcttctgcttcttgattgctgggtttagaggtatgtacactaggcctgccttggactcttttcagcagaaaaatttaaacttttggttcttatagatttaattctggaaaagcctctggaattagtgagggtcattagcattagttatttttactacaatgaaaaggaatttgctttgactttttaggagaggacctattcaaaagcacccataagaaaggctgtgcgtgcttcagggaggctcttctctgcaggtagtgtagaatagccttgctggactgaaagaaggcattctttcagtctctaatatgagccatgtaccttaagatgtcaggacttgcctggcagtggtggcacactcctttaatcccagcacttgggaggcagaggcaggcggatttctgagttctaggccagcttggtctacagagtgagttccaggatagccagggctacacagagaaacccagttgtcaggactcaaactacttaaaacaatactgtaaattctggtaaatgttacatttagtaattgtaattgtagtctccctagatttgttttccttgaaggtatttgaagtatatgcttttcttggttaatcttacaccttggatatggccttgctttcttatgttctctagcgtcatgtaataaactcaaaagaaagccaacaagatcctcccaggacctttaatagtttgttttttaaattatgctttattaatttgatactgtttattcttactcctttttttttttttttttttaaagttgagatacttgtgtagcccaaggtggcctcaaattcactatgggaaaggaccaacccctgaccctgggattaacaatgctaccatgcccaactttacttatttttacaaaaggtttatttactatgtgtatgagtgtgcgcttgtgtgagtctttttgcaccacatgcatgcaagtgcctgtggaagtcagaagtcatcaaatcccctggcaccggaattacaggtggttctgagttgccatttaggtgctgggaaccaagcctaggtcctcttcaacagcaggaagtacctaacctctgaactctctctccagctccttactcatttttctaatgctatggattgagctgagggcatgcttaacacatggtctaccattgagccacaccccatccctatttactctgctttagagatgcctctaggtgcagaaattcacagaaactcattatagagcagaatgaatgttatcattaggctgaccagatggctcagtgggcaaactgcctgtcactggaacctcacaattgatcttagatacatagtgataatctgtcaaaaaagaaaaggggagtgtgggtggggagggggttcagaagccacacccatgtagaacccatgtaggtagaacatatttctgaaagctatcctatgatttatacagatatgcaatcccctcaccccaatgataatagataaaataaattcatgaaaaaagttgatctgaatgtttctatgttttagccttagtatcagtgtgaaaaatccctgatgtaagcagtctgcaggaggaattacttattttggttcaatttaaatcatcataacagggaaggcatgcttgaacaaaacagctcacatggtgatggctaggcaggagaaaggcgagagggagaaggagggggaggggctgaggtgctcttgtcctttccctggtattctacccgtgtctcccagcgtatgtataggaaccatgtggactacacccagtaggggccctcttcctgtgctcggtcctttttgtgaaacactccttccaggtgcttctccacctagtcacattaatagccatcacaactcttatttttcaaaacctggtattttcctgggttttggatgtcagaataaattatactggtatcctttggagagctcttcttagaatttactaggagttatactcagaaataaatttgctttcttgaattcattcgattaccctatctgtgtgtatatgtctctctgtgtgtgtaactgagtgctgatgtccacagaagccagaggcatcaagtctctcaggaactgaagttataggtgatcatgagcctcccaccatgggtgctaggaaatgaagtgggtggagttctctgtgattaaatgaacattgtttctcttgcagattttttggaagggtgtagctcagtgatagagtatttgcctaacatacagaggaccaatgcttgaatttgaaatttcttgttgccaactgatttatttttatttatctatttttattttttatttttttgacttttgagatagcatttctctgtgcagcactggctgtcctagaactctctctgtagaccaggttggcctcatattcacagatctgcctgtctctgttgggaggtactggagtactgggattaaaggtgtgtgctaccaccaccaaggtagccaactgttttttgacaagtaaaaccttcttccctnnnnnnnnnnnnnnnnnnnnnnnnnnnnnnnnnnnnnnnnnnnnnnnnnnnnnnnnnnnccttccttctctctctctctttttaatagtagagcagtgctggggattgaattcaggtgcttggttttatttgtaatttgagaacctatgaagggatgtgtcaagcatttgtagaaaatcagactttggaattcttttgcacagtagagcttcctaatggcttcagttggatggtgtgtgtttttgtgtgtgtgtatgtgtgtacactgtatgtatggtgaacgttttcaccagagattgctgtccggtgtcttgctcagctactagtcaccttattttttgagaccaagtcttttgctgatcttagagccgcattgatttggctatgtgagtttcagggatctgtatgttgctgtctctttagtggtaggattgtagataaatgctacacccaaccttgatttggctatgtgagtttcagggatctgtatgttgctgtctctttagtggtaggattgtagataaatgctacacccaatcttttactggtgctgaaaatccagactgatgtcctgatgcttgagtgacaagtgctttatcaactgaaccatctctccagtctttcagttgggtactggttaataaaattcacagaagaccattgttttggactgccttcttgcacaagaccacagaagatagcttgtgccagatgctgctaatcagctgaactccttaatgggccagttaaaagacaaagatatcagccagtcagagaggacagtttatctaagccagcaaaaggaagactccctgtattaattatttccctccctccctccctccctctctccctccctctagtcctgtctgtcttggaactcagtatgtggagcaggctacttgaattcacagatttgcttgtctctgcctcccaagtgcttgtctgtattactgatcttataaggaaaataaacttaagacagctgtccacttttttgtttcttccttctttaggtttcatttttctgtgtatgtgtgcgcatgtaagtgatggcgtgggattgtatgttgttctcagttgctttctactttttattttttgatttttgagacaaggtctcactgtgtatccctggtctcaaagagaccctttttgcctctgccttctgagtgttgccattgaagatatggtccaacacacccagttccaccttagtcaacttataacagttcttgggccacatgggatccagagatggaactcaggtcattaggtttggtggcgtgtgcttttacttagctgtgttgccagtctcactttattcttttagacaggcctctcattgaactggagcttgcaaggttagattggctggtcagctagcctcagacatctcctggattaaaggtgcatgcagaaagcacacgggtgctaagaagactcagatactaaatcatgtggtggagcccctagatttcttcttatattaccttttaatatctttaaaactaatctttgcttagctgattaaaacatgtgtcctgtcttgtagagtgagatgttaccaaattttagaactatagtttaaaagccttttaattactgggtgtggtagtttgaatgacccataggcttatatattagaatttttggttcctaattggactaggaactaggtggactgtttaagaagaattagctgggcagtggtggcacttgcctttaatcctagcacccgggtggcagaggccagtgatatatgtgagttctagtctagcctggtctacagagctagttccaggacatctagggatacacaaagaaaccatctttaaaaacaaaaccccaaaagcccaagtaatgcagtaacaacccaaaactccagaaggattaagaggtatgcccttgtagaggaggtatgtcatggggggtgggcttttagggtttaaagcaggacagcaggcccatactctccctgtctactgcctgtggaccaggatgttaataagtaagctcttagccacttctccagagccatgcctgcctgcctgccaccattctttcatggtggttatcaactgaccctttgaagctgaaagcaagtccccaattaagtgctttctttttataagtatccttggtcatggtatctcattatagaaatagaacaataactaaaacactgggtcttagctgcagtgccacttggagttggcacatacttgtaatcccagcacttgggaggctgagtgattgctcaaaggtcagggccagtctggactacattgaattcaagaccaggcaagggtacatagactctttctcaaacaaaacaaaaaccctaaaactgaaattacaacctataacaaaccaaaatgaaagttacttgtaatcctctgcattgaagtagattatatggatacatgaaaataccaccatgaaacctattattttgtccaattgaattaacaaaagtaataaagccagttaagatccttaaactaactgtaattctgtcttattgcagtattagctgttaacagtagcttctgtttgcagcttgtttgataaactggactcgagttaactgccagtcaacagtttactctgctggttctgtagtttcttcatagttgttagagttccaggtctgagcataacttcattacacggatggcacatcaatgaatagtggatctgatgattgctgaattgcccagatggccacatttgttattcaggaaatagatcttagaggcctgttataagtttaacacccttaaatacagagggtagatgggtgacatgaaaagaaatagggagctaagagtgatggctcaggggttgagagcacttgctatgcttttagaggacctggattcatttcccagcatccacatcacagctctaaactgcttgtaactccagttccagggcatccgatgccattcttgtcattgttgtggttcataggtgtcatagctgggcaggactgctggttgcttcccacctttgaaagcttgcatggtgccttctggtaccatgcctcaggtaggaagcatttaggtcagtttcagctcagaggtctttgggccctgtatcatgcataatgtcttcagcagtagcaacttaattttcacccctggggtaggagtgtgtagccaagggcagtagcttctaatatcttgggagtctattggacagccttgaccaacaactcaaaagatggcttctcacacctgccttgggggtttttgtttgatggtctttgattcttggagggagtagcatcagcccagatgcaaaattttcacacgcagacgcatgcatgcactacaataattcaccactgttttcttgctgaactgcaaacaactgtcactgggaaccatgaaaataaagataaaaaattctgggattgggaaagcaatagagaagggaatagtggagtacagtgattttatcagggaaatgggaagagggggctgcatgtgtgtgtgacatgtgttcacttggcatgtttgcatggcatgttcaggtgcatgcacaggtttgtgggtattaagtgtgatatcaagtcctccttgatcattcttcaccttatatattgaagcaagagtttctaactcaacctggagctggcatatttggccaatctagctagtcagcttgttctcctgggatccctttgctctatcccgagtgctcagattacagatgtgctgccacacctgtctggccttaatatgggtgctgggaattctaactcaggttctcatacatgtgttaaaacactatccactgaaccttttctcagccctccaatgatgcctgtcccctccttgtgttttagaatattacactcttcaagggtcttctgagtgttcagattcaagccatagctccttgtaatactcatttaagattattgatacataggattcctttacttattgagacagagttttgtgtgtctgaggctggcttgaatttactgtgtagtcttagtataacattgaacttctgattgtcttgcttccactgttagctgggattagaggtatgtaccattgtgcatagtttgtaatacatagactttaatatactttcactttaacagaaattttaaaagtactttttaaaatttaaaattttaaaatttaaaagtgtgtgtgtgtgtttctgttgtgtacagttgttttccgagtccagaagatggaataagatctggaactggcagttgtgagctgtctggcaaaggctggaactgaccttgattcttcccgatgagaagggatcttaacccttagccattgttccagctctcacttagtgaattgtaaaatgtttttatcacccccaaaataaaacttattagggaaccactaatctgccttttacttgttctttgtttctgttcccccattccttatacttttttgttgttgttgtttttttcgagacacggtttctctgtatagccctggctgtcctggaacttactctgtataccaggctggactcaaactcagaaatctgcctgcctctgcctccaaagtgctgggattaaaggcgtgtgccaccacctcccagctccttctttccttatagttctctttctttctcttatctttatcttgctgtatctagctggcctcacacttatagcttccaggtagtcgtctgtccttagctttctgagaagcagggactatgggcacattatcatattatttatatgaatttgccaatttgagacttttgtatgaatagagtcagtatttggactttgccttggcccaatgtctaacattgctgtgttttcacatgtgcggtgctgtctccctcactgtgctctggacaaccaaaactcaagctgaaaggtaattgttgaataggagtcatcttttgctggtctgggttcattgccatgagagacttttaaaaattactatttattttttattttttatttatatgtgtgttttgcctgtatgtgtgtctgtgcaccatgtacttgcctggtgcccatgggagccagaagaaggcaccagatcccctagaactagagatacagatggttgctcactgccattgggtgctaacgactgaacccaggtcctctagaagagcaccctgaggcttgagccctctctccagctcctcaagagtgactgctgaaagcatgaaggtccagagctttgtctctggcatatactgcttcccttctgcctttggctttgagctgcagcagaggccctgagcagaagtcaagcagacactgtgacatactgttgcctttctagcctccagaccatgagccaaaataactgtacaaatgctgtctcatgttctgttggaacaactgaaaatggactgacactcttgtcctcagttctgcttttcccagtattttcctattattaagaacatacctgtgttagatgagttcttaaaatattagctggacagttagaaatgaacaattcttgagttttaaattgtgtgccatttggggtagcatgaggaaatcttacatcatcttttctgtcctgcctgggacacgagtcatcttctggttcagcatgcttgtgtagatctatatgcttccctccagtcacatagttgctgtcttgctatcagatcctctgtgtggtattgcagactggtactcacactaacccctgccccccccccccgttttttttttttttttttttacttgataatggctcattttgcaagaggataaactgaagagaagcaataagaaacctaagaaaagaagtgtgcaaactgtagacatctgtgctgcgaaggaataagagatttgttccagctttgctgttgtgcctcacagttgtggccatcctgcatgacaagctgggcattggggagtttgactagaacttattaagtactagctatgggccctggccttactgaggtctgaaatatacacctgcagcatgagggacttctctactagaatttaattccttttttttgtttgtttcttttaaaaaaaatacttttatttaatctttggcagtatcatgcatgtgtgtatattttgatcctaccttccaactcctcattactttttataatcaagtactactaatcttttgtttagataatgtctccttgtcacttaatggactttgggtccctgccccccttggctatttggaataatgctgatagggaatctgatgttttaaggttagtaacaccacttgggctggagccgtggctcagcacttcagaaggctgcttgttcttgcagagcatctggttcagttcccagcacccacagtagttgactcccaaccacttgtaactccagctccagggcatctacagctctggcctccatagacacctgtattcacatgcaaatatcctgccctccatacacaaaaatgataacagtttttaaaattacttggaagtcctataattttagttgataaaaaaattgttctggacagacttttggaaggcaaaaggataattttattaggctttatgttgtacattgaagataggattttttttttaatttgtaaattgatgtctccagatcttgagacttcatgctgggagtaggacttgatgcagtgttacccattcttgctgtcacaaggaagaaaccactaagaaagatactgagggttaggtagctgtcctaggaacttcagatttagtaattttagtaatgttccacttttaatgatcagcatgctttttttttaaatgacataataaattcagttaactgtaactaaagaaatggcaaaatatatgtacaataaagtttcctgggtatactggtgcatatccttactcccacccagcacttggcaggtggaggcaggcagcccgcctggtctcctacattgcaagttacaggccagccagggttacatagcgagaccttgtcttaaaaaaagaggttatggctgtagagagggctcagcaattaagaacgttggctgctcttctagaggacctgggtttggttcccagtactcacactggctgacatatagccacctgtaactccagttccaggagatttgatgtcctcttctggcctctataggcaccaggcatgtacatgatgcacagacatacattcagacaaaacaccaatacatatatctatatctatatcacccatatatatatttatatatatcacatatgtgatatttatctttaattatatatataataaggatatatatatatatacacatataaattaaagataaataaaataactttttaaaagttaaccacttttaaagatttattattctatgagtatgtgtgtgtgtttctgtgtaccacatgaatacaaatgctctcaggccagaagaggattctgggttcctctggagttacaggtggttcaaggttagcttgtgttaatctaaaaattccagtctagtctatagtctagatcctgagtcaaaacaacaatgacaaaaaacccgaaccaaaagttgagactgttttggcttctctgtgtcatttgtgtttccatatgagttttaggatcagcttgtcatcttctacaaaaatgtttgatttttaaaaaaaattaaaaaaattttttgtcaccttgacacaagctagaataatttgagaagagggggccacagttgaaaaatgcttccataacattggtctacctgtgggtcattttcttaatcagtaactgattatgggggagcccagtccactgtgggtggtcctgggagtataagaaagcaagccaggaggagcaagccagcaaatagcactctttttatggcctcagctttttttgttcctgcctcaggtttctgtctcaagttcctaccttgacttctctggatgatggaatacagctgtaaaatgaaataaacccttttctccccaagttttttttggtcatgatattttatcacaggattgaaaccataaatagggattgattgaaacccctagatgaatgtggagattattgcccctttaacagtgacctgtgtattgatacgcatggcccaacatgctcatgagtttgtctgttttcagtttttttaatttaatttaattaaaaaatttttttttctgttttcagttttaagaaccccatgcccagtgtctccatttaagatcaagttccagctttgattctgctgtaatttttcaaggttggggctagagtgtgagggagatggctgttaaatgaacataagtgttcctttaaagggaagtgtaggttgtgcatctcactttgctgaaagagaactctgtagactgcttgtgaacagtcagctgtgctggtacacttgtgtgatccctgaacttaggaggtggaggctagagaggctaggctgggctacaatgaggtcccctgtctaggaaaacagggtgggcaggggaagccacgcagcttttgaaatgacccttgatgtttgctttgaggcaggagagatgacagaggacaggctttgtttagcaagagactgctggaggtacaggagagtggaagtgaactgacagactttaggtcaggtctagaattttatggtgattaggtttgtttaaaagcctggggtggggctggagttctggctcagaggttgagaggttaagtgtactggctggtcttgcaaaggactggggtgtggtcccagtcctcttgtggcagctcacaactcaattatcagtaactccagttccaggggctccagtgccatcttttagcctccctgggctctaggaactgttaagtacaaggtcatattatgtaaaggacatcttttctgctagcatagtgttccactaaaggcctttgcctttctcacctaacagaagagcagtgagctgctgtacttaaaatgtactgcattgcacccaacatgtattccttcattttgtgcatgcatgagtgtgagtgtgtgtttgtgccatggggcacatgtggagatcagagggcagcttgatgctggttcttatcgtccaccgtgtgagtagaggtgatcaaactcaggacagggttgatgtcaagccgtctacacgcccagcatctctctggccctccctaccttttacatttttatttatttatgattattgtgtgtttatggcatgtgactgcatatgtgcttgctatggttcaaatgtggagaacagaggacaacttaataagagtcatgtgtcactttgcactatggcttctggatattgaactcaggcttgaatgacaagtgcttttacccaagagagccacttcgttggctctggttcactatttatatttattattttacctcaaatcaaggaacagcagtgttatataagaacttgtaagaatgtggagattaagcagagctcctaggagagttgcatataatattatactttctatactattttggtaaaaggaagtcagcagtgttactttagttaactatctggtttctccagggctttgagctagatagaaattaggaagtattagagaaatgcaaacaaagcccttctagcaccagctgaggctttctccccctcaaacccctgttagggtcattggttgtagtcagtgccttgccccatattccttaaagtcatccaggagggatgtgtcctgtgttttgtgaagtgctgccctgttggattatgtcagtcatgttcagccaccaggaagttctcagaacccagcacaagccttactgcttcctccatggggaagataataagcttacggggctaagttcccagaaaacaaaagtaaaacaaaaagcatatctgtgtagaaggtttctagaagactgaattagaacttctttaattgtggagagttagaatgttctgagtgaattatcttgggctacctttagtcctcttaatagtcattcattgtccaagcatctatttggtcaaacacttggatatcaagcaaaacctctgaactgtcctctgaacagacctttaggttccacccatccccagtctcactgtggcttgggtggatctggagcctggagtagaacgccccgctccccttgcatcctcttgctctgttcctgctggtgaactcagttagtacgttgacatatgacttctttcccttgtagccacttctatgatgaggcttgtcatttgaggccacataagtcctcgttcctaggctgctgccactcatttttggcttagaataaattctctctcattcctttgaggtgagctgtgctgtgctgtgtcctgtcagcaggaccataggtgcatgggaacttaattgtgggttatctgctgtttcttcttttccttagaagaaaagaaaagaaaaacatttgtgtatgtaaacattgctagtgggagtttgatgtttctagactcaggtcattaggggttcctatgtctggcacatgtatgcctcttctggcctgctggcaatttcctttgcttctttcctatattcagtgtcccattgcttcctgtgtcttaagttcttttctctcttgacttatgtgaataatgaggcccttcagaaagcgacatggacagccaagctcatgaatcatgaatgttaaaaagctctctcttttacccttccttagagttttctttcatattgtactgacatttcttccaatgttgagacttgaagccattctgattcctgatcctttggcgaaaacttctgaagtcttgttttcttgtcattataaaataagtgtgatgcattcttaatctgatagagttcaggtccccatccatgtgctttggtctctggtcctttattttatattggaagttctctgctaatctcttttgttaacaggacaagattaagaactgactgtggtcttagagcacaggtgagctttactgaacattgtggtatgatggggaagctcagcatgttctttgagtctggttgctgagctggggaggaggctgccggtttttgcagtcagatgttgagttagtttaggctcaagtgttgggcctgttgaagtagcatctggtctgtctttacagtccatgttggtctataatcagagctctgtgtgcctccgcccagctgatggcctgggtcttttggtttgttttgagtcttgctttgtatatcaggctggccttgaactctacatcttcctgctctgttgggagtgctgggcatatacagacttgtacctgtactacctggcctgctgtggtctgtctctttctttcttcctttctgtctgtctgtctgtctctctctctgtctgtctgtctctttctttgctgagtcacctctccagttctgtttttcaaaggcatatatataaacataagtttatgattaaatactagaaagaatcatgcgattcttaggcatgttacaggactggggatgtggcttggtggtagagtgctttcctacctggaagtgtgctgtgtgggtagaaggaaagaaagaaagttacacccggtagtgttggcttcttttgtctgtctgtgtctttatcctctgtaaatttgaaaagtgtttggtacttctgagagatgaagcagtggcacaccgcctgccccccagaacgggatgacaaaaagtagatgcctattgactagtcatttaaacaaactgaaaggcctttcttaacataaaaatcatccaaaatctaattttaaaatgtaagaaaagacagtataaatttttattcacccagttttagtgagaattgtatatgagattactcttttcaacatctcatttgtctattccctaggtgtttgtctttctgtttcagccgcgccacccccccacccccctttgttcgactttagcctgtgctaatcacttttctggggtgagtgctcacatggcagtgtaccacagtctttccccactgcacatattcagagtacatggcatcatttttctttctttttttttttttttactgtaaacctgaactactgtaccatctgctgacttctatagcgtccgtgtatactctgaacgtcatcgtcttttagggtgggtgtatttctaatgctaggcttttgtctctgctctttggaaaaaggaaaagataaaatgttcttgagtttgagaaggtgcagtctgtggttctgctttggtcagaagttacaaagaattaaactccagcaatgactgaaaaagggaaaagctatatacaattgtattgatgtaataatccctgccgcagacatcagcagactactatgtacttcatggcgtggggttctctccaagggcagtgcttaccctgacttccaactgctgagccatctcagtccacccaatagttctgttttaaatggaacctgcttgtgactataattttatgttgtatcttatagcattttcttagtacattttaatatttagtgttatagacttagaaccactgctgttcagtttttcctttccttttcttgcttctgttcctcctcctgtctcttctcctcctcttttcttcttccttttttcttctgcttttttgagtcagggtctctgtacagagcctgactgtcctggaacttctatgtagatcagactggcttacttacagagatctgcctgccgctgcctccttgtgttgggattaatgcttgattttgactagtttttttaaaatttcagttgatagctaactttggttgattcaaaataatcataggaattatagttatcatgattggtgagtagacttctgccactgtaaaatcaaaccacaatgataaataaggtcatccaataactaatagttactgtgaaaagaataaaaatttagcagccgggtgtggtggggcatgcctttaatcccagcacttgggaggcagaggcaggcggatttctgagtttgaggccagcctggtctacagagtaagttccaggacagccagggctacacagagaaaagaaagcctgtctcgaaaaacaaaacaaaacaaaagttttagtgtgccaccaatggaatgcctgaaaactcaataggattacacaaagctctgggttaggtgcctttgttgcaggtactggtccaagtattaagaatataccagtgagttctgctcacagagcaaacatttataaacagttttggtaaataataaatgtcgcactgagaattaatcaagtttgtttgctggggggaaggggaatagacagttttggctggagtgtcaggtaaggactctttaaaaggctgtcttggttgagacagatagtgaaaaggctatttgattgtttttggggttttcatccttttgggtgaagggaataagaaattctgaggtatgaaaattggcctgttctggtgggtttgtctgttttcttttctttcttttcttttttgtttttgtttttgtttttgagacagggtttctctgtatagccctggctgtcctggaactcactctgtagaccaggctggcctcgaattcagaaatccacctgcctctgccttccgagtgcgccactaccgcctggctgtctgttttctttttaagacaaggtttcactatgtagccctggctgtctgggaactgagtatttagaccaggatggcctcacatacctgtctctgccttccaagtgttaggattaaaagtgtgtccatcattactggtatgatgggtatgttctgaaagcagtcttaggggcttgattaaggagtttagattttattctgagttttcagcaagagggtgacatgatgagctgctgtttaaagattgttttggtgataaaaaacagcccctacgatgtcagatttttagtaggtagtacattctgattcttctccagaaagttgaccgagatttaaaataccacatagtgatcttgattaactttccaaaccgactctgctttcctgactttaaggttacagatgttccattatgtgtgctgggctttgttcctgcacccctataacacagtctgcatttgctcaggcccctcatatagaggacatagtatttacatgggctctgcatatgtctctgatgtttaagtccacttcacccagagaactcaggcttgttaatctctctctctctctctctctctctctctctctctctctctcacacacacacacacatacactttttgatttacaattggttgagtctatggctgtggacctacaggtgtggcacaggagtatggttgcagtcaatccttaattcatttcctgggctgagagtcagcacatagtggggagtcaggtagaaagttctggttgaaaatggagtataggttacattttctttaattctaggacattttatccctgactaagtgatttgtgtgtcaggactgtatgtgagacagtaagagctgtagagtcagagctcctcatgtgtgtatcttagcctgtacactcagaagtatgttgtaagaattttctgtgctttagatgggatatcacttctacttagtatctaactgtacgtattaaggtggataataggaatgaggcatgtatatacataaatttgcgtatgtgctatgtatgcacgcacatatgctctgtatcccaccccataatagaggctcctggtgagttctagctcctgctggataagacaaaagaagtgtctgacataaggctcaaagggagattctcacagttttctaaaggaggagagccattactttgtctccttgctgacttgcaagtgtctgggcgttagtcttatacctgaggcgcgttccatagttaacacatatgtgttccatagttaacacatcagattaagctggttagatggccagtctgctgctttggttctgcactcaaactaaaccctgaatattacaatggaaaactcagactttgtaagtagatatggaatctgggagtttgggggcagcagctaggatgatttcttacaaagagtagaaggaagaaataaatcactatatttctttcctgactaacttgctcacagattacaaaaaaagccataaaccactgttttcacaactttctatattgtgttcttgggttaagtacttttcttctagaattataattatttgtctttcaggtataagtattgtttaaactgcatcaatggagcacatacagggagcttggaagacgatcagcaatggctttggactcaaagatgcggtgtttgatggctccagctgcatctcccctaccattgttcagcagtttggctatcagcgccgggcctcagatgatggcaagctcacggattcttctaagacaagcaatactatccgggttttcttgccgaataagcaaaggactgtggtatgtgaccctagaaaatgtagttctcttacctttggagactgtgctatgctgtccagtttatagatgggagaatctccttgtcacttgggatctctgttaatcgtttttttttttttaactcccccaagtgaagatttatttttatttttaaaaagacttatttggggtttgagatggctcagtggttaagagaactgactgcttttccagaggtcacgaggtcaaatcccagcaaccaaccacaatggtggcttacaaccatctgtaatgagaagcaaataataaaaacctatgggctggatgtgggggagggggaggtggaaagagctgggccggagcaagagggagaaggaaatggggggaaaaaagaaaaaaaaaagacctatttgttttatgtctctctctctatatataagtgttctgtcttcatgcataccaaaagagggaatcaaatcctattacaggtggttgggagccagcatgggtgctggagatcaaactcaggacctgtagaagaacagtcagccgctcagatttactttatgaaatcactgttctgctcactctctactgccttcaaacgtggcccacaaaagcctttttctgcatctttatttttgggtgaggaggagaggctatttctgatacttttttttcttttgaaatatttttaaaattgtatttattaattttgtgtgtgttcatgtgtgtgtggtgcttgcatatgtgtactgctacagtatgacatggaggccagagcacagcttgtatgaggagatttcctcttccattaccacatggtccctggtgctgagctcagacggtccaggtgtggcagcagctgtttgcctccagagcatcttgttagccttttttttttttttttttgggagaagtttttttttcttcttcttttagtttccaagctaattaaaactaattaaagaaagtggggaaagagacatttattcttctgtgaatgcaaagtattgacttaatttttgagattgcattaaatatgaggaaaatacaattttctgggttattttactttaggaaaaaagtctagatttttaattttgaaaaaaatttagtttttgttttatgtgagtgggtgtttgctacctgccatgtatgtctgtgtgccagtgtgttcagagcgcatagaggctgggagaggacactggattccctggaactggagttacaaactgttatgagctgctacgtggtgctgggaattaaatgtggctgctctgcaagaaaagccagtgcttttaactactaggctgtctctccatctcctaggaaaagatattttattattttataggcccaagatagatttttaggttgcttaagaagaaactcctgccttgtctcttctcagggcacaaaatatttttgcatttttccatggaatcaatgacaggtccatgttggaaccagatgttgtcaacaggattttctgacaggaaaccccattattttctaaggacccactgctcaaaaccctttactgttctgaactttaaaagcaaaaaaccagtttgactgaaacagaaaagtgaagttatattggtttttgtttgtcaggtcttgtttaacctaaatttaaaacttgtccatccttgtggagcacagtatgagacatttgtttgttcctaaggttgggaggccagccagagctttcttggttttcttctgacagtcccctctggttcttcttttcttttcttttcttttcttttcttttcttttcttttcttttcttttctttcctcttcctcttcctcttcctcttcctcttcctcttcctcttcctcttcctcttcctcttcctcctcctcctcctcctcctcctcctcctcctcctcctcttcctccttctnnnnnnnnnnnnnnnnnnnnnnnnnnnnnnnnnnnnnnnnnnnnnnnnnnnnnnnnnnnnnnnnnnnnnnnnnnnnnnnnnaccaggctggcctgtaactcggaaatctgcctgcctccgcctcccaagtgctgagattaaagatgtgtgccaccactgcctggccccctctggtttttctagttgattccttcatccttatttattttgtttgtgtggtttgtacctgagtgtatgtcagtgtaccatgtatacacagcatccatagaagccagaagaggacattaaattctctagatctgaagtttgggctacccagtgctttcagggttcataggcagcttagtatgagattcaaaagaaattaattttttaattaattaattcattttatttattttttaaagaagaaggttgctgagtagctaccttaagattagggacacggtatttgtgccagttagttgtgctggctgctgcttctcctttcactatttctccacttacttttccactctggagtccagattcacagatgaggtattttaggaacaaatctgaagtgccaacattagatcatagaccttctagcttgtgctcccttccctggatccagaactttgagttgtaggttgtctagggcattcctccaagacaggaccatgttggctaggtcatatggaacctcccacttcccctaagcctgtaagaacctgagaacctggcctttgttcttcttgactgaagataccctttctgtctcccttgttgcacttctgtagtacaataactattccaactctcctaataccgtcatccttctttagggctacaatggctggttatgcctgtgagctcataactggtggataaaattctttcaaatgtgtcatgtctccaccaacctgcagtaatttcgaatagccagcagatctttttagcttatttctccagggataaaaaagaaaatcttcacttgttagtattgctttgtacaagcaaagccattttaatattaaaagagtaaaaagggttatttcaagatgagaatggattctgttcgaatggattgtgtatcacatgacagataattcagcatttcatagatggagttactcttcatggtgctgaacactgcaatttagaaccagatttaatacttgtttcgggtccatttgtagatgttaaaaactaagagccattgaggctgcagagatggctctacagttaagagggtcctggagttcaactagaagcaccccagttaagcagcccacactctcctgctccagggaatattacatgtatagcctctgttacagtgcacatgcatttatgtacacctttctctgggaaaaccagtggtggaaagtgtcttctggcagccagtaccctcaggcagccagcactccccatcctagagtggcttcccaggatttctcttcttacagctcagtgagacaccattgaccaaatcacagtgtgaatctggtggcaggagagacagactgaggatgtgtttaaccgaaacgattttagaaggatacttgtctttagaagaataatagtcttttaatgtttcttgacattttgttttctaaacatgcacgtctctctgactgctgcttctcattgttactggacaagtgagttactagagttgagaactgctgcccttacaaccaaccacctggcagtcaggaatagacacaggttcttggaagcagactccttggatgtgttgtacaggaggctagggagactcttttacaaaccccttggctgcttcccatgctgtctacatctggggacattagtggagtagagaatagattaagagctgttcagctcttagaatctgttgtgacttctattggaaatattaaaataaccacatatcactttacagttttgaaagctatgctctgcagtataggtgcatgagtctgtcaatgtgtgagtttagcactctttgttttagcactttcttttctcatgtctttatagctcagatctctagtgcaggcatgtctgcctcgttttgctacacactagtaagatgttataagggtaaatacctatgaaagtaaagagcttacagtaacagttctggtatgtttatcacctggcttacccttggctgatcatagcagttctttttgtctgtttccacccacaccttttcatttgttttgatacaaatcctagatagcgtttgtctgaactagtttggtatgtccaaggaacttttttctttagacagagtctaactctgtagtctatactggacttaaactcaaagcagccatctgtttgaaactcttaaatgttgggaatagatgcaaaccaccatgaagctattagaaacttacataatgttaattgtttaaataggcaacatgatttacaagtatgggtgacttctgcccctgtctagttccccagttctttcccttagtatgcctgtgataaaaaaggtttatcaacttgaagaatcagatggcctcatccacaccaaaggaggagtttgcttatttatttatttatttatttatttacatcagatctcattacggatggttgtgagccaccatgtagttgctgggatttgaacttgggaccttcgaaagagcagtttgcgctcttaaccactgagccacctcgccagcccaaggaggagcttttaaagcttagaaaacccttttcttttttctgtcactaaagtggaggaactctgatcccccgcttcctactcaccctcactgctttgacatttgttaggaagatcatctctccattttgttgaaagtgggctcatctcatgtgtgtttcaccttctgtccatgcttctgtgcacttatgtgcactcttgcaaggccagataactaaatgtgctaagtatccctccataccacttaaaattattttaaaaacgtatttgtgtgtgtgtgtgtgtgtgtgtgtgtgtatgtatgtatacatacgtgtgtatacactcgtgcatgtgtgctccatggtgcatttgtggagatcagagaatagataacttctgggagttagtgtctgcttccaccatatttgtctcagggattgaacttaagttgtcaggcttggcgggaagcacctgccctctaattttaatagcaaggtgtatgtctttctaacccacacagcatacataaacatatactggtttccccacctttaaaatagtcttactcttgagcggaggctttggctgcgggggaaggaggactatgaagcttccgaatatcctgctcaccggtacaccaggggttggaaaaaccactctaggcaaagaacttgcatcaagatcaggcctgaagtatgttaacgtggagatctagctcgagaagtctgattagcggatatcatggagtctggcaagatggcgtctcccaagagcatgctgaaagatgcacagatgatggcacaaatcctgaaggatatggggattacagaatatgagccaagagttataaatcaggtgctggagtttgccttccgatatgtgaccacaattctagatgatgctaaaatctattccagccatgctaagaaagctactgttgatgcagatgacgtacgactggcaatccagtgccgtgctgaccagtctttcacttctccgtccccgagagatttcttgttagatattgcacgacaaagaaatcaaactcctttgccactgatcaagccatattcaggtcctagattgccacctgatagatattgcttaactgccccaaactgtaggcttaagtctttacagaaaaaggcacctgctcctgcaggaagaataacagttccaaggttaagtgttggttcagtttctagtagaccaagtactcccaccctaagtacaccgactccacaaaccatgtctgtttcaactaaagtaggcaccccaatgtccctcacaggacagaggtttacagtacagatggctgcgtctcagtcccctgctgtaaaaggttctatacctgcaacatcaacagttcagaatgttcttattaatccattgttaattgggtccaaaaacattcttattactactaatatggtatcacaaaatacagccgagtcagcaaatgcactgaaatgaaaacgtgaagacgacgatgatgatgaagatgaagatgaagatgatgatgatgatgatgatgactatgataatatgtagtctaaccacgatgcatgtaacctgtgttcttggacttggatccattgtactacaaattaaaaagcatgttagatgttttaaagctgtactttagaaagtggtatttcataattatactttgctttttgattaaaatgttcagttttactagaactagtgatggtttttcatcaacctttatgtacaaaaaataaaatgtcatttatcagtttgaaaaaaaatagtcttactctttatattgttctaatgaaagtattttccctagtaaacgtgccgtagactactgtccccttagtaactaattaagggtagttagttagtacaggagatgcataatgttccaatgctgattcaggcctatgtgcatctgcttatacttaactctggatattgaggtgtttttctctgtgtgttcactattgcaaacagtatgtcataagtctataccattttatatgtcgtgcgtgtatttcagtgtttatctttgcgagtggtgctgtagcctacactggtactaaaggggatcatttgtttgcaggtcaatgtgcggaatggaatgagcttacatgactgccttatgaaagctctgaaggtgagaggcctgcagccagagtgctgtgcagtgttcagacttctccaggaacacaaagggtaagagcaaagccagccagcaccttttaggattctaagcgtttcctagccacaaataacttggtatattacaatgctttgtattagcctcctagggattagtgcatgtggatatactctgttttcaaagtatcaattcagaaaaattgcctctgagaacttgaaattattgcctggacattgtcttaaaagctataataaatgggaggtgctaatagcattgtccagggatggaggcagcattgttagaaggcctgtttttgagtgcaaagacttttcctggtgtttgccatgcagagtgggtactctgaacatgactgcactcttttttatggttaagaatgctaggggctaaagagatggctcattaatggcatttgctgctcctcagagaactcaagttcagttcccagcactcacatcaggtggttcacagctaatggtagctcccgctccaggagattgtatgccgccttctggcctccaaggggacctttacacacatgacatacataccacttagagacattcagaaaaacctttcttccctctcctctttttttttttttttttttttacataattttaaaagatttatttatttattttatgcatataaaataaatggcttcatgtacttccagaagagggcattagatcctattacagaaggttgtaagcctccatgtaattgctgggatttgaactcaggacctctggaagattagcctgtgctctcctcccctcttctccgctcttcttcttttctctcccttaccctttgcctccaatcccttgtcccttttcatcttgggcctgaagaaatacactagtcagtatagtgcttccatactctctgattgcccaactgccataacaccccgtgtgtggctgtgcccttggaacctcagcacctggatgtctccagagacatccagagacaggcaggtccctgaagcttgctggcctgcttacctaattgctgtgctccagatcagtgagagaacttgtctcaaaggcaagatagatggcgcccggagaacaccacttcatgtttcattttgtcttgctacatttacacatttattgcagttctaaagagagattcttgccattcattcattcattcattcattcattcattcattcattcattcatgctttcctcatctatctcgttgttgttgttgctgctgctgctgctgttgttgcagtactggagacagaacctcgggcctggaatatgctaagtattcagttctatgagtattaaatcttggctctctgatagccacagggctgaaagagacagggaatttctacttccaggaaaatacactgtatttccagtcgtggtagcaagatagagatggttttcccgtcttcaaagactgaaatcatggcccatagccacagagcaccatatccgtactgttatttactatggcagcccagcctttgactttgccctctttgggaagcagtgcttctgctgctaacctcttgcttgttctctgtggttgagttccctggctggagagaacatctcaggagagtgtctcctcagagtttaccctccgagtgtctgttcttctgtttatttagctagtttgctgatcatcaatgtgtcaccacttctggctagattgatttttgtgtctgtccccaaactgatacatagacttccttcaggactagggagattctaagatgggttcactcttcttcaagctgtactgatttggaactggtctctgtcctctcctacctattcaggagtgaggtttccttcctggtcttcattaggacacaatagtactttagacagatagataccatttccctaccttaaatagggaattatcttaaagaatgaattattgctcatggatagccagaagagtggcttgttggttcctggcaggtgataagagggatctgagtgatgtcatatgtgcgttacatttcttaacatttcttaatcggaaatattcatcctcggcaaatggggcagatctgaatcagcttttgcttaaatcacttggttacctgtcttcctttttctgggcacagaaagaatggtgtcagtcaggtttaaagactgttgtgttcctatagacttgtatttatttttataacttctacaaacaactttaagtctgtaactagtgtacagcacatttgtgtttgtattatatgtattattttagattgaagtagctattgaacactaacctgtagtgacttggtaggattttaatattatgcagtccccttatagacagttactcttgtcatgagattgttgtattacatttttaaagaacactttgttctaggagcatacattttggagtccaacaggcttgggtttcaacaggccacacagtgagcagtgttggcttatctttatggtgggaccagaacacctgtgaggtgtgcttagacagcatgcagtaggtagtagaactgctctatgtcttgagccttgtccaatgttcccttatgttatgctttggataatttttagtaagaaagcacgcttagattggaacaccgatgccgcctctctgattggagaagaactgcaagtggattttttggatcatgttccactcacaactcacaactttgtaagtttcagcttctccctttctttgccattttgggctctctacagtggatggctgacctttcagagaagctctgggtgcacattgttagttgctttcagctctccctatgctgtcatgtattaccagaggcccctctaccctgtctctgaatctgacagtcttgcaactatgattcttccctgtgggtactctggtaaggacggggagggcagtgctgtgtttgcttgtcactcgagttctcacaatcccgctttcttgtcacaggctcggaaaacgttcctgaagcttgcattctgtgacatctgtcagaagttcctgctaaatggatttcgatgtcagacttgtggctacaagtttcatgagcactgtagcaccaaagtacctactatgtgtgtggactggagtaatatcagacagctcttgtaaggcactgtggtttttttttccttgtaaaaaatgccagggtcaggtccagaagcatttttgaggatgctcattatacattttcaatgtaaagtctgagctttaggtttgctaaataaatgattgctgcgagtcagaaactattgactttagaagcataatagttctgagattagttagttttagtgtggtggtcatctagctgtaaaataaacaggtagggagctggggatgactcagttggtaaagtgctaactgtgcaaacatgagagctgagtttgattaccggcgctgacataaaagctgggcctacagtgtgtaatctcagagttggggatgtggagacagggctgtccttgggtttgctggccagctactctagctgagtcattgagctcaagtttcagtgagagatcttgtctcaaaaaataaggtggagagtgattgaggaagactcctagcattgacctttggtattcactccagtcatatgaactcagacacacatgcacaaacaataccaaaagcaggcaggacccattgtctgtcaaattgttactgacactgatttgtcaaggaaaagaacagggacatggaaattgaagggctaggctttcttttttcatctggccagtgctgtgggttgtcccaagaaagcagaaagcagagcttgtcctgtttccttcctctcacatcagggagcaatgtgtttgggcctcagacagtttgcatataaaagattgaggctctctgttaggagataagccagatacaaaaatatatttcacagagagaaaataatttaaataattgcatattttaaattacacttcttagagtcttttaaaaacttgtattgagattatgaaaagtcagctttacccttattgaaacatattaggaaaatgaaaggaatattatcttcattcacaatgggagagaaccttgtagctcccacagaagttacttgttggttctcagagcacttgagtagcagaaaggcatgtgtttgtggccagtgaacacctcacagcctcagactgtcactagcacctccagggctcagctccctcatttcagaagggttggctaggtaactaagactgctctgcagtaggactcggcgggcgagttaaagtgcctactaaatagtaatcccactgtgcttctgtgttactgctggtgctgaatatcatgaatggaattgattctctctctgtgtgtgtgtgtgtgtttcaaaaaacaattccagaaaagctgtgggtagtatggattatgaaatgttgtactatcacttaagacccatgtggtatagctggacaggaccacttttctagtgatgtatcctggcaggatgtgaatttatcagcaagttgctgttactcagtctataacccagccctttagattgatggtcttcatagcaggtgactaaagcacttgaggagaatgaatcaaggacagttgggtttttgctttgggtttagaggcaagctgggatggtttctctgtgagaggactgaatccataaactagtctttccatgtttcatttaggctgtttccaaattccactgttggtgacagtggagtcccagcaccaccttctttcccaatgcgtcggatgcgagaatctgtttcccggatgcctgctaggtaatgttgtactttgaactcttttagaaagttacagtgggttgggtgggttggcagcctgaatacaaagaagtccctcttcatgtcctgctttgtggagcaccaagtgggatctttctctctgtggtcccagcgtacttatattctggaaagtgattttgactgcaggtctttctgttacaatgcaactctcagtctcacattacacttataaaaagcttgaggttctgccttcttccagacgtggtgaattaggtgtctgtggaaaggctcccccaagtgacggtagcaactaagaagaaaatcagaccttaacttgtaaatgtttatcccagccttaaaatccaggtagttggcgatagatctgctatgctctgagtttgcctttaacttgtctgtgctgttttctggttttaaaacttgagtttacatcttggtcagtgacacataagtatttagaacccaagataaaaatctgcatttttgtctaaaatgtctgatagctaatcagctaccacttaatgacccctatagaattagttaaaggcagcattttagaacaaggaatttgtactgatacctgtgtttatgcctgacttgaataaatcctttttggtaatttaaaaaccacatttgagcaaaaaataacttgccttgaggataagaaactagactttgagaacctaaatgtagaattcctagtacaaggtggcatttcagtgagggaacagccaggcctgttcagggtggtgtgggaataggcagaacattatcccttagaaaagctggtctttatcccttgaatgtatatgagtgtgacctgaacaaaccttaaatttcatctacataacaaatatgctctccgttggtttttggagttggggtggaatctagggcctcacctaggctatgctggtgacatgccatggagtcatacctttagtcacaggagttactggtttcaggatgtggggctcagacccaggagcttatccgggctgggtaaacctcctgttgctgagctgcagctgcctcagtctatccttgataatgtgtgtccctaggctgaaacagtctcctcataggtcagtgtcccagatgttctaacagtagaacacatactttgctgtgtgctggctacagggaaagatttttagtttttcttcaaattaaactgggcagattccagttaggtggtacttatagcaaatactgatctattcttaaagatgttgtaaaactctgaagtattctggacagtgatttattaccgaggagaaaatgtgtaatggactctccttttcagagggatggcaagcacatctgtttttcattttcaaaactttgcatgaaaaggaacacagaagagtttttaaatagtgcatattgagagagtgaaatattgtgtcaagagttgtatgggtcaggtttgccctaagtgtcttaatgagctaagcagttgaaaagactttgccaatgtggaggcctgagtgccaatcatgggactttttttctcctccgtgcccagttcccagcacagatactctacaccccatgccttcactttcaacacctccagcccttcctcagaaggttccctgtcccagaggcagaggtcaacgtccactcccaatgtccacatggtcagcaccaccctgcatgtggacagcaggatgattgaggtaatagggccccttgggggtggtgatgagcagcagtagttaatattgggaagcagagaatgtggatttcaaagctgctcaggagtgttgcagtactttctcaggcccttggactttgaaatgttctttttaactctcttaatgtgtatagactggcttaataactaggccagtgtgtcattccagtaggaaacagaactcctctctagccactgtgctctgtgtcccagctttggatgtgatttctttgggctggtacagatactgcagagcagtgagggctgtagtgtgaagacctcagatgctctagagacttgtaaagtaggagctctgggatctgctgtgcattgaggcaaatgtgtcagtgccagtcagtgtttgcaaactgcctttcttttcttgaatgttctgttcctttggtttgctttctagctcatctttaaagtcaactgaatacccttcaaatgcttcctttgttctttattcttctttatttctcattgctttggactagagtaacagcctgaatgcttctcccagggcgtgctccagacgattttgtctgaggggaagagtaggtattttcttcatgcctttgctttcttgggtttaacaggagagactattgagacaactatacattcatttatacttctagccagacttgttgccataattttttttttttccttttctagagttctgagttaaacaaaccctctgggttaccactgataggtaaatttctcaaggtaaattcaggaagacaaggggattgaaataagttttaaaaactcagttctctcaaaaagtggactgatatagtgacacagcatctgtactgagttcagacattagaaaccaaaacagttaatccatctaagttaatatgacttagaaaggtttatcaggaagtctggcatactagcacatgactggagtcccagcactctggaggactgtattcaagaccagcctgggatacatggtcaaataaaaataaaataaaaaagactcaaaatcaaataaaaaagactcaagagacgtggccaagtaactgctttctccacactatgaactgacctttgtaaaaccttgttccttgccgggcgtggtggcacacgcctttaatcccagcactcgggaggcagaggcaggcggatttctgagttcgaggccagcctggtctacagagtgagttccaggccagtcagcgctatacagagaaaccctgtctcgaaaaaaccaaaaaaaaaaaaaaaaaaaaaaccttgttccttgacacctgtgatgtcagatgcagtttcgctctggcagtacatcacttttaaccacttggcctaccctgtgtaatctacaggcttattagtcctagtaatataatcataaagtagctattttcttcccatgtccagcttgttcctgtttaaactgttcgtacattcaaagtgaacatccttcaggtctaacatgagcagcacagcattgatcctgtttgtgcctcagaagacaattttgtttgtgggtcccccgccttttgggggtggtattgtgttttttgagacagggtctctctatagttctaactgtcctgggactcactttgtagaccaaggtagcctctaacactcagagatctgcctgcctctgcctctcaagtgctaggcttaaaggcgtgcacttttttctttttgtctttaataacacgtgattcactcagcattttggactgtatgttgttgtttgccttaacaccagtcatgttcttctaaactaatacttaagagtatttaaatttttttcctgggataatgtgatccaattatagtaattactaacaaataaaataatgggcagaggaaggaaaaagtaggagacattaaaaactatcctgctgtactgtggaccagaaatctaatcaatgaaaataacagaagagattgggtgagtgaccggcatttctcccacttggctgccttggtgttctacttaaaactatacaggcgccacttttctacctttcccacacagacacacatcatcagacctagtttgagttgtagagtgaagatctatatttcatgtgtgtgcaggcatgtagaggctagagactgaggtcacgtgtcttcctcaattgcccttccatctgtgttttgaaatagggtctcattgaacccggagcttttggttaggctaggctgggtagccagtgagcctccaggatcctcctgtcaccatctatggtatatggatcataggcatgtgccaccacagggggattaaactctgggcttcttgcttacatggcaagcccttcagcaaccaaatcttctccccggtcctacggacctggattcttacttatctctgtggatggtttacatatggcttgggactcaggctttactctatgctgttaagatacctggacagggtggctgaaactgtatgtgtgtgtgtgagagagagggggggggtgggagagagagagagagagagagagagagagagagagagagagggagggaggaagagtgtgtgtgtgtgtgtgtgtgtgtgtgtgagagagagagaaagagagagagagagaggggaagagtgtgtgtgtgtgagagagagagagagagtgtgaaggagagtgtgagggagagggcagagcttggtttgtggttcttttacttttgtaaagatatctttggaagctaatcatggtggcacatatctgtaatcatagcactacaaggctgtggcaggagaatggcaagttcaaagccagcctgggctacacagtgagaccctatatttaaaaaacaaccagccagccaaccaaccaaaatcatgtctggagtgatggcccagcagttaagagcacttttttttgtagaggaccctagttcaggtcccagcatctacatacaagctaactactgtttataacttcagttcttgagaatgtagtatcctcttctggcctccagggcactacacaaatgtggtgcacacacatatatacaggcaaaacacccttacatataaaatgaaaaataagccttaaaatattgagtgggaacatcctagtaatagtgttgtagagcaaatatcttgtttgctgtggttatacaaagaaaagtaacagatgactttctagaaaaacattttctgaagttatgagggtcaagtggttttatattattgcctataaattctaccctcgaggaagaattttaaaatgtagagtttagaactctctcatggaaggggagggctgtatggagagctgagcagttaagagtgcttgttgctcttgtagggcatgagttcaggcccaggtacccatgtgaggaggcacacatctgtccgtaactccagcttcaggcatgagttcaggcccaggtacccatgtggggaggcacacaactgtccgtaacttcagaggtctcacagtgtcttttgacttctttgggcacctacattttcctgtgtgtggtgcaccacaaacaaatcaaagataaaatcttgaaaaaaatgtcctgttgaggtaggtctctatgatttgaattattctttgaaacagtgtctagtagagttggcttgtcacaaaggagaatgtagcctgcttgagaacatcactaaggtttaaagtagtgtctcagtgctaatgaagctgagatcaatatgtgaagtctatatgtttctaccacctactgttctatgaacctgactgagtctccccttctgtctatttgaatttaaaaaatgtaaacacaggattcaggctctggagttcgtcatctttccatttccctgtgacttaggcctcaagcagtgcttacctgtgtcaaacccaactttaggtctctatttgtccttattcctaatgaagtaaaaatgaggctgtcagtggatctctgtctccggttaagtctcagtagagcagggtcccgagtctttggaggagatccccactgataactttgccagcttttactgaaggcttgtttgtttctgttgcttttttctgagaaatattgtggttaccatgaaaaggttacactcacttaatgtaatatttaatagaaatcaatcttggaaaaatttgcttttaacattaggtaaactaggaatttagagtatggaagtatactttctattttagtgagttaacaattgttttgttcctacaacctttcccctgcaagagaaagctgtttctagcttgtctgatcaacttttgttctttgtttcaggatgcaattcgaagtcacagtgaatcaggtactttacttagtgatcagtaatgggcttttttctctctatgctgtgatcttctgttggcttatctacgtgcggattctgtttgtcttgtctattaagcctcaccttcagccctgtccagcagcccaaacaacctgagtccaacaggctggtcacagcccaaaacccctgtgccagcacaaagagagcgggcaccaggatctgggacccaggaaaaaaacaaaattgtgagtatgactagtaatactttattgagtcactcagggatcaatcaagataaactcttgcaaattaaatatttgggggtgggaacctagtaaaatatattacagggaaatgaatgccagtgctccctggcaccttcgtatcctatacgttgccattcggctacagctcagtaaactggcacctcaaagacagaaagtgtagctgcagtgacagtgccatctttaaaggaagcaggaacagatggggctaggatgagcctctctttgaaagcatggcttatgaatgatctccacttgtttcagaggcctcgtgggcagagagactcgagttattactgggaaatagaagccagtgaggtgatgctgtctactcggatcgggtcaggttcctttggcactgtgtacaagggcaagtggcatggtgagtttggggcctggttccagctgcagggccctggtggttaggttccagcagagaaggtttcttggtttatggtggccttctggatgggttcttgatcatacctggcaatcaaatcaattttgaaatttcacagcattttaaccttacgttattttaattggtataataaaatccccgtggtgcttagaaaccagtaaacaagtattagccctggagtgaaatattagtggtgctcatggaacatgcttcttcatgagcagatgtctgctgctttgggtgaagtgtactcttgacaccaacagctggaagggaccttataacaggtacaaggaggagctgtctgctcctgatcatcttagtgcaggaaaactggacacttcctgaccagtgtctctctttgggccccagatttaattgtagctatctcttcctgtgccagggggaatacttgatctctcagaaggaagatttgagcttaaactctgtagttgtagcttgaatcatttggcaacatacttaaccatttccataccaggtttttaacacctggatttaggatgttagcagtaaaagtaggggtttcttgtatgtgcttataaagtttcttgatgttgcaccccccagttcagacatggtgctgataacctttatagataatggggcagagatggagacaagttctgagcataaagtgtgcagacatccaaattcctctggaaacaacagcatctacttctctcggtgcacatcattatatgggtttttgctttgcctgagtcgtcgtatgaacagttgatttcttaacagcatagatcagagagttggttagtgactcttagagtgactgagaactgttaagtaatgccctgctggcctgtctcttggtctgcagaggaatgctgtcactgcagtgggccgtgaacagagcctgttcttgaagggttgcttagtatcacctccagcctccctcctgctatcatagcccgcctgtaagttttgcctttgcaggcacctggcgaccaaccattttcctggcctcaccacttaagttgacctgaccccctcacccatctctcacctcgaccccaagccctcccagtttgtttgccattgtaactccaagcctgccctcacctgggctattgcaccaaattcttctctagctcttctgttctacgagtgctcagttacatgtccacaagactccttacttttgtttctgatgcagtctagactatcctttctaatattcctcctagtgcttacagtccactacctccatacactcctcacttctcagtagtctttgagcccagctactatcttgtctcagacttcacagccgtgcagcaatcttccttccttggccagtgcagcccctggggcacacatggtttctggccactgtgctggactggtggcttcagcactgcttctctttcactcagatgagctgcattctctccagcagcctgtgccttccttcggtgctgggacatgtcagctgtcaggtcaggtacagatgataatctggagctcacaggggtcaagacagggacctcctgggaaccctgcctttaccattgttcacaactgactcagactttgatcattgctgccatgggtaaccgactggtttttttagacaaggtgttggtatgtagcctaggctggcccccgcctctgtttctagccagccttatgaaaatttaaagtccttgcagggaagtggtggcatacttgggaggcagagatgagttctctgagagttcaaggtcagcctggtttagggttctaggactacaggatgaaacattgtctcaacgcctttccctaaccttgtccccaaactgggatctttacaaggttccaagtttattattgttaatacttctatataaaacatatttgaatgagacttctaactatctctgaaagcaagctgactcctgggtgtttctgaggatatagagaggttgcttggattgctgccactactaaaagacaggattgtgggtctacttacctccctgttctagttctctatttagaagataggacctctatttctacttcctctctgcagaataagttcagtagttgtacgtacacgctgcaacgcagcaaggtttcagtatccctattgctcccactggtaaagaacccctttcaacttgagaagggcctgcctcctcatcactttgtatttggtgggctacccatggcctcggcactacttttatcttcacagggtaaagctgtagagctagctcatatgacctaccttgacgctcaagtggatatgcgcttgttgaaggcctccatgggtatgagtagcattgaagcgtctcacccacttgatgtatattagttggcatatttgttctacctgcatatatgttctttgaaaagtgactccctatcttccttagaattagggttttttgaaaagctgggaggtggcttagttggtaaaaagagctttccatccaaacatgaggatctgaattcaagccccagcagttacataaacattcagctgtggttgtactgacttgcattctcagtactggggaggtagaaaggggctcactggttaaccctagtcaatgagtcctgggtcccagtgagaacctgcctcaaacaaaacaaaagaaaacaaggtaagatgcacatagatcctaaggtatttgagaaacaaagactatataacaagtatgactacaaattaatttgcaggagatgttgcagtaaagatcctaaaggtggttgacccaactccagagcaacttcaggccttcaggaacgaggtggctgttttgcggtgagcctagtccctggacagcagggttagctagggccaggctgtgcaggtcagcacctgctgtgggttttaaggttttaagggacggtcctcctccagtgtatatatgtgctggaagccagaagagcccttttcatggacacaccccttctctgtacagctctatggggtttggtttgtggtagtgagattgttttgaacctttatttctttttatagctaatagcatcttttatagctaatctgctttgctctggagctcaaaccctcagtgtagtcacggaatcactcttagattagtagggatgagctggacagactgtgcaaagtgcattctctgtaagcaaggctagctagcgtggaggtggacaaaggatggtctcacagctgtgctcccctcctccccttagcaaaacacggcatgttaacatcctgctgttcatggggtacatgacaaaggacaacctggcgattgtgactcagtggtgtgaaggcagcagtctctacaaacacctgcatgtccaggagaccaaattccagatgttccagctaattgacattgcccgacagacagctcagggaatggagtaagtacacggtttggtgagtccttgtggcttgaacccttgagctgcttttgtgggactggatcgagtggctctttgacagcagatattcatggatgggaagtccggagttcccgtttctcatcagcctgaccgtccactcagccatggcctacagggagataccctttcctcaccggcacttttctcaattacaattcaaaaaatttttttaaaattatgtatatttatgtggatctttgtgtaggtatgagtgccagtattcaggagtccccctggggctggaatcagttgtaagctgcctgacacccaaactgtctcttttgattatccattttctttcaaaggtcatctctagggtctctgctcccatggtgtggagtgaccaggtgaccaccaggcagtgctctttagctttgtttcccaagtgcccttatggtgagggtgcagagctccttagtgcttacagccaggtgactgtagttggtgtgttacaaaataagtgcttcgttctgtcttaaagtcatgcagaagccagataggtggtgcatatctttaatcccagcattcaagaggcaagttgcatctctgagtttaaggccagtatagtctatagagcaagttctaggacaggcaggactaaatagaaaccttgtctcgaaaaactaaagaacaaaaaaattcatacagaactctaaatcataagcagcacaggtacaattcaaataccatacaaattattttggaagtgtatggcttgggggcttttctgtatcctattactacattctgtgttcttaccgcccagaaaaaaatccagctcacagccatccccggcctctgacaatctgccttcccacttctgggtttgtcttggataggcagaatgtgaggtgaaatgcctggcttggtttgcagagcaaatccaagtttcaatatgcagagcacagtgctacccaccagttagctgaagggcagtgaggtggttaactgagtgatttttctccttcacagctatttgcatgcaaagaacatcatccacagagacatgaaatccaacagtatcctttggtattgagttctcagcttaaggacccaaaagggcctttttgcacacatggttcatggtgccagaatggggagaaggggacttttaaaggaaaatagaaatatagttgagaagccaaacatggtgatcatgagagttccttaaggttttattattattttttttaaccaacagtgatctggaaataattccttctgaggcgatacacacttgaaatagacttgaactcagcctggttagattatccagaatatagcttgagaaggttattgcatctatttctattgagcctatggaaggtgtaagcctgcatacagatgggaaagtatctgatgcatgtatctaataccaacaagtcataagtgattgctgcctcctgctcacttttcagaccagcataatgtcagccatatagtagaccaatgtgatattttgtagaagagacatgaacaagatcccttcaaactaagttatgacacaaggctggagagttaaaggtttactgttgatctttctaatcaaaagcaattgcttctggtggtccttatggacagataccaaagaaaaaggcatttgctaggtcagtagctacacatcgtatatcaggaagtatgctaattgctcaagtaaggacaccacatctggtatagcctgtcactttttacagtccatctgtcttctgtactggccatgaatcaccacccctgcatctttcaagtctttgatggtagcactgattgctgcaattctgccagggatgtgacacttttggttcccatccctggcagagaccctgctaaaggcttccatttagcttttcccaggggaaacagtttgaaggcccactgtaactattgtgagtcagacttcaaccaaaattccactaatcacctgacctcctatttttaactcaaaggacacaatatttcttaaggtctcctggaattagcatcttagaaccagtatcccagaattccagaaatttcaaaatggctactttctgttaaatgtacagaagtcagcctagaggccactgttagaaatagcatctccttaccaactgcacctttcatgctgtaagatggcacatggcagggtggttaaactcagctgttctgcatggccaatgagctatgcttattcggtggccatgacctcctttcttgaggtcattctttttcggcagctaagcactgggccaagatttaaggcttgaattccaataaatcagcaggtcacaaatcagaccaaaattgcctgttacctagcagtaagctgacagaagtcacaatgtagaccagttgggtggtaaacctgagtaccaaatgtaggcagaggggataagcagtgtggggccctgtaattgagtgtgcgcatgccatcgttccctgtctcctgaaagatttagtagtgaagtgaaggaggccagaagcactgttataaacagtataaactgtcagtctccttaacaagcatcgagatatatttctccatgaaggcctcacggtgaaaattggagattttggtttggcaacagtgaagtcacgctggagtggttctcagcaggttgaacagcccactggctctgtgctgtggatggtgaggaagctggccccacacaacatgatggaattactgggccagagtagggtgcaaaatttgacagcatttctgcacagccatgggggtctggttgatctgtggtgtcagttagcttaaggcaaaaccgcatatcctggcaaagcaacagaggccagcgcctgtggggttttgtgggaggagctaccctgggctaaggacttgaacttccttcctgactagttaaaatagcctggttcctcaatgtctctggaggtcattccctagggattaacacacttcatccttacaggccccagaagtaatccggatgcaggatgacaacccgttcagcttccagtccgacgtgtactcgtacggcatcgtgctgtacgagctgatggctggggagcttccctacgcccacatcaacaaccgagaccaggtgatctgcatggccgggcgacacagtgaggggctacttagtcctgggactctccttcacagactcctttgttcaactgtttcttctttagatcatcttcatggtaggccgtgggtatgcatcccctgatctcagcaggctctacaagaactgccccaaggcaatgaagaggttggtggctgactgtgtgaagaaagtcaaagaagagagacctttgtttccccaggttagagagctcagttgaaatataacattctaaggatgtaaatgtgggccaggattgggtcggtggagagaggacctccacaagctcttggtatggttggggagataccaagtttccaactaatgagaccacgtggggccttgtttcagatcctgtcttccatcgagctgcttcagcactctctgccgaaaatcaacaggagcgcctctgagccttccctgcatcgggcagctcacactgaggacatcaatgcttgcacgctgactacatccccaaggctaccagtcttctagctgatgatgtagctgttcttaggccaccaggggacgaagaagagtcagcaggcaccactttctgtttccttgggggcagaatgcatgtttttggaaaagctgctgctgctaaggacctagactactcacagggccttaacttcatattgccttcttttctacccctcctgccctggaaatggaagctgtccaccaagaaagcctgctcagctccagaggtatacaagtcagctgagtatttgtagggcaagtggccttggagaaggtagggcactccggctgctgcagggacatgcaattgggaacttggctccttgagcctatatggacagtggtgcagtgccagttttgcacatggagtcctggccacctgggggagcctgctttggtactacagaactttgtggacaaactgtgtctaaggtgtcctgtgtggatggctttccaagcgcggtgctccacctttggcagcctcccacgtgctgaatctgtcttccaggagctgcccctatggggtgggccgcggcccaaccctatctgtagccacatccttgtctgtaagaaagccaggaatacaggttttcttaatgattttgggttttaattttgtttttattgagccaatacagttggttccttatgttattttaataaaataaattaaatttaggtttaatggctactgactccttcaaaacttgcagtgcagtttcttgtgcagacagaactcaaggagccccctctgcagttcatgaacaaccaagtgaaaagcacacaggtaataacaggttttcttataaaaataaattcaggttcaggacaaatttgctctttcttgcccccagttcttagacagaggagtgactgctcctgtttaccacaaaaacaagtgtggagcctactactttataggggagaacaagcaatctgtgagtcctgtgtcttgtgctcttagtacaaggggagggtaagatggagtctccctggagatcttcacaactgcacacacctgtgacttgagacactggaaggaactcaatagccaccctcacagctgtaaaagtctacactatggtacagcagcaccaatatggccaaatgtgttctcactacacagctgcatcaattccaaggctcgacaactctattagagatgatcactgcagaggagccttctacagggctgg

SEQ ID NO: 540 - DNA, 3506 bp, Mus musculus
aggtcgtggagacgagtgtcgagcgcagggctagctcgcccgggatagcctgagagcgtcttcttcgcgggtgctggtgccgccatcttggatggcgggagttagagccgagcggacttgaggcgggaaggcttctctgttgttctccgcaggccctcggacgggccagctggccgagctttggggcgcgtgccctgaggcgcggggcgctagtgcagcgatgcggggcctccccggggccccgtcccccgggctggggacacgccgaatgtgaccgcaaccaacgcgttctctcaaccaccgctgccgctgcacgacgggacccggcactgcccggctccctcaggtataagtattgtttaaactgcatcaatggagcacatacagggagcttggaagacgatcagcaatggctttggactcaaagatgcggtgtttgatggctccagctgcatctcccctaccattgttcagcagtttggctatcagcgccgggcctcagatgatggcaagctcacggattcttctaagacaagcaatactatccgggttttcttgccgaataagcaaaggactgtggtcaatgtgcggaatggaatgagcttacatgactgccttatgaaagctctgaaggtgagaggcctgcagccagagtgctgtgcagtgttcagacttctccaggaacacaaaggtaagaaagcacgcttagattggaacaccgatgccgcctctctgattggagaagaactgcaagtggattttttggatcatgttccactcacaactcacaactttgctcggaaaacgttcctgaagcttgcattctgtgacatctgtcagaagttcctgctaaatggatttcgatgtcagacttgtggctacaagtttcatgagcactgtagcaccaaagtacctactatgtgtgtggactggagtaatatcagacagctcttgctgtttccaaattccactgttggtgacagtggagtcccagcaccaccttctttcccaatgcgtcggatgcgagaatctgtttcccggatgcctgctagttcccagcacagatactctacaccccatgccttcactttcaacacctccagcccttcctcagaaggttccctgtcccagaggcagaggtcaacgtccactcccaatgtccacatggtcagcaccaccctgcatgtggacagcaggatgattgaggatgcaattcgaagtcacagtgaatcagcctcaccttcagccctgtccagcagcccaaacaacctgagtccaacaggctggtcacagcccaaaacccctgtgccagcacaaagagagcgggcaccaggatctgggacccaggaaaaaaacaaaattaggcctcgtgggcagagagactcgagttattactgggaaatagaagccagtgaggtgatgctgtctactcggatcgggtcaggttcctttggcactgtgtacaagggcaagtggcatggagatgttgcagtaaagatcctaaaggtggttgacccaactccagagcaacttcaggccttcaggaacgaggtggctgttttgcgcaaaacacggcatgttaacatcctgctgttcatggggtacatgacaaaggacaacctggcgattgtgactcagtggtgtgaaggcagcagtctctacaaacacctgcatgtccaggagaccaaattccagatgttccagctaattgacattgcccgacagacagctcagggaatggactatttgcatgcaaagaacatcatccacagagacatgaaatccaacaatatatttctccatgaaggcctcacggtgaaaattggagattttggtttggcaacagtgaagtcacgctggagtggttctcagcaggttgaacagcccactggctctgtgctgtggatggccccagaagtaatccggatgcaggatgacaacccgttcagcttccagtccgacgtgtactcgtacggcatcgtgctgtacgagctgatggctggggagcttccctacgcccacatcaacaaccgagaccagatcatcttcatggtaggccgtgggtatgcatcccctgatctcagcaggctctacaagaactgccccaaggcaatgaagaggttggtggctgactgtgtgaagaaagtcaaagaagagagacctttgtttccccagatcctgtcttccatcgagctgcttcagcactctctgccgaaaatcaacaggagcgcctctgagccttccctgcatcgggcagctcacactgaggacatcaatgcttgcacgctgactacatccccaaggctaccagtcttctagctgatgatgtagctgttcttaggccaccaggggacgaagaagagtcagcaggcaccactttctgtttccttgggggcagaatgcatgtttttggaaaagctgctgctgctaaggacctagactactcacagggccttaacttcatattgccttcttttctacccctcctgccctggaaatggaagctgtccaccaagaaagcctgctcagctccagaggtatacaagtcagctgagtatttgtagggcaagtggccttggagaaggtagggcactccggctgctgcagggacatgcaattgggaacttggctccttgagcctatatggacagtggtgcagtgccagttttgcacatggagtcctggccacctgggggagcctgctttggtactacagaactttgtggacaaactgtgtctaaggtgtcctgtgtggatggctttccaagcgcggtgctccacctttggcagcctcccacgtgctgaatctgtcttccaggagctgcccctatggggtgggccgcggcccaaccctatctgtagccacatccttgtctgtaagaaagccaggaatacaggttttcttaatgattttgggttttaattttgtttttattgagccaatacagttggttccttatgttattttaataaaataaattaaatttaggtttaatggctactgactccttcaaaacttgcagtgcagtttcttgtgcagacagaactcaaggagccccctctgcagttcatgaacaaccaagtgaaaagcacacaggtaataacaggttttcttataaaaataaattcaggttcaggacaaatttgctctttcttgcccccagttcttagacagaggagtgactgctcctgtttaccacaaaaacaagtgtggagcctactactttataggggagaacaagcaatctgtgagtcctgtgtcttgtgctcttagtacaaggggagggtaagatggagtctccctggagatcttcacaactgcacacacctgtgacttgagacactggaaggaactcaatagccaccctcacagctgtaaaagtctacactatggtacagcagcaccaatatggccaaatgtgttctcactacacagctgcatcaattccaaggctcgacaactctattagagatgatcactgcagaggagccttctacagggctgg

SEQ ID NO: 541 - protein, 644 aa, Mus musculus
MEHIQGAWKTISNGFGLKDAVFDGSSCISPTIVQQFGYQRRASDDGKLTDSSKTSNTIRVFLPNKQRTVVNVRNGMSLHDCLMKALKVRGLQPECCAVFRLLQEHKGKKARLDWNTDAASLIGEELQVDFLDHVPLTTHNFARKTFLKLAFCDICQKFLLNGFRCQTCGYKFHEHCSTKVPTMCVDWSNIRQLLLFPNSTVGDSGVPAPPSFPMRRMRESVSRMPASSQHRYSTPHAFTFNTSSPSSEGSLSQRQRSTSTPNVHMVSTTLHVDSRMIEDAIRSHSESDSALSSSPNNLSPTGWSQPKTPVPAQRERAPGSGTQEKNKIRPRGQRDSSYYWEIEASEVMLSTRIGSGSFGTVYKGKWHGDVAVKILKVVDPTPEQLQAFRNEVAVLRKTRHVNILLFMGYMTKDNLAIVTQWCEGSSLYKHLHVQETKFQMFQLIDIARQTAQGMDYLHAKNIIHRDMKSNNIFLHEGLTVKIGDFGLATVKSRWSGSQQVEQPTGSVLWMAPEVIRMQDDNPFSFQSDVYSYGIVLYELMAGELPYAHINNRDQIIFMVGRGYDDLSRLYKNCPKAMKRLVADCVKKVKEERPLFPQILSSIELLQHSLPKINRSASEPSLHRAAHTEDINACTLTTSPRLPVF

SEQ ID NO: 542 - DNA, 113260 bp, Homo sapiens
aggagatcaagaccatcccggctaacatggtgaaaccccgtctctactaaaaatacaaaaaaaaattagccgggcatggtggcgggcgcctgtagtcccagctactcgggaggctgaggcaggagaatggcgtgaacctgggaggtggagcttgcagtgagctgagatcgcgccactgcactccagcctgggcgacagagcgagactccgtctcaaaaaaaaaaaaaagaatctgaggaagaagataaaaccacagttgcccagatctataatgagaaaatgaactaaaagaaagcaatttccagaattaatgtgcaaaccgtattttaggctgagaaaaaggctgtatagacaggcttgatttttttcaatctgatgaccggagcttttagctaaggttgaccctcttgtattatccttaaatttttcacttctagagaggtaagtgaaggggcacaaaatttaagctaaacatcagaggactgcatcttcagctactgtttaaagctcagttctcatggtctccaagttatggaaacattgcacattataagggttgtaaatattgttaattataaacataataccaggccgggtgcggtggcttatgcctgtaattcccacattttgggaggccgaggtgggtggattgcctgagctcaggagtttgagactggcctgggcaacatggcaaaaccccatctctactaaaaatacaaaaaattatgcaggctggtggggcgcgcctgtaatcccagctactggggaggctgaggcacgagaatcgcttgaccccaggaggcagaggttgcagtgaaccaagactgtgtcattgcactccagcctgggtgatagagcgaaactctgtctccaaaaaaataaactacctgccaggtatggtggctgacacctgtaatcccagcactttgggaggtcgaggcaggcggatcacgaggtcaagagatcgagaccatcctggctaacatggtgaaaccctgtctctactaaaaatacaaaaaattagccaggcgtgatggcggatgcctgtagtcccagctacttgggaggctggggcaggagaatcacttgaactcgggaggcggagtttgcggtgagccaagatcgcgccactgcactccagcctgggtgacagagcgagactccgtctcaaacaaacaaacaaacaaacaaaaaaccagccgggcgcggtggctcacacctgtaatcctaacactttgggaggccgaggcgggcagattacctgagctcaggagttcgagaccagcctgggcaacatggtgaaaccccatctctactaaaacgcaaacaaacaaacgaacaaaaaattatccgggcgtggaaatgtgcgactgtagtcccagctactcgggaggctgaggcaggagaattgcttgaacccaggaggtggaggttgcagtaagcagagatcgtgccactgcactcctgcctggcgacagaacaagactctgtctcaaaaaaaaaaaaagagctggatctccatccaggccagagaagcttctcacagacggttttcaactctaagaaataaattggtttggtaataaatggcttctagtcagataaaatatagtaataataaaataaaaataataattccagagttctcacaatgtactgaatctggtctgatgaagcctctccaacgtgaacccctgtgaatccacaacagcctcagaggctgtggggcaaagcaagccacctgaggaatgaatagcggaagaaagactaaaggcagtgggcagccttttacacccattggtctttggggctcggaacactccttcagttcatagactccctcctcctgaaagcgtgtgcataactcccagtgatttccacatgtggtctgaagggaacgctcttcagaaggagaagacatgagcttcactgaatgtcaatattcagtttccggagagaaaatcaacagctaacggccggggcatctattagggctctgctatcggcgatagaaaaactaacttaattgttttaagtacaaaaagggggaatgtaatctgcatggaactgaaaagcccaggtctggctgttggaggtctggctggtttcagtgctcaacagaggttgaaggaccccgcggaatccattctcgggccctgtgaactccaggctctgtttttttttttttttttttttgagacacagtctcgctctgtcgcccaggctggagtgcagtcgtgcgatctcggctcactgcaagctccgcctcccgggttcacgccattctcctgcctcagcctcccaagttgctgggactgcaggcgcccgccaccacgcccggcttttttttttttttcctctttttttttttgtattttttttttttagtagagacggggtttcaccgtgttagccaggatggtctggatctcctgacctcgtgatccgcccgcctcggcctcccaaagtactgggattacaggcgtgggccaccgctcccgacccaggctctgctctcattgtataaaggtggctgagggccgggcgcagtggctcacgcctgtaattctagcactttgggaggccgaggtgggtggattctctgagctcaggagttggagaccagcctggataaaacggtgaaaccctgtctctaccaaaatacaaaaaattagctgggaatggtggcgtgcacctgtaatcccagctactcgggaggctgagacaggagaatcacttgtacctgggagggaggttgcagtgagccgaaatggcaccactgcactccagcctgggtgacagagcgagactccatctcaaaaaaaaaaaaaaaaaaaaaaaaaaaagtggcagacacagctccagcctttcctcccctcccagttcaagtccatgggaaagcccagaaggcttatttggaagcttcctctaaaacctgagactcactgtgattggatccgttgagtcatgtctccatccctcaaccaatcacagtggcctgtgcctgagtcacagctttcattcctggcaccaggggagagtcccagccaaatagcagggtctgagagtaggggagaagtgggtccccaaacgtttcttaggataagaagaaaaggcaaacaatgaagtcctctgtaaccgactacttcaattgaggcatggggcctgagatggataacccaggtgcttcccagccccttccactgggcctgtatttcaccaaacttaggcactcaacaaaccaaactacttacattttcttgcacacacacactgtataagtgatctattgctgtgtaacaaattattctaaaactcagcagctaagacaagcatttactatctcatgcagtttatgagagttcaattcagcaggggcttagctggtggctctggctcaaggtctctcatgaggtcatagtcaaaaaataaaagctgaggttgcagtcagtggggaccatggtatctgaaggcttgatgggcttgaagaatctgcttgtgtgactattggcaagcggactcagttcctcatcatgtgggtctctctgtaggactgcctgtgacttccttcagcacaaatgatccaaaaaagaaagagatagaagatagaagaaacaggaaaaaatcttgggtgaagttccttttttttttttggcagcattgcacacagtcttttagaactagccttggaagtgacacaacaccacttctgtggtattctattggtcatgcagaccaaccctgacaaaatatggcagggaatttcacaagctgtgaatacaggaagtggggatcacaggcagtcatcttggctaccatgaagagtgccaactcctgcctctgtgtgtatctttacttgccctgtttcttctgcctgtctttcctcatctccttcccttggagaatttcacttttgatttcattcctgaacacactcctcctccaggaggccctcccttcccacttatccagtcattccctctccaaggaacactgacacgtagatagactactatgtttcaaagccttgcctgggcctgtaattcatttgttcttctccacactgcacaatgaggccctcaagggcagggactctgctgggcatctctacatcaccagtagctggtgtggcctccagcatgagggtgaactgtagataatggagagtgaaagggagaactgacaggattgtccatatcatttcagcaaaacaaaacaacacaagcacatctttggtcctgattatctggctttcattctccctttggagccagccaatgtgagccaatgaaggaaactgtatcaattttagactggatgtggtgacaatgaaataaccagaaattaaagtgttagtcatccaataagccttgttcctttaaggttcatcttaaggctaaagccacagtttctcttctgtcttagctaacagtgaaataagtatacattaagcaccaactatatgctcagtactacacgctgcgggatgggggcggtagaatataccataataaggcccttatcccagagactaagaaagacctaagccattacatttttttgaagctcctgagatttttttttattttttattttttttttagagatggagtcttgccctgttgcccagactggagtgctgtggtgcaatcttggctcattgcaaactctgcctcccaggttcaagtgattctcctgcctcaccctcccaagtagctgagactacaggagtacaccaccacgccaggctaattttttgtatttttaatagagatgaagtttcaccatgttggccaagctggtctcgaactcctgacctcaagtgatccacccgcctcggcctcccaaagtgctgggattacaggcgtgagccaccacccccggaatttcctggtattttttttaaatgtagaaattccaaaataggtattaaaaaatggtgatgggccaggtgcggtggctcaagcctgtaatcacagcactttgggaggcaaaagagggcagatcaggaggtcaggagttccagaccagcctgaccaatatggtgaaatcccgtctctactaaaaatacaaaaattagccgggcgtggtggcatgtgcctgtaatcccagctacgcgggaggctgaggcaggagaatcctttgaagccaggaggcggaggttgcaatgagctcagatggagccactgcataccagcctgggcaacagagccagactccgtctcaaaacaaaacaaaacaactgatgatgaaggctgggcgtggtggctcacgcctgtaatcctaacactctgggaggccgaggctggaggattgcttgagctctaaagttcaagaccagcctggacaacatggtgaaaccccgtttctactaagatacaaataattagctgggtgtagtggcatgggcctgtaatcccagctacttgggaggctgaggcaggagaatcgcttgaacccaaaaggtagaggttgcagtaagctgagatcacaccactgtactccagcctgggtgatagagccagactctgtctaaaaaaaaaaaaaaaaaaaaaaaaaggtgatgaaatattttaaaggcttatttttaaatttttatttctatttgtagagaagaggtcttgctacatggctcaggctggtcttgaactcgtggcctcaagcaatccttctgctttggcctcccaaaatgctgggattacaggcatgagccactgtgcttggcctttaaaagcttatattcaacaaactaataacttttaaattcataatccacccccatacaaacataatgtaaatttatgatgctcttttcaagataaaggatttaagatgtaattcacagatgtggccaattaatacttttcaaagatagtgcaacaataggtcccatcccatatgaatttctgtaacctcatcagtcccgcatcgagaagtggattctgtatttcctccccttggctctgcgggctgtaactgctacagccagtagagcacagtggaagagatgctaggtcagtaggtcataaaataccatgacgcattagttgttggtgctctgagtccccacgtaggaattctggacaccctgaggccactgtgctggaagagccggcagaggtgctctggcagataccctcagctgagcttaagttcaggcagcttgttacacaacaaaggacagctggaataataatctaccacagacagtgtggtctggtgtcaggctccagtttaaaattgtatgatgagtggtttcttgttttattctgatcagtgtacctctataacctcgtttggggagaatggcaaattttaagacccttccaggcctatatgaccctcctggcctcgctccagggtcatctacataatttgtgagacccagtgcaaaatgaaaatgcagggcctggccgggtgcggtggctcacacctgtaattctagcactttgggaggccgaggcgggcagatcacaaggtcaagagtttgagaccagcctgaccaacatggtgaaaccccgtctctactaaaaatacaaaaattagctgggcatagtggtgcgcgcctgtaatcccagctactcgggagcctgaggcaggataattttttgaacccgggaggcagaggttgcagtgagctgagatcacaccactgcacactccagcttgggtgacagggcgagactccttctcaaaaaaagaaaaagaaaaaatgcagggcccgtggccggttgtggtagctcacacctgtaatcccatcactttgggaggccaaggtgggaggattgcttgagtccagaagtttgaaaccagcctgggcaacatagtgagacccctgtctctattaaacagaaaagaaaagaaaatgcagggcccttgttcaaaaggcaaaaaaaaaaaaaagtgccattaaaagttcgactaaggcagggcacaatggctcatgcctgtaatcccagcactttgggaggccaaggtgggtggatcacctgaggtcaggagttcgagaccagcctggccaaaatggcgaaacctcgtctctattaaaaatacaaaaattagctgagtgtggtggcgcatgcctgtaatcccaactactcaggaggctgaggcaggagaatcgcttgaacccaggaggcggaggttgcagtgagccgagatcaagcaactgcactccagcctgggtgacagagtgagactcccatcttggaaaaaaaaaaaaagaaaaaagttcaactaaaatgtagaacttggccaggcacagtggctcacgcctgtaatcccagcactttgggaggccgagatggacggattgcctgaggtcaggagttcaaccagcctggctgacacatactgaaaccctgtctctactaaaaaaatacaaaaattagctgggcatggtggcgcatgcctgtggtctcagctatttgggaagctgaggcaggagaatcacttgaacccaggaggcagaggttgcagtgaggtgagattgtgccactgcactccagcctgcgcgacagagcaagactccatctctcaaaaaagataaataaataaaaaatgaaaaataaaatgtagaagtttttcttttctttcatggtttctccaccatgttttatatttgctatttcatgtcatgttcctttggacatggggatgctcatagggtgaatgcagaccccaataggggcctgtgtgttcccaccagctggttcccaggttgcccctcccaccaactgccagactgatgtgctgagcccagctgggggcagggaaggcaatcttcgcttcccagtagaacactgtcccacctcctgatagatagtgaccctcaagggattgcagcttctgtgccaggtagtgttcagaatctgggtcaggggcgggaggcgcctgctaggctgcctgccaaatgtgtagtggtaggaccacacctggtgggcttggaggagtcccaccctgaccttcctggccccaccccaaggtggagggtcacaacaggagctgggtgggggtgagagaggggaggctgccccaggtagcagtagggagtggggtggggtcggagggaagtggcagaacacagtggagcaagtggctggaaccgccccccttcccgggtagggaggaagtaagaggctggaccacgcaggagcagaggtctcaagctccatcgtcacattggacttcacatacaaaacacaaactcaaagataaaatgatgaagaatttcaaaacagagatcacagagcattcaaccccaagtataggcgctttctgagcatggaatggggttcctgtgtgactagctggcctcatggtcataaagcccaccctgcccctctcaccacacaaaataagatgcttttttttttttttttttgagaaggcgtcttgctctgttgcccaggctggagtgcaatggcgcaatctcggctcactgcaacttccgcctcccgggttcaagcgattctcctgtctcagcctcccaagtagctgggattacaggcatccaccaccatgcctggctaatttttttgtatttttagtagagatgaggtttcaccatgttggccaggctagttttgaactcctgatctcaagtgatctacccacctaggccacccaaagtgctaggattacaggtgtgagccaccgcgccctgccgataagatgttttaaatagggatctcagccctaccaaagcccttggtggggcagggggaggtgggcacatcattcccatttcacagataagaaaactgcagatacattagccagtttgctaatacatagagtcaaacagctaataggataaagagatggaaatcaaagtctatagctgaataacaataataaaaaaaaaattagctgggtgtggtgacgcacctgtagtcctagctactcaaaaggctgaagagggaggatcacctgagcctcaggaggatgaggctgcagtgagccgtgattgcgccactgcaatccagcctgggtggaaaacaaacaaaacaaaacaaaataaaacaaaacaaaggctgggcatggtagctcacgcctgtaatcccagcactttgggaggccaaggcaggtggatcacgaggtcaagagatcaaggtaatcctggccaacatggtgaaaccccgtctctactaaaaatacaaaaattagctgggcgtggtagtgcatgcctgtagtcccagctacttgggaggctgaggcggaagaattgcttgaacccaggaggcggaagttgcagtgagcagagattgcgacactgcactccagcctggtgacagaacgagactccatctcaaacaaaaccaaacagaaaacaagtctatagctggttgtgcagctgtagtccctgctacacctgatgctgaggcaggagggtcccttgagcccaggagtttgacgccagtctaggcaacatagtgcaaccttgtttctattttttttttttttaagatgagttttgctctcgttgcccatgctggagtgcagtggcatgatcttggctcactgcaacctccgcctcggggttcaagtgattctcctgcctcagcctcctgagtagctgggattacaggtgcctgccaccacgcctggctaattttttgcatttttagtagagatggggtttcaccatgttggccaggctagtcttgaactcctgacctcagatgatccacccgcctcggcctcccacagtgctgggagtacaggtgtgagccactgtgcctggcccctctatttttttttttttttttgggtagcactaccttttaaataagtcagattccaaagcttgtgcctattctgtgatgcctatgtgaggctgagagaaggcaatgcacacaacgaagttggggtagaggtggagctagttgctgcagaagtggtcctcgagctgggatctaaagcatggaagggtatttcaaacagaggaaatggcaggagctgcttcaccaagctgctctgggtctaacaccctgcaagcgtaaaaggagccagtcctgggacaagaagaatcagacaacgctggtgtgaaataggagagaagcacagaggtagagtttcaacaggaagggcataccctttaccaaatgccacaaagggcattgaggcctgggcttgggacaccctcctgggatttactgggggccttggagggtggtttccgtgggaagaagaggcattctggggatggctgtggaaggccaactgtcacggcttaatgcaggggtgggtgagaaaattcagcccgagcctagaccattttttaggttaatttggccctaaaggggaggaattagggtaccaagtacaaggggcacattggtgttttttttcttcaagacccagtcgacttgtccatgtagggcagaaagcagtgagtcagggagaggttggggagagggggaggagccgcgctttctgcgctcctactgtgtgctagggactgtgctttccagttttgtttcctcccagcaaggcttgaaggcaagtgtttcctacttgacctgagggagaggccaagaatcacagggatgaggggcaggctggggtttggtctcccagctgtctgactccagagtccaggccagcccctctgtgccgaagagagaggagggattgggcttatcaaggagaaaatgcatgttctcctcaggagctggatgaaggggtggcctgcccctccacacctgtgggtgtttctcgtcggttgggatgagagactgagaaaagaaagagacacagagacaaagtatagagaaagaaaagtgggcccaggggaccggcgctcagcatacagaggaccacgctggcataggtctctgagttccctcagtatttattgatcattatctctaccatctcggagagggggatgtggcaggacaatagggtaatagtggggagagggtcagcaggaaaacatgtgaacaaatgtctctgtgtcataaacaaggttaagaaaaaggtgctgtgctttgatgtgcacatacataaacatctcggtgcattaaagagcagtattgctgccagcatgtctcacctccagccataaggcggttttctcctatatcagtagatggaataatacaatcgggttttacaccgagacattccattgcccaggcacgtgcaggagacagatgccttcctcttatctcaactgcaaagaggccttcctcttactaattctcctcagcacagaccctttaaagggtgtcgggctgggggacggtcgggtctttcccttcccacaaggccatatctcaggctatcacatggggagaaaccttggacaatacctggctttcctaggcagaggtccctgaggccttccgcagtgttttgtgtccctggatacttgagattagggagtggtgatgacttttaacaagcatgctgccttcaagcatttgtttaacaaagcacatcctgcatagccctaaatccattaaaccttgagtcgacacagcacatgtttctgtgagcacagggttgggggtagggttacagattaacagcatctcaaggcagaagaatttttcttagtacagaacaaaatggagtctcttatgtctacttctttgtacatagacacagtaacagtctgatctctctttcttttccccacactgctaaagtaggaatatggcataatagggctcctattgaaggtgggtcttcagccctgaggtgtttccagggctcagagcaagtgagtcttccccctcccacccccaagtgttcaggtttattgaggccatgaggagctacaaggaagccttgagtgtctgggatatagcctgacatcagcctggacagtggcccagatgaggtctccaccatttgggtttacttgaaatgtgactctcagcttcacctcgcccaaagcttttgggcctgaacacagcgaaatagcagaggtggttgcaatagggcttgccttcatgctccgggtggcccttggaggtcggtgtctttccacacttccacacttgaggcaaggtcaatgccagtccttgccctgggaggtcacctgttcagcaaagtacacttttttcttttttttttgaggtggagtcttgctctgtcacccaggctggagtgcagtggcgtgatctcagctcactgcaacctccgtctcccgggttcaagcaattctcctgcttcagcctcccgagtagctgggactacaggtgtgtgccactatgcccggctaatttttgcatttttagtagagacagggtttcgccatgttggccagggtgctcttgaactcctgacctcaggtgattcacccgccttggcctcccaaagtgctgggattacaggcatgagccacctcacccagccaagtacaccttcttgttgcacttagagcgcttggggatggcagcactgggtccggtgcaggcagctgtggctgcagcaggagtggactattagtgcgagactcacatgtgaattgtgagggaatgctgtgggcaaccttcctctagaggtgagccatggaggtggtgggggaggtggtgggccaccgtgcccggctcatgcatgtaatcccagcactttgggaggccgaggccggtggatcacgaggtcaggagtttgagaccatccttgccaacatgatgaaaccccgtgtctacgaaaaatccaaaaaaaaaaaaaaattagctgggtgtggtggcatgtgcctgtaatcccagctactcgggagggtgaggcaggaaaatcgcttgaaccagggagtcggaggttgcagtgagccgagatggcgccattgcactccagactagcgacagagcgagactccgtctcaaaaaaaaaaaaaaaaagattacaagcaattgcaatgtggcaaggaataacctgtttggacataatttcacacctttacaagtatatctgtaggataaattcccaggagaagaatttctagcacaaaagatacatgcatttataattttgatattgccaaattaccttccatagagattgttccaatttttttttttttgagacggagtctcgctctgtcacccaggctggagtgcaatagcacaatctcagctcactgcaatctctgcctcccgggatcaagcgattcttccgcctcagcctcccgagtaactgggattacaggcacctgccatcatgcctggctttttttttttttttttggtatttttgtagagatgggatttcaccatgttggccaggctggtcttgaattccagacctcaggtgatccacccacctcggcctcccaaggtgctgggattacaggcgtgagccaccacgcctggccgattgttccaatgtatatgcaccccagtaatttatgagagagcccaggtcttaatttttaattgttttccaagatggctgtactaggctttcctgcaaatgacaccatagcatatattgtggttgccaccccagcaaccaggccctcaccctccatcatgggctgcccattatggcatgagggggattgacactgggccaggtatcttttgcccctctaggattccccttcatcattctctccatgccgtctgccccaggaaggcgatctccaacctcagagacctgcttgctgtttcccaaacttatgctaatcacacctctatgcctttgcccatactgttcccacctcttgccctgcactccttcccttctcagtctggaacattctgaagttgtcctcacaggattaacaagaattttggacaaaaatatattaatagttataattaagcattacttaggctgcactttgacccactttcttgtaactgaaaattacagggcactagatactgaccatttgcatccccattgttcctacagataggtttttttttttttttttgacaaggtctcactctgtcacccaggctggagtgcagtggtacaatcatggctcactgcagtcttgacctcccacactcaagcaatcctcccgcctcaacttcctgagtagcccagtctacaggtgtaggctaccacacctcgctaatttttaaatttttttgtagagacaggggtctccctatgttgcccagaatggtcttgaactcttgggctaagaggtcctcccacctcagcctcccaaagtgctaggattacaagtgtgagccgccaccacacctggcctatagatcagctttctgatgctagaataataagccttttatttaagataggtagaatctctgacattagaatcataaggtttttgtttaagaatttcttaagatgttttttagatcctgaattccagcaagacagctgacctcaaatagtctgaagacccactgacccctacagaggaatggaatcagcatgagaatacagtttcttcatctccctgttccatgactttgccctgtgccctttgagcaatcaaggatctccacactttggctgattcccaaacccctgaaaaccctagccccaaactctgtggagacggatttgaggtttcctcccatctcctggttcagcatccctagaaataaacctctttcactgctgcaatgtggtgaattgacttgccacgtgcaccggataaaggacctattatggttacaattccactcatcctttaagatagcttatatgttgtctctggtcactgcctccctcctcttggtgcccctcgcacagttatccatgagagcacatttgcgtcacctgctggggcaactgtttgtttacatggctctgtctctcccagcacccagcccaggccagccccacacttcaaagtccctgcagggcaggatggcatggaaaggtcacaggtttgggagtcagactgaatatgactccaccctctgtcctcagcctcatctgctcccccagttttctgtgctctaaccacactggcctgcactcctgtctcacttcatggcccttatacatgctgttccaactgcttagaatgctcttcctctggctctttttcatcctttcgtgcccagcttaactatcacctcctgagacaggccttccttgactactgaatctaaaggcacaccctcttcccattctgtcattctccagcaattcccttcattgatttgccacaaccctaattatcatattattcatttacttgtttgctgcttgtctcccctgctagagcttaaagtccttgagtacatacagggactttgccttgtttactgctataggcccagctctaacacagggcctggcatatattaagtattaaaaaaatttaattttagcttttttttttttttttgtgaacggagtttcgctcttgttgcccaggctggagtgcaatggcacgatctcgactcaccgcaacctctgcctcccgggttcaagcgattctcctgcctcagcctccctagtagctgggattacaggcatgtgccaccatatctggataattttgtacttttagcagagatggggtttctccatgttggtcaggctagtctcgaactcccgaactcaggtgatccacccgcctcggcctcccaaagtcctgggattacaggcatgagccactgcaagcggccaattttagcttttttcagacaagctggagtgcagtggcatgatcatagctgactgcagcctctaattcctgggctcagctgatcctcctgcctcagcctcccaggaagctagaactacaggaatgtgccaccacccctggctaattttaaaaatttttgatagaaatggagtctcacgatgtagtccaggctggtctcaaactcctggtctcaagtggttctctcactttggcctcctgaattgctgggattacaggtgtgagccaccagtccaccaagaaatttttattaactgaatgaggaatgaacaaacaaaatagatccaaatccttgctccactacttaccaccagatttgtgtcttaggacaaattacttaccctctcctcatgtgaagatgaggcctctcatgggttgtgtattggaaactgtaaaaatgcctgatacgtgaagacattccataaatggccgttattttttctttccttcatctgaaaaatgtaccctttttgccaagcataaagaccttactgtacatctttactttttcttttcttttttgttttttgagatggagtctcgctctgtagcccaggctggagtacagtggtgtgatcttggctcactgcaagccccgcctcctgggttcacgccattctcctgcctcagcctccggagtagctgggactacaggcatccgccaccacgcccagctaattttttgtattttgtttagtagagacggggtttcactgtgttagccaggatggtctcgatctcctgacctcatgatccgcccgcctcggcctcccaaagtgctgggattacaggcgtgagccaccatgcctggccaacggtacatcttttttttttttgagacagggtctccctctgtcgcccaggctggagtgcagtggcacaatcttggctcactgcaacctccaactccccggttcaagcaattcttgtgcctcagcctacagagtagctgggactacaagcatgcgccaccatgcccagctaatttttgtatttttagtagagatgggattttgtcatgttggccaggctggtcttaaactcctgacctcagatgatctgcctgcctcagcctcccaaagtgttgggattacaagcgtgagccactgcgcccggcctattttcctcctctgatctgacatcatgggcatgtctattcttccttcaaaccatttcagactcattccttcctcctattactcttctgagacctttcctaataactttagcacacttgacctctcctaccaccaaaccagaggtatctaaagtaggggatatgcaacccagcatgtaacacacatgttttagcacacacgatgcccaaaaaatggaaacagcccaaatgtccaccaacagatgaatggataaacaaaatgtggcataaacttacaatgggatattattcagccatgaaaatgaataaagtactgacacatgctaccatgtggatgaaccttgaaaacattatgccaggtgaaagaagtcagtcacaaaaggccacatattgtgtgagtccatttttatgtaatatccagaatagaaaaatccatagtgacagaatgcatattggtgattgccagacgttcaggggatggggaagaaactgcttgatgggtaaggggttttactttggagtaatggaaatgttttggaactaggggtggtggctgtaaaagactgaatgtactaaatgccactaaatgttcagtttaaaatggttcatttcacctcaataaattttttaaaaaatgaagtagccattcttccaggtgagctgaaaagtttgaatgaggcacaggctccttaaatttcttttttttttttttttttttttttgagacggagtctcgctctgtcgcccaggctggagtgcagtggcgcgatctcggctcactgcaagctccgcctcccgggttcacgccattctcctgcctcagcctcccgagtagctgggactacaggcgcccgccactacgcccggctaattttttgtatttttagtagagacggggtttcaccgtgttagccgggatggtctcgatctcctgacctcgtgatccgcccgcctcggcctcccaaagtgctgggattacaggcgtgagccaccttaaatttctaagatgtaaagtgctgggcaaatatcagctggggatgctgaaggaaggaataatcagaaggtcagcaagtgtggcttcgaaactctgcctcaagtaataatgataatgataattagagatagttataatattgacttctttggtttccttgtaaaccagtgttattttagaaaaagagggagatagctctagtaattacagctaacacttctacaatgcttaatatgaggaaggcactgttccaagtactttacgtctaaaacttactaaatccttacaactctaagaggtagtatcatcacatttccattatagatgagggaatggaagaattgagaagtttaaatgagttctccaagtcacagataaggaaatggcagagtccaaatttgaacccaggcaagtcagactctaggcactgaagtctcaaccaccaggctctgcactaagtgctctccaggttttatctcatttaatcctgcaaggaaagtgttattattcccattttattttatttattatttatttatttatttattgagacggagtttcacccttgttgcccaagccaaagtgcaatggcacaatctccgctcgctgcaacttctgcctcccaggttcaagcagttctcctgcctcagcctcccgagtagctgagattacaggccaccatgcccggctaattttgtatttttagtagacatggggtttctccatgttggtcaggctggtctcgaactcccaacctcaggtgatctgcctgcctcagcttcccaaagtgctgggattacaggcatgagccaccgtgcctggcctattattcccattttaaaaatccccctcatgctatccacattccacaccttctagtctttcttttttttttttttttttttgagacggagtttcgctctgtcgcccaggcagacggagtgcagtggcgccatcttggctcactgtaagctctgcctcctgggttcacgccattctcctgcctcagcctcccgagtagccgggactacaggcacccgccaccacacccggctaattttttgtatttttagtagagatgggatttcaccgtgttagccaggatggtctcgatctcctgacctcgtgatccgcctgccttggcctcccaaagtgctgggattacaggcgtgagccaccgcgcccggcttttttaaaaatttttttattttttttatttttagtagagaccgggtttcaccgtgttagccaggagggtctctatttcttgaccttgtgatctgcctgcctcggcctcccaaagggctgggattacaagcgtgagcgaccgcgcctggccagtctttctcctacatttatttttacgttggtccacatactcctgtcattctcactttgcttcatttttcctttcttcttcttttttaagagacgggggcttgctatgttgtccaggctggagtgcagtgaggcaatcatagcttatgccatccccaactccaagtgatcctccagcctcagcctcctccctagctggattacaggagcatgtcaccatgcacactaattttcttttcttttttttttttggtagagatggggtctcatgttgctcaggctggtcttcaacatctgggctgaagtgaccccccttccttggcctctcaaagtgctgggattagaggctttggccaccacatccaacctgaattttattatttatattttcttttaatctcccattactagatggcagggattttgattactgttaattttccaatatccaaaataatgtgtggtacctaataggctctcaatatcgaaaagtaatagtgcacatggcattctgtagtattaggtaggtatcttgtgttcctgtgtttgcgtaaataagatcatacattatgttctgcttttttaacttaatggctttttttttcctttttttgcgacagagtctggctctgtcacctaggctggagtgcagtggcgctatctcggctcactgcaacctctgcctactgggttcaagtgattctcctgcctcagcctcctgagtagctgggattacagacgcgcaccaccacacctggccaatttttttttttttttttttaggcggagtctcactctgttgtccaggctggagtgcagtggcgcgatctcagctcactgcaagctccgcctcccgggttcatgccattctcctgcctcagcctcctgagtagctgggactacaggggcccaccaccacacccggctaatcttttgtatttttagtagagacggggtttcactgtgttagccaggatggtctcgatctcctgacttcgtgatctgcccgcctcggcctcccaaagtgctgggattacatgtgtgagccaccgcacccggcctatttgttttgtattttttagcagagacaggtttcaccatgttggccgggctggtctcaaactcatgacctcaagtgatctgcccgcctcggcctcccaaagtgctgggattacaggcgtgagccaccacgcccagccatgtcttcttttttttttttttttgagacaagagtttcgctcttgttgcccaggctggagtgcaatgacgcgattttggctcaccgcaatctccgcctcctgggtacaagcaattctcctgccttagcctcccgagtagatgggatgacaggcatgcaccaccatgcccagctaatttggtatttttatttttttatatttatttattttttcgagacggagtctcgctctgtcgcccaggctggagtgtaatggtgcgatctgggctcactgcaacctctgcctcccgggttcaagcgattctcctgtctcagcctcctgagtagctgggattacaggcgcccgccaccacgcccggctaatttttgtatttttagtagagacggggtttctccatgttggtcaggctggtctcgaactcccgacctcaggtgatccgcctgcctcggccttccaaagtgctgggattacaggagtaatcccaaaaaaagcgccgggccctttttttgttgttttttaaattcagtaactatctagttcattcttggatggatgacaacccagattggatgtgtagcagcgttctcttaaccagtttcctattaatcttcatttcatccccagtgtttctccagaatgcaaataatatggcattaaatatcttcacacatagctttttgtgtatgtgtatacttatttctctagaattagtgtctagaagtgaaactgccgggaggaaggatatatacttttaacatgtccaagttccactgtgatagcgctgcgagggcacacaacaggtttcaatataccttggaccaaaccggatattatcagtttttttaacttgttgctaatgtgatgggggaaaaatgaactcggaatttacacacaaggaaaagaccgtttaaggttcagggactgtccacatagctgtcaagtggcggagccgtgatttggtattaaagtgcccggagaggacgcgtcaaagttggacactgtgccctgtgtcctgaggcacgtctggtgatcgctgggccttgcaatgctgggcaggcaggccttcctctccccttctaggcctctggccactcctggctggccgaaagccggttcttctcgattaccgagtgcctctcctgaaagcaagtcagcgtcgcctaacctcttcagcttcgaaatggcggccaccagatcgctaggccacgccccgggggcggggcctgagttcaggccagagcgatggatgcccgagccaagttagaagtcgactgccagtagggctcgcgcagaatcggagagccggtggcgtcgcaggtcgggaggacgagcaccgagtcgagggctcgctcgtctgggccgcccgagagtcttaatcgcgggcgcttgggccgccatcttagatggcgggagtaagaggaaaacgattgtgaggcgggaacggctttctgctgccttttttgggccccgaaaagggtcagctggccgggctttggggcgcgtgccctgaggcgcggagcgcgtttgctacgatgcgggggctgctcggggctccgtcccctgggctggggacgcgccgaatgtgaccgcctcccgctccctcacccgccgcggggaggaggagcgggcgagaagctgccgccgaacgacaggacgttggggcggcctggctccctcaggtaggtggcaggaccgggtcgtggatgccgggggagccgggcggcggggctgagggatcggcttccagggcgaccgggcctgggtggcgctgatggagcggccccgcggctgccgggcagagggcttgggccaggccgctgtcaccccgggtagcgttgggcgggggccccggagtccggtgtcatggccggcgagccgagttcccacatcccactcaaatttccttgtgtttggcggaaacgtgccaacgccacccttatgccatgcgcattcctcatatttggcagtgggaaaatccgcccagagctgccccatatctgttgtcacttggatgggccaattccttttctcttgggccgccgaatgtgggacccgggcttgcaccctttctcagggtacttcagtcaagtgacacccttttagagacgacgtgaggaatcgggtaagagaggaggaaactggccagtgccctaccacaaaggcacaggggcctcttcttgggtatcaggactagccttgggtatcaggactctgggttattaatgaaaggtttgggatacttatagaggattggcctcaggacgctttggaatgaagagccagggctgtcttttgtgtgacgcgagagccgccgggacgcttcagctctgcagctgctgaggctctgcgagcgagtcgatgcccaagagagaggggtttggacgtcgtgagaggcgaggcggccgtgttcattcattgttctcgttctagggctctgggtgtgcccctggtattcattctgtggtgggaagaaggaatggaacttagtgtatccttgagatgtgaacgggttctagggggtcacttaatctaagtggaaaatgaattcaaggcacgttcattgagcgtttctgcttgcctggtcctctgtgggctgagtggagagactctgccctccctgcgctcctaaggcgtgaaaacaatgcagtgtgataagaattggcttatcaagtgttatggggatttagaacagttagttttgcttggggaggagttgaggaagcttctacactcgaggagacttctgagtcgagttttgaaacacctgtgagtaagtgctcatcgggtgaggaggagctcagggaacagctggtacaaaggcttagagccatgtgggagttgggatgagtttggggagcagcaaattgcctggggtgcaggaaggaaatggtgagagatgagagtaaaataaaagttgctagaattgtgagggggctgtctttgttgtagatagtgaactagttgaatttggattattgtacatgggttgccgagtcttcattcttgctgataattttctccctttgttgatgttgaagctgatagtgattgaacatatttagtttaacttagttaatgacttttaaatttttttttattttttcagaacaatgcaaactttttttttttttttttttttttttttttttttaaaggaacaggatctcactctgtcgcccaggctagagtgcagtggcatgatcatagctcggttgcagcctctaactcctgggcttaagcagttctcctgcctttgcctcctgagtagctgggagtacagacaggtgccaccacacatggctaattaaaaaaaaaatagtagagatggagtctggcagtgttgcctaggctggtctcaaactcctgggctcaggcgatcctcctgcttccacctctccctcccaacgtgcttgctgggattacaggggtgagccactggccaggcagaactttttttttttttaaataatagagagggggtcacactatgttggccaggctggtcttgaactcttgggctcaagtgatcctccagcttcagcctcttaaagtgctgaaattacaggtgtgatccactgtgcctggctagcagaacatttttgataagtgttttatatcaaatgttttgacttacacagtggtgaatgaattgaactcatatattcctggggattcttgcaaaaaattctcttaaagttatacttgctcacaaaaatgttaactttataaatgtagaacactctcctactaatttttattttattattctattgttttttatttttttgcgacggagtctcactctgttgcccaggctggcgtgcaatgatgcgatctcggctcactgcaacctctgcctccttggttcaagcagttctcctgcctcaccctcctgagtagctgggtaggcacactccaccacgcccggctgatttttgtatttttagtagagatggggttttgtcgtgttggccaggctggtctcgaactcctgaccgcaagagatctgcccacctcggcctcccacggcctcgctgggattacaggcatgagccactgtgcctggcctaaattttaaatataagtaatgtactccccagtcttacagaaattggacgactatagaaaacaaacatcaaaaaaagtgtagaatgtgagtatttttagtttaataagtgtattttataaactatttatttgtattgacttctcggataacaacctgttataaaatctttatccccataaacataattttcctaaaatagctataatattgtgattaatgtttatgctaaagtgactattatggaattaacagacttcagttgcagtttctaaatcttgctttggttgtgatgattatataccactgaagaacattcaggattattttggcttgtttttacccttatcactcaagggctaagctgtttaaaatgcaacataaacatttgacccagttgaatgctgggatacttggaaaaataaacctgttactgtttctgtactaaaggcttatcttttaaagatatgtggtgtttttttagcgcagtggtgcgatcttggctcactgcgacctctgcctcctgggtttaagcattctcctgcctcagcctcctgagtagctgggactacaggcgcctgccaccacgcctagccaacttttatgtttttagtagagacgggatttcaccatattagccaggctggtcttgaactcctgaccttgtgatctacccgccttggccttgcaaagtgctgggattacaggcgtgagccactgtgcctggctgatatgtggtgttttgtgattataaattgtagtggagttccttagttttgttaaagtcttgtcagtagttgtaaaaacatcagccagttgtggtggctcaggcctgtaagcccagcactttgggaggccgaggctggtgaattgctagagctcaggagtttgagaccagcctgggcaacatggtgaaaacctgtccctacaaaaaatacacacacacaaaaagaaaaaaatcagcagggtatggtgtagtatgcctgtagtcccagctgcttgggaggctgaggtgaaaggctcacctgagcccagggagattgaggctgcagtgagccatgttcatgccactgtactccagtgttggtgatggagtgagaccctgtctcaaaaaaaaaagtgtgccttcaatagaaggcttgaacgtattttatgggatttggtttagctgaaaaaaacagtgagaagcagattaagctggtaatttctgacaaaaagtatctaaaagatgaagtgaagaatgttaaacatcaagtattatattacagttgctcttagactagtagcttttagtttataacatgtcatttgtttgctctgaagattaagcaagttcatacttcttggaagttaaatttgacttttccagaagcactggattatttacgaaataaaaaatataattgataactttaaactactatttcaggtagtctattactagtaaatgtatgattctacatttaaatttcaggtaaatctttgttagtaacctactgcctaaaaaaatgttacatgagggagtacttttgtttgcatgttaggatcataataggccatacataataatcttgagcttgggaggagcttgttagccaaacagcatgccttaatgttgacttgcagaagacaattttaaatattgcctttgaaaggcagtggataatgtgacagtgagggggtttatgaaaccataaaattgagctttttgacttagtttttgtttttaagttgttcagatcttgggagtcatttcttcaaaacaaatgactatgaggtggaaaattacttaccttgaataaattaattggaaaatcagagaacactgggtttatttaggatgaggttgtttggtatgtgtatgggagggtagaattcctaattgctcatctgactgggttcaaaatgtaatactagatatttgtgttgcaattcagttggtacttttggtatagggctaacttatcttgcgtgtaattttttttttttttttttttttttgagatgaaatctggtgctgttgcccaggctggagtgcagtggtgtgatcttggctcactacaacctccgtctcccaggttcaagggattctcatgcctcagcctcccgagtagctgggattacaggcgccggccaccttgcctggctaatttttgtatttttagtagagacgaggtttcaccatgttggccaggctggtcttgaactcctgaccttaagtgatccacctgcctcggcttcccaaagtgctggcattacaggctcgctcaggcatcttgccttgtaattctcatgatagtaatggctatttttttcttgccttagagttgtaagtaaaaattccttaattacacattaaggtttgatctttaattttacaatgtttgagtcattttgttacttcttttctcccagaatgacttgcgtagctctaaatgattttagttaatttcacatctgtttgcctttcttctaaaatgacccctagaatctcagcttaactaaggaaaatgtcaagtgggtgttgtttctttgttagtggttttggcctagactatctaaagtttggcaaattactcacaaagtatgttaattggcatcacattccaatcagtgtacatagcattttttgaggaacacttgacacacggttttatttttagaccagattctaaggggttttactgggtggggcttaacaatcctaaagctagtttacggttttaaaatctttatgatttagaggttgtttacattttttgttaataaatgggaagcagcaggcagtggcagtcaattttgtttgtttctttttttgttttttttgagacggagtttcgttcttgttgcccaggctggagtgcagtggcatgatctttcctcaccacagcctctgcctcctgggttcaagcgattctcctgcctcagcctcctgagtagctgggattacaggcatgcgccaccacacctggctaattttgtatttttagtagagacagggtttcactgtgttggtcatgctggtcttgaactccctaactcaggtgatctgcctgcctcagcctcccaaagtgctgggattacaggcgtgagccaccacgcccagccctcacataacttttatgatattatgttcttataattgttccattattaattataattaatctcttactgtgcctaatttatatgttaaacttgatcatgggtatgtatgtacaggaaaaaacatagtgtatacagtatagtatactgttcttgctttcaggcattcattggtagtcttggaacatattccaagtggatatggaagcactactatgtgatggaatgttactcagtaataaaaagaaaggatgtactggtgtatactacaacattggaaacatattaagtaaaagaaaccatgcaggaaagaccacatattgaattattccatttatatgtaatgtccagaataggaaaatccttagtgacagaaagtagatcaggggctgagggatgtagggaatggtcagtgactgtgatagggttttttttgttttgttttgttttgttttgttttttttttgggtgataaaagtgttctacaattatggagatggatccacaactgtgaatataataaaagccattttattgtgtacttttttttttttgagatgttttgctcttgttgcccaggctggagtgcagtggtgcacaatctcagctcaccgcaacctctgccttgggttcaagcgattctcctgcctcagcctcctgagtagctggggttacaggcatgcaccaccatgcccgactaattttgtatttttagtagagatggggtttctccatgatagtgagactggtctcgaactcccgacctcaggtaatctgcccacctcggcctcccaaagtgctgggatttacaggtgtgagccactgcgcctggcccctgcctggaaattcttaagaattaaatattattttctttgagtaagtaataatgtcagatgtcacaaaatttaaaggatatagaaagttatgttgtgcatagttattctacgttctcctttgttctctagctacccagcttcctttcacagagggaaatgtgaattcttatgtatcctattttgtgacgacacaaaaatatttaagggtagatgtgctggccttactttcttgctcaaatcttccaggctctccctggctaccagactaagtatatacaattcttgcttctgtgtcttgctcacatggctttctcatagtaatagtatgtttagtggaaatcaaaagccagtatttttaggcccctgtaggtgcaggccagtgcacttggtgcagcataaggcaagttcctaccttcaaggaccttatctaattgagagaggctgacatttccttacttttatctattcctctttttttttttttttcccgagatggagtttcactcttatcacaaaggctggcgtacagtggcgtgatgttggttcactgcaacctctgtctcccgggttcaagtgattctcctgtctcagcttcccaagtagcagggattacaggcatctgccaccacgcccggctaaattttgtatttttagtagagatggggtttcatgatgttggccagactggtcttgaactcctgactgcagatgatccacctgtctcagcctcccagaatgctgggattacaggtgtgagccaccgcagtggccaagttgaatttcttgtatagatgtcttatgtctcagtttaaaaatgaggcatgtcttactcttgcctatatatttccagtggggcatgtcttatccttttttatatatctccagttctcaaaaccttgtcttacacagcaaacattaatcagaggttaatcacttatggatttagtttcactctactgccatctctccaaaatgcttacagtaaagaggctacacttactaaattcaaacttagaactttgtaacttaggacctgtctgttggaggaggtaagttgcttaagcttctccctctattgggcattatatgtagagtgctctaggttctgcctgctagctccttgatgacatttgcctgctttagcaggacactgactcttcagctcaagcagctgttaccatgctggctatttccttttgcattcataggttttagatatggaagaaagttatacccagagagaatggggggataaatgataatcttctaccatttttgaccttagtctggtccagcattatagtgtgattttgagaggagagattgtgatttccctggctagtattatctagtattgcctgacaatgcaaaatggacccctaggctgtcttatgtaagttggaagggggcggattgggggtggggtgtgtgtgtgtgtatctacaatccagtgacatttaacaacattcacaatgtcttaaaaccattgccactactcgtttccagaacctttttgttacctcaaacagaaacagtactcattaagcaagaactcctcattcctccctatgcccagttcctcgtaacccctattctactttctctctatgaatttgcctattccaggtacctcatgtaaggggagtcatacactatctggccttttttgtctggcttattttacttagcacatttttgaggtttatccatgtggtggtggcatgtatctgtattttattcctttttatggctgaataatatttcattgtatgaatatatcattttgtttatctcctcatcagtgatggacacttggattatttccaccttttggttgttgtaaataatgctgcagtgaacattggtgtacaaatatctgttggagcccctgctttcagtgccttagggtaatgcacaggagtagaattactggatcatatggtaattctgtgtttactttttgaggaactgccaaactgttttgcacagtgactgcaccattttacatttcccaccagcaaagcacaagggttccagttttgccacatcttttccaacacttgttattttttcttttttaatttttaaagtaacaatcttgggctgggcacggtggctcatgcctgtaatcccagcactttgggaggccgaggcgggcggatcacctgaggtcaggagttcgagaccagcctggccaacatggtgaaaccccgtctctactaaaagtacaaaaaaaattcgctgggcttgttggcgcatgcctgtaatcccagctacttgggaggttgaggcaggagaatcgcttgaactcgggaggcagaggttgcagtgagctgagattgcgccattgcactccacaagagtgagacttcgtctcaaaaaataaataaataaaataacaaccctaatgactgtgaagtggttgtaggctttttgcattttaaaaaattattatttttactattttagagatggcggggggggggtctcactatgtttaccaggttggtctcgaactcctggcctccattgatcctcccattttagcctcctaaagtactgggattacaggcttgagccactgcgcccagccctccttttcttcttattgctacttagatgtaatgggcaaaccagaacctttgaatttggctatatttggatctgatgggttttttcctccctcttaaacttgtgtataatgttgttcaaagggatacattatgtacacaattaatgacatctttttaaaaagaacactttctttcatccttgtgaggtgtaagaagaaaaataagcaaaaaaaaaaatgaataaagtttttctataagttgatacacacagttgtagttactttatactcataccctttttttgtgttgtgagtgacacagtctcactccattgcccaggctggagtgcagtggtgcgatctccactcaccgtagccttgacctcccaggcacaagccatcttccctcctgaacctgctgagtagctgggactacaggtgtgtgccaccacactcagctaatttttgtattttttgtagagatggggttttgccatgttgcccaggctgatgtcgaagtgctgagctcaagtgattctcccgccttggcctcccaaaatgctgggattataggcatgagccactgtgcctggcctctcatacttttttattctataatgtatttagggccagcctctgtggctcatgcctataatcccagcactttgggaggccaaggagggaggattgcttgaggccaggagttcaaaaccagcctgggcatcatagtgagacccccatctctaaaaccaaaaaaactagtcaggcatgtggtatgcgcctgtagtcccagctacttggtaggctgaggagagaggattgtttgagtccaggaattggaggctgcaataagctatgattgtgccatggtgctctagcctgggcaacagaacaagatgctgtctcttgaaaaaaaaaaaaaagaaaaagaaaagatgaatagtctgtctgaaatggccggcagtcgcagctgctgacctgacctgcatctactgtataagtcaagtagttcaactttttattataatgtcatggcttttctttgcttcttgggagcgcttccagcatcactagtggtacttcatatgggacccatgctgttattcaaagtttatggtattgtactgtacatgatgaaaaatacagaagacccatgagagatcacttttttttttttgagacatagtcttgctctgtcgcccaggctggagtgcaatggcatgatctcagctctcctctgcctcctgggttcaagtgattctcctgcctcagcctccctagtagctgggattgcaggcactcgctaccacaaccggctaatgtttatatttttagtagagacagggtttcatcatgttggccaggcgggtctcgaactcctgacctcaagtaatccaccagctcggcctcccaaagtgctaagatgacaggaatgagccaatgtgcccagccaagagatatcactttttactgcaataggaaatgtactggagagaccaactgctcagagggacacaaggccttttaagtggacacatgcaacttgtaacacttgagttcactgcaatagaaagaagaggtggctatgaaattactgtagtaatatagtttgtacaacaggtttgttttcttttgaggcaaagtctcactctgtcacccaggctggagtgcagtagcaagatctcagctcactgcaacctctgcctctcaggttcaagcgattctcctgcctcagtctcccaagtagctaggattacaggcctgtgccactatgcccagctaatttttgtatttttagtagagatggggtttcaccctgttgcccagggtggtctcaaactcctggcctcaagcgatctacccgcatcatcctcccaaagtgctgggcttataggcatgagctaccgcacccagccaacatcatttaattttatgcagttatttatttatttaattaaaaaaaaaattttttttttgagatggagtctcactgtcttgcccaggctggagtgcagtggcttaatcttggctcactgtactcactgcaacctctgtctcccaggttcaagtgattctcctgcctcagtctcctgagtagctgtataacacctggctaattttttgtatttttagtagagacagggtttcaccatgttggacaggctggtctcaacctcctgacctcaagtgatccacccgcctctgcctccccaagtgctgggattacagatgtgagccactgcacctggcttcagttatttaatatgctgcagttatttaatatactgcatcttaacatttgtttacatttctctcaagtgtgaatgtgtgtctgtgcaaatggtgttatgtatggtctgtaagtatatgcataagttttgattttttttttctttgagaccgagtctagctttgtcgcccaggctggagtgcagtggtgcgaacttggctcactgcagcccctgcctcctgggttcaagtgattctcttgcctcagcctcccgagtagctgggattacaggcaccggccaccatgcccagttaatttttgtatttttagtagagacggggcttcactgtgttggccaggctggtctcaaactcctgaccttatgatccgcccatctcggcctcccaaagttctgggattacaggtgtgagtcactacgcctggcctatttttatttattattgtttttttgagatggagtcttgctctgtctcccaggttggagtgcagtggcatgatgttggcttactgcagactctgcctcctgggttcaagcgattctcctgcctcagcctcccgagtagctgggattacaggtactcatcaccctgcccagctaattttttatatcatttatttatttatttatttatttatttatttatttatttattttagagatggagtttcgctcttgttgcccaggctagagtgcagtggcgcgatctcggctcaccacaacctccgcctcctgggttcaagcagttctcctgactcagcctcccgagtagctgagaccacaggcatgcgccaccacacctggctaattttgtatttttagtagagacgggttttcaccatgttggccaggctggtctcaacctcctgacctcaagtgatttgcccgccttggcctcccaaaatgctgagattacaggcatgagccatcgtgcccagctcatatttttaatttgtttccctccctctttgaacatgtattctgtgatcaattcgtgtatctttttttttttttgagaccaagtctcgctctattgcccaggctagggtgcagtggtgcgatctcggctcacggcaaccgatctcagctcactgcaacccccgcctcccgggttccagcgattctcgtgcctcagcctcccgagtagctgggactatgggcatgagccaccacgcctggctaattttttttgtattagtagagacagtgtttcaccatgttggccaggctggtctcgaactctggacctcaggtgatccaccctcctcggcctcccaaagtgctgggattactggcatgagccaccacacccagcccaatttgtgtatcttaaaaaattattgggaaaagaaattattgcaaaaaatctatatatattggtatgagattataagcatgtagggaaacactgaagaataattggttattgggagaaggaaaggaaagataaaacaaagaaggggttaaaagatcccctctaatacatgtaatgtttaagtgctatagaaaaaaagcagggtaaacattttagaagtaaaaaggcttgctatttataatgagtgcctttgtaaagacattaattgtgaatatttaaaataaaaggaaacaaagttatgtaataagaaaggctgtatccttcatcaggctcatttctttacctgcttgtctgtgcttattccctgggcacactttagcttttgttttacctctgcgttagtctgttgaaatattgcccctttaagctcaaatacacaatgaaatatccttgtctacctcttcttccactcaagctagaagtgaccttaccacatttcagattcttatagtacgtttcttaagaatcctccctacctttaatttcatattttgttgtaggcctacttgtcttcctgaaagctcttagcccagtgcctagcacatattcaatttttgttaaacggtggtggtttttacttctactttaaggggttctgaaatgcaaggaccatgtctccctgaactttatattcctcaaagcagctaacagttgaaagtagattcttagaaattgttgaatgaatggtgctctttattctttttttcctttcattccatgctgggttacagtctatagagaggcattctggttctttagatttatgtgatagtgattcggtattcatgaaaaagggttaggaaaatattgtaattgttaacttttctccattgatattcagcagatatttgagtacctaattttgtgcaatgtcctatactggatgatggattataacaagattataggaaatacatgtagttcttcaatgctttggtatataattatgtaggttatattttcttttttgagatggggtttcattttgtcacccaggctagagtgcagtgatgcagtcacggctcactccagcctcgacctcctgggctcagacaatccttctatcttagcctcctgagtagctgggactgtaggcatgactaccatgcctgattaaatttttttttttttttttttttttttttttgagatggagtctcgcactgtctcccaggctggagtgcaatggcgtgatcttggctcaatgcgacctccgcctcctgggttcacgcagttctcctgcctcagcctcccgagtagctgggattacaggcgcccatcaccacacctggctaattttttgtatttttagtagagatggggtttcactatgttggccagactggtcgcgaactcctgacctggtgatctgcctgcctcggcctcccaaagtgctgggattacaggcatgagccactgtgcctggctgcccagctaattaaaaacaatttttttgtagagttgatgttccccctcagttgcccaggctgatctggaattcctgggctcaagcactcctcccaccttggcctcccaaagtgttgagattacaggtgtgagcctgaccctaggttatatttttgtgtttcatttactattttatcctctggcaaaatagcagggtataatttagagctttaatgaattaatggtgtaactaacagtgaaaactgtgtgtgtgtgtgtgtgtgtgtgtgtgacagtctctggcccccatgctggagtgcagtggcacgatcatagctcactgcagcctcaaactcctgtgctcaagtgatcctcccgcctcagcctccttagtagctgagactagaggcatgtgtcaccatgcccagctaattttgttttatttttataaagatgaggtgtcactctgttgaccagggtggtcttgaactccttggctcaagccattctactgctttgatttcccaaattactgagattacaggcatgaaccaccatgcctggccagggaaaaattttaaacatgtctttcttttgagaaaattattattgaaaagttggttaaaagtaatttctgaagaacaaatgatattatcagttttacaggtgtcttactgtaactcttagaagttgttaaagtttactattgagcgcaccactaaagactagggaatttttctttttcttttctttctttctttttttctgagactgagttttgctcttgttacccaggctggagtgcaatggcgtgatcttggctcactgcaacctctgcctcctgtgttccagcaattctcctgcctcagcctcccaagtagctggcattacaggcatgtgccaccacgcctgggtaattttgtatttttagtagagactgggtttctccatgttggtcaggctggtcttgaactcccgacctcaggtgatccgcccacgtcggcctcctaaagtgctgggattacaggcgtgagccatcgcatccggccgatgggaatttttctatttgaaagccattgactccagaaggaagtgtaggggagctggctgaatcagatggttacttttttttttttgaagcagaatctcactctgtcactcaggctggaggacagtggtgcgatctcggctcacagccacctctgcttcctgggttcacatgattctcgtgcctcagccatctgagtagggaatacaggtgtgcaccaccacatccggctaatatagatggttacttcttgaaactgctttggtaagatgtaaacttgggggaatacctcttctcttgaggacacatctcctctgccaaatgagtgatgccagtgtgtagaatgaatgattcacttatattctgtgtccttatctttgaggagggctaattttttttaaccacttgttgaatatgcaagatttactgtgaaaattaatgcctttagtatgaaagagaaattagtgtggaaattgttagtgtttccaggtgatttttttcccccttccttcctacttcattatgtagctttttttttttttttttaacttcgctgttacttggctatctgaataatcattcctaaaccatattttatttgtacattgtgtgttttggtacttgtgttaatggtgtactttgaatacacatctgtttattttaaaaatcagcagttgctgactagatgaagaaaacaatgactgatttgaaggtgaaaagaaaaactcgggttaaaaaagagtccagacaatgtgatttaaaatgaaaataatttaagcttatttgtggtgagagttaaaaataaagttggctccaggtatcatttgtggaactgatttgttttagcataattgtttttgaactagctcgtttttaacttgtatttttaaagttacacttttaaaatgtaggagtctgttttgtaaacttgtacagcccctgctaacttttagaagagtagagtggcttatttcttcatgtgtgtttattctgggctgtcatctgatgaagttaccagtttgtggtcagaaattgagaaagaggagtgaggaaacgaaaaatattgacacgtacacatcaccttgcagtgcatgagagtgcccttttggactggttaggaaactaacatttgagcatatttgctcagcagaaactttttatgtgtgaaagttattttttttccagtgttgtgaccacttaaaatttatttatttgttttgtttgtttgtttgtttgtttgagacagggtctcactctgttgcccaggctggaatgcagtggcacaatcatggctcactgcaacctggacctccctgggctcaggtgatcctcccacttcagcctcttgaatagctgggactacacatgtgctacaccgtgcatggctgattttttgtagagatggggtttctccatgttgtccaggctggtctcaagcttctaggctcaagcagtctgcttgcctcaacctctcaaagtgctgagattacaggggtgagccaccatgcctggcctgaatttcttttttttttttttgagacggagtctcgctctgtcgcccaggctggagtgcagtggcgcgatctcagctcactgcagccttcgcctcctgggttcccgccattctcctgcctcagccttccgagtagctgggactgcaggtgcccgccaccacaccaggctaattttttgtatttttagtagagacggggtttcaccatgttagccaggatggtctcgatctcctgacctcgtgatctgcccgcctcggcctcccaaagtgctgggattacaggcgtgagccaccacgcctggccggtaatgaagattttaataatgactttaaaaaccaggcacagtggctcactcctgtaatcctagcactttgggaggccaaggtgggtggatcatttgaggtcaggagtttgagaccagcctggccaacacattgaaaccctttctctactaaaatcacaaaaattaggctgggcgtggtggctcacacctgtaatcccagcgttttgggaggctgaggcaggtggctcctgaggtcaggagtttgagacaagtctggccaacatagtaaaacccgtctctactaaatatacaaaaaattagccgggtgtggtggtgtgtgcctataatcccagctactcgggaggctgaggcaggagaatcatgtgaacccgggaggtggaggttgcaatgagccgatattgtgccattgcactccggcctggcaatagtgtgagactctgtctcaaaaaaaaaaaaaaagacaaatacaaaaattagcagggcgttggtggtgcgcacctgtagtcccagccactcaggaggatgaggtaggagaattacttgaacctggaggcagaggttgcagtgagctgagatcgtgccactgcactccagcgtgggtgacagaggaagactccacctcaaaaaaaagacttaaaagaaaccggtaatatcgttattatatttctgcctgtcttaattctttatccatttgctgtagattataatgttagctgcatgaatgaaagattatatttttccagctactcaggaggctgaggtgggaggattgcttgagcccaggagtttgaggctacagtgagctatgatgaagctactgcacttccagcctaggtgacaaagggagactccgtctctaaaaaacaaagattagatttttgatacaccatctattagtatattatttaatgagtaaaaagaaaggataagttataaaaaagcattaagaatatgactgctctaatgaatttaagctaaatcctttgttgtttagaagtgaagtaaaaatctcttaaatatgaagaaaaattttaattgcttgtgatatataagacatggtatatacagtctttttctttcctccacacagaggtctgatgcattatttacaaacaatatttatttaaaagtaatgtaataagccaggcacagtggctcatgccttgtaatcccagctctttgggaggctgagctgagacgctgcttgaggccaggagttcgagactagcctgggcaacatagtgagacacccccctcaccccaccccacctctacaaaaaaaagattaaataaatacagtacagtacaataattaggaactcttctagatagctcttaaacttccagcctgggtttttctgagttcagtgcctaaaactcttaaccactacattactgtattccaaaaattaagtcctaggtttcaaagtacagatcaactgtgaaaaacaaacaaaaattttaaaggtaatagtaacatcattaaacaataaaaatttcaaatcccattgtaccattcaaatcagtgtattataatggaaagagatgtaaagtctgagtatctgaatttttaattttgcttctcttaaattgtcactaaaccttttgaattttactttttttcttcatcaaaaaaagggatagtatgaataatacctgctttagcctgcttaattctaacagttctgtgagataatggaaagatgagctgaataaattgtaaagctgtgttaaattctgagttctcttgactaagtaaacttttttgagtcggaactacacaaaaagcattgctgggttctcagaagttaggttttaggtagatctaagaatctcttaaaaccttaataccaaaaggctggctaccttagatatttttgtcctgccaccttattttttttttttttttttttttttgagactgagtctcgctctgtcaccaggctggagtgcagtgatgcgctcttggctcactgcaacctccaactctctggttcaagcagttcttctgcctcagcctcccgagtagctgggattacaggcacgtgccaccatgcccagctaatattttgtatctttagtagagacgaggtttcatcatgttggccaggatggtctggctctcttgaccttgtgatccacccatctctgcctcccaaagtgctgggattatagccatgagccaccacgcctggccgccttaatatttttgagtgaaatatagtatttgaggaaaaactcaaaaatgaggtttttcaaagtgcctgattataatgattgatttgctaaggcgtttttgaagaaaacttaaaaatgtccatgcctgaagtatttacattgtttattgcatgtgggtgtttccctactcagaaagggcaataggaagatttgactgctagcccttgctaagcaaaaggatagagccaagggatagggcaaaacaaagtcatccttaaccctaagtttgtccagctgcttcttgactctcttttggacagaagttttaggacttgtagttcttgtacacttaactcctgagaagcttgctgcattagtcagaattgtgataattcttaccactgtccaaaggaatctaatctcattttttgggagagtagttggcggcagtacaatccatgagaaaacttaagtgggtgttctagtttggcttacttctctagacgttgataaaataacattttcactgaaacatttatgcctcagatttagctttaatgtgacagatgtaccttaaaatattaggattcaaatcacttaaaatgataccctaagtacaggtagtaagtttttaataattgtagtctctccagatttgacttgtcccgaagctacttcattgtactttgtatgtgtgctgctccctaataatcttgcaccttgaacatagttgtgctttcttattttttacaggatatgataaactgaaaaaaaccagcaaaacctttccagggtttttgaaagtttgttgtctaatttatagtttattaatctggtactacttaacttatttttagaaattctctgaatgcaacaattcactgaagttatttctagaggtggaccacagggtgagaaggctgaaatgactgttgagttgaaaatgcctttatcacaaccctatattcttctggattatgagcatcagaataaattatacaagattcctatgtaagatcacttctcagcaatttattaggaattgcacaaggaggtaaactggatttcttttttgtttttatttttatttttttttttttgagacagagttttgctcttgttgcccaggctggagtgcagtggtgcgattttggctcactgcaacctctgccttccgggttcaagcgattctcctgcctcagcatccctagtagctgggattacaggcgcctgccaccacgcctaattttgtatttttagtagagatggggtttcactatgttggccaggctggttttgaactactgacctcaggtgatccacccaccccagcctctcaaagtgctgggattacaggtgtgagccactgcacccggcttctttttaatttttaaacaagtcactttttggcaaatatagtatggcccctatagttactcttttcttactttgatccttaacatgtttgcatacccaagagtgttgtgcctgctatataatctgtttcttagcctgatggtgctttgtgtagattgagatatgaggattatgggattagtgctcagaactctgcaagctctctggaaatacagtacacctttttgccttagccagcagaatgtttgtgagttctgtgctgaagcctgggggttgagtggtagatattgtgcttttatctgacatttgatttgttgcctgaggacagagatgcagtgttatgggtgggagttgtgtcttgccttaccagtgtttagactttttaaaagataatggatcttacttcttgaaagaataggagatgaaaaccaatgtcctcctgcttctgttcttctctttcttcatagctttccacttggcatatagcagaaaactctttggctatatttggtgcattttgttggtggaattcctcaagaatgcattcttgacttttttcttttttttttttctgagacagagtcttgctgtatcacccaggctggagtacagtgacgtgatcatggctctctgcagcctcaacctccctgttaaggcatcctctcccctcagcctcccaccccctggccctgccccaatagctgggactacaggcccatgccaccatacgcagctattttgtgtgtgtgtgtgtgtgtgtgtgtgtgtgtgtgtgtgtgtgtgtgtagagatggtgtctccctgtgttgtctggactgtctataaaacttgacattcaacagtctcttgtttttattcattgagaaactggcttcatccttttactgaaatgggagaagtgttatttatcttactgtttttttaattaattaattttttttttcctgagatggagtctcgctctgttgcccaggctggagtgctgtggcgcgatctcagctcactgcaagctctgcctcctgggttcactccattctcctcctgcctcagcctcccgactagctgggattacaagcgcctgccactacgcctggctagttgttgtgtttttttggtttgtttgtttgtttttgtttttttgttttttggggttttttttttttgtatttttagtagaaatggggtttcaccgtgttagccaggatggtctcgatctcttgacctcatgatccacccgcttcagcctctcaaagtgctgggatttacaggcatgagccactgcgcccagcctaaattaattgatttttttgagacagagttttgctcttgttgcccaggctggagtgcaatggcacgatctgggctcactgcaaccactgcctcctgggttcaagcaattcttctgcctcagcgtcccgagaagctgaaattacaggtgcctgccactatgcccagctaatttttttgtgtttttagtagagacagggtttcaccatgttggcccagctggtctcgaactcctgacctcagatgatccacctgcctcaggctgggattacaggcgtgagccaccacactgggttcctatgggactattttaagttaacatccaggaatctaaactacaactagcattacgtagttacgcttaagaaagcatttttggggccgggtacggtggttcacatgtgtaatcccagcactttgggaggccaaagcaggtagctcacttgagctcaggagttcaagaccaacttgtgcaacatggtgaaaccctgtctctatgaaaaaagcaaaaattagccggatatggtggcacatgcctgtggtcccaactgcttgggaggctgaggtgggaggatcccttgaacctgggaggcagaggttgtaatgagctgagatcgcggcactacactttagcctgggtgacagagcgagaccctgtttcaaaaaaaaaaaaaaaaaaaccaaaaaacatttttttttgggggggacatgtccaccaaatatttggaaattgttatatttcctgtaagtggaactattttttctccatatctgaaatctttctgtacattcttttttttttaatactttaagttctagagtacatgtgcacaatgtgcaggtttgttacatatgtatacatgtgccatgttggtgtgctgcaccagttaactagttaactcattgttcactttaggtgtatctcctaatgctatccctcctccctccccccaccccatgacaggccccggtgtgtgatgttccccaccctgtgtccaagtgttctcattgttcaattcccacctatgtgtgagaatatgcggcgtttggttttctgtccttgcaatagtttgctcagaatgatggtttccaggtttatccatgtccctacaaaggacacgaactcatccttttttatggctgcatagtattccgtggtgtatatgtgccacattttcttaatccagtctgtcattgatggacatttgggttggttccaggtctttgctattgtgaatagtaccacaataaacatatgtgtgcatgtgtctttatagcagcatgatttataagcctttggatatatgcccagtaatgagatggctgggtcaaatggtatttctagttctagatccttgaggaatcgccacactgacttccacaatggttgaactagtttacagtcccaccaacagtgtaaaagtgttcctatttctccacatcctctccagcacctgttgtttcctgactttttaatgatcgtcattctaactggtgtgagatggtatgtcattgtggttttgatttgcatttctctgatggccagtgatgagcattttttcatgtgtctgttgtctgcatgaatgtcttttgagaagtgtctgttcatatcctttgcccactttttgatggggttgtttgatttttttcttgtaaatttgtttaagttctttgtagatgctagatattagccctttgtcagatgggtagattgcaaaaattttctcccattctgtaggttgcgtgttcactgtgatggtagtttcttttgctgtgcagaagctctttagtttaattagatcccatttgtcaatttgggcttttgttgcccttgctttcggtgttttagtcatgaagtccttgcccatgcctatgtcctgaatggtattgcctaggttttcttgtagggtttttatggttttaggtctaacatttaagtctttaatccatcttaaattaatttttgtataagatgtaaggaagggatccagtttcagtttctacatatggctagccagttttcccagcaccatttattaaatagggaatcctttccccatttcttgtttttctcaggtttgtcaaagatcagatagttgtagatgtgtggtattatttctggcggctctgttctgttccattggtctctatctctgttttggtaccagtaccatgctgttttggttactgtagccttgtagtatagtttgaagtcaggtagcatgatgcctccagctttgttctttttgcttaggattgtcttggcaatgcaggctcttttttggttccatatgaactttaaagtagttttttccaattctgtgaagaaagtcattggtagcttgatggggatggcactgaatctataaattaccttgggcagtatggccattttcacgatattgattcttcctacccatgagcatggaatgttcttccatttgtgtcctcttttattttgttgagcagtggtttgtagttctccttgaagaggtccttcacatcccttgtaagtcggattcctaggtattttattctctttgaagcaattgtgaatgagagttcactcatgatttggctctctgtttgtctgttattggtgtataggaatgcttgggatttttgcacattgattttgtatcctgagactttgctgaagttgcctgtcagcttaaggagattttgggctgagacgatgaggttttctaaatatacaatcatgtcatctgcaaacagggacaatttgacttcctcttttcctaattgaataccctttatttctttctcttgcctgattgctctggccagaacttccgacactatgttaaataggagtggtgagagagggcatccctatctggtgccagttttcaaagggaatgcttccagtttttgcccattcagtatgatattggctgtgggtttgtcataaatagctcttattattttgagatacgtcccatcaatacctggtttattgagagtttttagcatgaagggctgttgaattttgttgaaggccttttctgcatctattgagataatcacgtagttttgattttggttctgtttatatgatggattatgtatgttgaaccagccttgcatcccaggatgaaggcagcttgatccagcagcacatcaaaagcttatccaccgtgatcaagttggcttcatccctgggatgcaaggctggttcaacatatgcaaatcaataaacgtaatccatcatgttcctgtacattcttttgcattctacatgaccttatgtatgtttaaaaacacatttttacatttctttttttgtatttttaggccgtgttggccaggttggtctcgaactcctgacttcaggtgatccgcccatctcagcctcccaaagtgttgggattacaggcatgagccaccatgcccatttttacatttcttgagcaggagccctgtagtttaaaagtcccctttattttcagcagtgtacatttaagacaaatcggatgtgtgagtaggtagaaaatatttaccgtttactgtgacagaacagatgaacaagaatgtatttggttttatttgtaatataaaacaactgtgaagggaatgccaaacaatagtagtgaatcaaactttggaaatacctctgacgtagaattctatagtagctttaattgggtattattatcagctggtctgtttgggacttgtttgatgaactgttagatgactgactgccagccaatcattatcctggctgctccttagctgactgccagtcaacaattactccatgctgattctacagtttttccacagttgtcagtgttctagttctgagtatagtctcttggcataatgtggttcataaacgactgcactgataacttttgttagaactcaccacttgccagatagcccagatgccatatgttactcattcagtaaataactcttaagagcctgccaaatgctagatacttaaaggcagtgggttataagggtgaactgaacttagcttcttagagcatactacctagtggtataggcagtcaataatcattgagtaggcaaatacctaatattatttcaaatggtgataaattattatgaaaaccaaaaagctgagtaaagagaagaatgatggggaagggtaggatacacttgaaccagggtggtcaggggaggtcctgtttgatgggtaacgggccaggccgtcatgaaaggtcttgtaggtcacagttaaagaattcgagtgctaatttgagtgaaataaataatagataaagggtatttaataatatgtccaaatttgtgttttttgttttgttttgagacagtcttgctctatcgcccaggctggagtggagtagtgcaatttcggctcactgcaacctctgcctctcgggttcaagcgcttttcctgcctcagccttccgagtagctgggatttcaggtgtgtgccactacacctggctgatttttgtatctttagtagagacagggtttcaccacattggccaggctggtctcgaactccctgacctcaggtaatccatccacctcagcctcctgcgagccactgtgcccggcctccatttgtgttttaagaacacaatgactgtgctccatagaggacagattgctttcaaatgttaatagagatggaggcgggtggatcacctgaggtcaggagttccagaacagcctggtcaacgtgtcgaaaccctgtctctactgaaaatacaaaaattagccaggtgtggtggcatgtgctgtagtccccgctactggggaggctgggcaaaagagcgaaactccgtctcaaaaaaaaaaatgttaatagaagcaagacctacaaagatgtacatatgcatatatacaatactctgtattcagtttctggaagttcgtgaattcactgaagttctcagaagttgaaagattgaagttaacccgataccctagttcctaggtgataatctagttcccaggtttactagtgagtataatacacttaaaaattgagcgagttcagcttttcacttgaagaatttgttttactagcggaggtacacaatttttgctaacttagaatgttttttatatgccggactctaaattaggtactttatatacactatcttattcattcttcactgcaattcagtgaagtttgtaccattattatctttaccctagatccatggagttgcccaagtagtgaagctggatttcaaactcagtacctgttcttttatctactaaaccaaaagtgttcagtatagtctccagggtatgtagtatgtaatgaaactgttgttgccgctgctgttcattgatgtagcaaatattttttctttctttcttttttttttgagacaaggtcttgctctgttacccaggctggagtgcagtggcatgatcttagctcacagcagcctccacctcccaggctcaagtgattctcccctctcagctgcccaggtagctgggactacaggtgcaagccaccatgcctggctaatttttgtattttttgtagagaaggggtttcgccatgttgcccaggctggtcttgaacttctggacccaagtagtcttcctcatctcagccttccaaagtgctgggattacaggcatgagccaccacacctagccagtgtagcaaatgtccctttttttttttgagcaaccatgcttactgcattttaatgtaatcaatcagttttttttttttttaaagatatacagtcttgttatgttgcccaggctggtcttgaactactgggcttaagcgattcttccaccatggcctcaagtgattctcatttctcagcctcccaagtagcttggtggtatgtaccaccaaacccagctgtttttttttttgtttttttgaaatggagtctcgctctgtcacccaggctggagtgcagtgtcgcagtctcagctcactgcaacctctgcctcccgggttcaagggattctcctgcctcagcttcccaagtagctgggattacaggtgcccaccacaatgcccagctaatttttgtatttttggtagagacggggtttcaccacactggccaggctggtctggaacccctgacctcaagtgatccactcacctcggcctcccaaagtgctgggattgcagacatgagccaccacgcctggcctaaaaacaacattattaatgtttttttttttgaggtggagtctcgcactttcgcccaggctggagtgcagtggcgcgatctcggctcactgcaagctctacctcatgggttcacgccattctcctgcctcagcctcctgagtagctgggactacaggtgcctgccaccacgcctggctaattttttgtatttttagtagagatggggtttcaccgtgttagccaggatggtctcaatctcctgaccttgtgatccgcccaccttggcctcccaaagtgctgggattacaggcgtgagccaccgcgcccagcctaataaatttataaagtaatctctctctctctttttttttttttttttttttttggagctggagtttcactctttttgcccaggctggagtgcaatggcacgatctcggctcactgcaacctctgcttcccagattcaagggattctcctgtctcagcctcccaagtagctgggattacagatgtgttccaccacaccgggctaattttgtatttttagtagaggtggggtttcaccatgttggctaggctggtctcgaactcctgaccttacatgatccgcccacctcggcctcctgaagtgttgggattgcaggtgtgagccatggcccctggccttttttttttttttttttttttttttttgagacagggtctccctctgtcacccaggctggagtacagtggcaagatcccggtttactgcaacctccgcctcccggtttcaagcaattctcctgcgtcagcctcctgagtagctgggattacaggtgcacagcccagctaatttttgtatttttaacagagacaggatttcatcatattgcccaggctggtcttgaactcatgagctcatgcaattcacccaccttggcttcccatagtgctgggattacaagtgtgagccatcgtggctgccctagtagaaagtcttaaagaagtattaaacatatactagcacctaactgagactttttccttatatcagttttagtttatatcttgtatacatatctcttataatcattttgtaaaccatgaatagtatatatcccctgctttgggaaacactgtggtgctatactattttattaatgttgttcagctacctggagtatctgaagacctagcacaggttttaccattcacctcctccaaaggggagaggatatacttaaaggggctaactttgaaaatatgggctatttccttcccttctctgttactccttccctctctctgctcttcctccaaccactttcctcccttcctccctccctggcactctcaagaaaaaaaggccattatgtagatgatagttggaaattgctagaaggggtcacataattgtggattcttgtatccggtgcacagttgtcacccagggatttccctccattggccttctggagatttccttcgcttctttcctatgctggatgtcccgtttcctatatcctaagtctttctcttgctatattcctgtaacaaatcccttgagaaaggaattacgggccaggcgcggtggctcaagcccgtaatcccagcattttgggaggccgaggcgggtggatcacctgagatcaggagtttgagaccagcctggccaacatggcgaaacgccatctctactaaaaaaaaaaaaaaaaattagccaggcgtggtagtgtgtgcttgtagtcccagctactcgggaggctgaggcaggagaatcgcttgaacctgggaggcggaggctgcagtgagcaaggtcatgccactgcactccagcatgggtgatagagcaagactcatctcaaaaaaaaaaaaagagagaaaggaatcatggaggttcaaatttttgtaatcatgaatgtcagaaaatatctctctagttctgtccctcactgatagttttgctgattattgtaaattggagatagttttccttcagaatctaggaggctttgctccattatgtcttctagtgttgttgaagagtttgaagtcattcggattcctgattttttttgtttttttttttttttttgagagagtttttactcttgttgccctggctggagtgcaatggcacaatcttggctcactgcaatctctgcctcctgggttcaagggattctcctgcctcagcctcccaagtagctgagattacaggtgcgcaccaccacacccagctaatttttgtattttttagtagagacagggtttcaccatgttggccaggctggtcttgaactcttgacctcatgatccgcccgcctcggcttcccaaagtgctgggattacaggcgtgagccactgcgctgggcctgtatttttttttttttttaactgtaaaagtttatagaatctggtcctccattattgtgatatttaacgtgttaggcattcgataggctattttaatctgatagttcaagttctttcattgtggatttttttcttttttcttttcctttcttttttttttttttaatttccagacagggtctccctctgttgcccaagctggagtgtggtggcacaacacaatcacagctcttggcagcctcgacctcctgagctcaagtgatcctcccacctcagcctatacctgggagtacaggcgttcgccactgtgttggaataatttttataattttttgtagagatgagggtcttactgtgttgtccaggctggtcttgaactcctgggttcaagtgatcctcctgcctcaccctcccaaagtgctggattacaggccattgtgggtttttttctctgtgtgttttggtctttatcatccatattcgagggtttcctaaaaagcctgatattcctttgcaacctctttatttttttaaaagataagattaaaaacaaattggaatctttgggtgcatggatgagatttgctgtctttgagctttattgtaaggtaagggaaactaaagattttagtttctttgagtttggttgccccactggggaaaaggggtttctgcagtcaaggattcagtaagtgtagtttgcagaacagtattcatactctcaactgggtctggaatcctccagtcaagagatcctctaatttaccttctccaggaatataagcctgggactacttttttttgttttttcctcttcacgtcagatgggtaatgtgtccatgtcattacaaggtttgaagaaggcacatctcacacatgagtgtgaaaactcaatcatgcttataaactacaaaaggatcagcctgggactgagttttagagagtttcaagaatttcagaagagtttcagagagctcttcgggaactaggttgttgaattctactttttgtcaaaggggtataaaaaatagaaaatagtctctttcttttaagttgctgatggaaagctgactaatgtggaattcttagaaagattatacccactgttgttggttgcctttatcaatctgtatctttaccttctctaaacttttagaaggctttgtcacttaagaaagatgaagtagtagcacaaccctccttttccaggttaaacctacttctccctgccccaaaagatcagaaaaaaacagacagtgatccattgcttcagaaaataagtttattttgacaattcacccaagcctactcttttttttttttttttttgagacggagttttgcccttgttgcccaggctggagtgcaacggtgcaatctcggctcactgcaacctctgcctcccgggttcaaacaattcacctgcctcagcctcccgagtagctgggactacaggcatgcgccactgtgtccagctaatttctgtatttttagtagagacagggtttcaccatgttggccaggctggtctcgaactactgacctcatgatccccctgccttggcctcccaaactgctgagattacaggcgtgagccactgtgccctgccaaaattaaataatttattatcaaacatttaaaattaaatttgaaggagaatattgtgatacagtatttggattgagagtgtaattgtgtaaaagtacatgggtatgtggaaaaggattagggccacagccccaaagtcaccattactaaatagaaaaaggtcaattttgaacagatgtacctctgcagagatgtagctcagctagcaggaaaacttctacatgtgaattagaaggatccccatccttcatgcttatgctgtctgtatactagacacatggcctagcaagtgaagcatgagctgaatttccaccctctctcatctcctgtggtgggtgttcttctgtgggatagaagctataacagtatcgtttactctgtgttaggtgcaatgctaagtgctttacaaacactactgaacaattgtgttttgttttgttttgtttttgagatggagtctcactctgtcgcctaggctggagtgcagtggcgcgatctcggctcactgcaagctccgcctcccgggttcatgccattctcctgcttcagccttccgagaagctggggctacaggcgcccgccaccacgcccggctaattttttcgtatttttagtagagacagggtttcaccatgttagccaggatggtcttgatctcctgacctcttgatccgcctgccttggtctcccaaagtgctgggattacaggcgtgagccactgcgcctggccactattgaaccatttagtaacaactcaattagataaataatatctttattttacagttcttctgcccagacatcttctgaacttcataattctatatctaactgcctatgtcatttatttttaatatagtgagccaccacgcctggccagtttttaaatttttttgtagagactgagttttgccatgttgctcagactggtctcgaactcttgggctcatccgcccaccttgacctctcaaagtgctggggttagaggcatgagttagtgagcctggaacaatccttttaagatttaagcctggccaacacagtgaaaccccatctctaccaaaaaaatacaaaaattagtcaggcgtggtggcacgtgcctgtagtcccagctactcaggaggctgaggtgggagaatcgcttgaacccaggaagcagaggttgcagtgagcagagatcgtgccactgcactccctctgggtgacaaagtgagaccctgtctccaaaagaaaaaatctaaggtagattgtgccttttgtgcctttcctctgctcaagacctttcagtggcttcccacttcactcagtaaaaggcaaaaagtccttttaataacctacaaggcattatgttacccacattgtccctgctcccctacattgtactcaagtctatgatctttttaccattccttgtacaaaggattttcactggctgttctttctgcctggaatgttgttctctcagttatctgcaagtcagactcactgatttccaggtctcagcagttacctcttcgttgagacctactgtgacctcactatgtaattgcagtctgcctccctttccccagcacttatcacccactatcatggaatttactgtgaatgcctccagcagaagataggcttctcttatgatcatggatccttgtgttttgttccctgaggtagcccaagcatcttgaacagtgcctggtacatagtaggcactcagtaatgtttattgcatgaataagtgacgaaaattggtatatgggaaaggtaagcaatttggtgaaaggccaggccatacagctaataaaaggtggaggtagattttgaactgatagttatttattgtgcctctaatattagaagatgatacccaaaaaaatgtgttaggattagtaaaattgtgagtaacttcccctttatcctccttcccaaatttagtttttgttttattgtaagtaaaaatataattaggccaggtgtagtggcttacgcctataatcctagcactttggggaggctgaggtgggagggtcacttgaggccaggagttcaacaccagcctgggcaagatagtgagacttcgtctctacagaaaataaaaaattagctggactcagtggtgtgcacctgtagtcccagctaatcaggaagctgaggcaggaggattgcttgaacgtggctcaaggctgcagtgagccatgatcatgccactgcactccaacctgggcaacagacccagaccggtcatgccttagaaaaataaacaaataaaagtataattagaaacagattatcagagtagaggaaagagccagataccaggaagccagagtaggctgccacaaggttgaaatctgtcacctcatcttaggaaccgcctctcccatgaatgcacggatcttaacatatgtgatggtgtgatgaaaccctggtgagatttgtgaatattctgaataccatgtaaccttggacatttttacttaacctttatggtccatagattcctcactctaaaatgataatttctcttatagggggttgttgggaggattaaaagggatattgtatgtaaagaactgatacataataagcattctgtattagctaatacattagctaatatcattattgttgctgctgcttagttggtacagagttttaagaaatttattttttggtggatatatcttgttgcctagtgagttttagcgagtaccaaaatagagagcaaacacttattgtttttgttcagatagccaaacaagctttgtcaagtgtttgtgttttttcatggacacttgcttgtggttctaattttatattacatcttaaacaatagccaactttttgtaattatttacataaattttaatatttaacatgtggattctacaactaccattgtttcgttggttttgcatttttggttgacttctatgggtcagttgatttaaaatgatccataggaattatgatacaactgtcatgatatttaaaaattagtgaactggctgggtgtggtagctcatgcctataatcccagctgaagacaagctggtgaatcacttgaggtcaggagtttgagaccagcctggccaacatggtaaaaccctatctctactaaatatacaaaaattagccagcatggtggctcacacctgcagtcctagctacctaggaggctgaagggggaggatcacttgaatgtgggaaacagaggttgcagtcagccaagattgcaccactgccctctagcctggccaacagagtgagaccatgtgccccgccaccccccccccccaaaaatagtctcaggttcatcatacttatatgaatagaagttactgccagtgtatccattaaagtatcttctactttaaagtagaaatttgaatgataaataaggtcacaaaataacttacagtgcctgagaaaagaatgatagtataatatactgagatttttttcttattaacacgataatgaaatacatgaaaactagtagagttgagttacatgaagtaggaaaaatgactttttaaaaacttttttttgtagagtaggtgtctaactgtgttgtccaggctggtattgaattcctgggatcaagtgatcttccagcttcagcctcccaagtagttggggctacaggtgcatgccaccacacccggctagtttttagattttgtagagatgaggtctcactattgccaaggctggtctcaaactcctgggcttaagtgatcttcctaccttggtctcccaaagtgcagggattagcccaggctggtctcaaactcctgggcctaagtgatcttcgtacctcggtctcccgaagtgcagggattacaggcatgaactaccgcacctggccaggctgtaagcccattttataacttgaatgtagaaatagttttacactctaacattttaatttttgagacggagtttcactcttgttgcccaggctgaatgaagtgcagtagctcactacaacctctgcctcccaggttcaagcgattatcctgcctcagcctcccgagtagctgggattacaggcacatgccatcacacccggctaatttttgtatttttagtagagacgggattttgccatgtgggccaggcgggtctcaacctcctgacctcaggttatccacctgcttcggcctcccatagtgctaggattacaggcgtgagccagtgtgcctggccacactctaactttctaaaagaaatattcacatagggaataaatgcagttgagagattatagaaagatacggctttgaagaatttacaccataacagtcatgaattgcttgattttaaagcaaatatatcctcaaagtccaggtggcagaatgatgcatgaagctaataaaaggcaatttttttttggtgaacctagggaacctaccaccctcagaaataatgtcgaccagaaaaaatagttgtagagaagtttatataaattcatgattgatagatatagagtaggtgactacagaaagctaagataactggcaattatgagtcatccctttttttctatcctaaaacgtcccctggtatctttcagagactgattttggggttaggcccatgtagtaattttttaacggaatagtagccaaagtagaggaaggcaaaacagagtagaatctaggccttttgatttttgaagcattctgtgatgattggtaggggtgaccaggggaagtcaggaatccagagagaagtagcttggaaccaggtaaacctaatttctgtactagactagaataatttgtattaagtaaattgtaggcttctgaaataatttgtatggtttagatatcatgataaattatgaatacactatgtcttctctggcatgtgaaaggtaaatgtttgcctatagaatacaagttcccagactgtcttaccaaataaatgtttaaagcctgggaactttcgtggtaataaaagtttttactactattttgtatatatgaagagttttttcttttcttttttttttttttttttgagacagagtctcgctgtcacccaggctggagtgcaatggcacagttttggctgactataacctctgcctcctgggttcaagcgattctcctgcctcagcctcctgagtagctgggactacaggcgtgcagcaccaaccctggctaatttttgcatttttagtagggatggggtttcaccatgttggtcaggctgatctcgaactcctgacctcaggtaattcacctgcctcagcctcccaaagtgctgggattacaggcgtgagccaccccgcctggcgaagttatctttaaaaaacaacaacaaaaaaaactttatcattgagcagaaatgtgattttacaattagtttccatataaactttttgttaccaaagtatcatcaaattacatacttaacaatattctttttttaaatgcctttttttttttagacaaggtctcggtctgtcgctttggctggagtgcagttgtgtgatcgtggcacactgcagcttcgacctcctttgctcaagtgatcctcccacctcagtctcccaagtagctgggtctacaggtgcatgccatgacactcagctaatttttgaaatttttttgtacagacggggtcttggtatgtttcccagagctggtgttaaactcctgggctcaagtagtcctcccatctcagccttccagagtcctgggatttgcaggtgagagccacggtgcccagcccatgaacaattaaaaaaaattttttttttaatgtttggtttactttttttttttttttttgagacagagttttgctcatgttgctcaagctggagtgcaatggcgctatcttggctcactgcaacctccacctcttgagtagctgggattgctgggattacaggcgcgcaccaccacgcttggctaattttttgtatttttagtagaaatagggtttcactatgttagccaggctggtctcaaactcctgacctcaggtgatctgcctgtctcagcctcccaaagtgctgggattacaggcgtgagccactgcgcccggcctacttttttttttaatgcttatctatttcctgcagtatggtttactttcgatattatactacgcatatagtacttggaagtattaaattgtattggtattggtgacaggtgacactgaccttattcttaaattatggaaaatgactcgtgtgtgtgtgaagtgatctcactgtgttgcccaggtggacttcagtggctcttcacaggtgcagtcatgcactacagcctcgaactcctggcctcaggaaatcctgagtagcctcttaagtagctgggggtaaatattctttcacttagaccttcagctaatgtactgggggcagtattctttcctgggaggtcttgtttttaaaccagtcctgccttaaattgttccaattttagttctgtggctttgagtctgaggtaattttcagtttattggtattagaaacattcctgtgtttgtgtagtgctgggtgtgaaatgtgaagttaaatctttaaacagttaatagatactattagattgctgtacttctgtggtttatactcttcactgtgagagtagaatacttcaaatgcttgtgctagatgttttgcctttttaattttacaaatctgtctgggcacagtagctcatggctgtaatcccagcactttgggaggctgaggtgggtggatcacctgaggttgggagttcaagaccagcctgggcaacatgattaaaccccatctccactaaaaacacaaaattagccagacatagtggcgcatgcctgtgatcccagctacttgggagactgagacaggagaatcacttgaacccagaaggtggaggctgcaatgagcagagattgcgccactgcactccagcctgggcaacagagtgagattccgcctcaaaaaaataaataaaaataaaataaattttacaaattgataaaaaatagtttttatatttgtgtttccctactttatatataaacatatatgtttgttggcctttgtattgcttttctgtgaatttaatttcctgttttttttgcaatggcattgttcatcttttactaatttttaggagctccttgtttttgtttttgtttttttttttttttttgagttggagtcttgctttgttgctcaggctggagtgcagtggcgcaatctcggctcactgcagcctccacctcctgggttcaagcaattctcctgacctcaggtgatccatccaccttggtctcccaaagtgctgggattacaggggtgatccactgtgcccggccaacatgtctctctttttaaatgattgatcttttccaacatgacaaatttctccattcataagagactgcatttgattttagaacttatctgtggaactttaaaagacctttcacatgcagaagctgattttcactttggcttatctagttttagtgtgtgtctaggatgtgtgtgtatgtgtgtctgtatatacattttttaacatggggcctttagtcagagaaattacagtattaaaagctagatctatgcttatatttgaaggtagtatcaacagggtttctgattatctccatttaagattgaagtatgttgctgctgtatgatttttttagaagatgctttttcctccttgttttcagatgtctgccctgatttttcagatgtttgcgttgataaaggaataccttagtagaattttctgtgattaacaggttagagttgtacctctcttccctgagacaacttgtagggcccttgaagcagcattgtctgcgtatttcagcatgttctgcaaatatgacctatcgtttgtatgagtatgtgccatgaaaatggttaggaaggccgggtgcagtggctcacacctgtaatcccaacacttgggaggctgaggcgggtggatcacctgaggtcaggagttcaataccagcctggcaaacatggagaaaccctgtctctactaaaaatacaaaaattagccaggtgtggtggtacatgcctgtaatcccagctacttggaaggctgcagcgggagaatttcttgaacctgggaggcagaggttgcagtgagccaagatcgcgccactgcattccagcctgggcaacagagcaagactgtctcaaaaaaaaaaaaagaaaaaagaaaagggttaggaaacattaacttagcctgcctcttttttttttttttttttttttgagacagagtctcgctctgtcgcccaggctggttggagtgcagtggcatgatctcggctcactgcaagctccgcctcccaggttcatgccattctcctgcctcagcctcctgagtagctgggactacaggtgcccaccaccacgcccggctaattttttgtatttttagtagaggggtttcaccctgttagccaggatggtctccatctcctgacctcgtgatccatctgcctcggcctccctaagtgctgggattacaggcgtgagcccccgcacccaacccttagcctgcctcttaagctgtaagtggtcttgatatggagatagaaaataaaatactatgaatgacaaataatctaaaacttgaattaaataaagtaggtgtatttttattttgtcactttttattaaaagttattgcagtatattctctactgagtaccagcactatattttgagtgcctgcaagacttagaattcattgtaaaattactgttcttggactgaggttacattttagtcttatcagtggattcttcaccaatcgattggaatcagtcaattccaatacagtcttcccccacagttgaatatagaataaaatctattgcaagctgggtgcaggggcacaagtgtggcaggagtgcttgagcctaggagttcaagaccagcctgggcaacatagtgagacctcatctcaattgaaaatatatatctatataaaaaataaaatttattacagttcatcttgctggaaaacaaaatactgtttttgtaattaaaattttttttttaaatttagaaatggggtcttgctgtgttgaccaggctggtcttgaactcttggcctcaagctgtcctcccatctgggcctcccaaagtgctgggattacaggtgtgaacaactgcgcccggctgacaaagtattttttaaagatgtaccactaaatggagatttgattcacatttgatagtttttgacaggtcttttctatttaaaaacattactgtttttgtagcattattctggcttttcccttaatttagtaaatatttgagtgcctttgtattccagatactgagcaagattggcagggttctgcccttatggagcagaaggaaggtagggggactgactaaaacttgaaaactgtctaacataagtaccatgcagaaaatgaaacagtattaattggcagaaggagagcaggctattttggctagtgtggttagggaaagcctctctaaagagatgtctcttgggtggagacaagatgtgaaaaaaccagcttgcctgtttttggggtttcagccttgcaggtgaagagaaacacgaagttcagaagtcttgaggcacaaagtctggcatgttacgaaagaaggcctttagacgccttgtcagggagtttagattttattctgagttttaaaacgggagtgacacaatgagttgcattttaagcctgttcaggctgttacatggattattaggagctgtatcatttcaggctagtgagatgctcagatgagtctgccttctgtctcttccgtcatctatttctctcttatctggtcttaagctcctccatcttttcctttttagttggaaaaaaactcaaagatctagaaaaaagaggagctgtatgtactcctaaaaagggacctcatagtaacctggggatagagttatgtaggagtgagtcagggctcaggttgaggctttagaggcaggaggcagcgagatcttgttctgtcatcccctcttacagaaataaaatatgccgataaaagtttatagtgtaatagtaaaatataaaaacaaaaagtaagtaatgtagaaaataaaaacccttcacagtcctgctgaaatgattactgttaacactttaattctagagttccccatccatttatttatttctagatttccctctttgtagattaatattaaagggttcagacttgttcattttttgttgtcttggatatcttttcccacctctgtatatatggatctactttatttatcacgtggatattaacatggtttatttaattccctattgttaggtatttggtctttaccacagtttttcaagggtatgaatagtgctgcaaggaatatgcttacacatgtttttatacacttgtcttaggcttctgtaggacaaatttctggagtagaatactaggtcattctttaagaacatttcaaacttttaatagatattaccgtattctttcccaaaaagaatgtacaaagactgtatgagaataactccatgttgtgatcttaagttgtctctaaacctctttggttttcttagctgtcatctaagaatactaagtatctaacctccctcttgatttgggcatgtgatgtgatttagcatatagtggatattcagttagaaacttttggttgaaaacaaggtttggattctgtggtctttaattctaggccatttcagctctgactaaaatgatttgagtgttagtgttatatatgggaaggtaagggctatggagtcagtgcagcccagttcagaatcccagtttgccacttacaagctgtgtgtgtgagaattttctcaactgtaaaatggggacataattcctacctagagtaatactgtaagtattaaggtggataatgattggaatgtatgctgtgtatcctgcctcataatagtaagcttttagtaaatggtagctactgttaataataaaacaagtttctgaaggaggaaggcttgaaaagatgggattccttatcaacctcaaagttttctaaaggaggaaaccctaccccccttacttctgcatggtttctgaccatgaactgaactctgaactctgaatgaactgaactctgaactctgaatgttatggtagaaaattcatggactttaaatttaaacagataaagaatctggttattttacccactgctggggtgttcttgggcaagtagcatgacttctgtgtccaaaaaagaaagggtttgcagtgactgaacctgtaatcccagtactttgggaggctaaggagagtggattgcctgagctcaggagttcaagaccagcctgggcaacatagtgagagcctttctcaacaaaaaaaactgttcttaaaaattagctgggcatggtgatgtacgtctgtggtcccagctacgtgggaagctgaggtaggagaatcatttgagcctggaaaattgaagctgcagtgagctgtgatcatgtcactgcaccccagcctgggcaacagagcaagaccctgtctcagaaaataaattaattaaaaagaaagtgtggatggaggaagggattaaaaatctggctgggcacggtggctcatgcctgtaatcccaggcgtgatttgggaggccgaggcggacagatcacgaggtcaagagattgagaccatcctggccaacatggccaaccccatctctactaaaaatacaaaaatcagtcgggcgtggtggtgcatgcctgtaatcccggctactcgggaggctgaggcaggagaatcgcttgaacctgggaggttcagtgagccaagatcgcgccactacactccagcctggcaatagagtgagactctgtctcaaaagaaaagaaaagaaaagaaaatctttggggttcttacacaaattaaatgagataatttattattattattttttttgagatggagtcttgctctgtcccccaggctggagtgcagtggtgcgatctcagctcaccgcaagctctgcctcccgggttcacgccattcccctgcctcagcctcctgagtagctgggactacaggcgcccgccaccatgcctggctaattttttgtatttttagtagagacagggtatccctgtgttagctaggatggtctcgatctcctgaccttgtgatccgcccatctcggcctcccaaagtgctgggattacaggtatgagccaccatgcccggcttgagataatttataaagtgcctaaaatacatcctagaaatattagtttttcttccttgaagtcataaattatggcttacactttttttcaggtatttctcatagtactaatgtgttgctcacactcaagggtagtagttgcttaggaagaagagaaatgtagttgaaaaagtaatagactagaagtcttgagacctgggctcatgttccaagttggcttttttttttttttttgggagatggagtctcgctcttgtcccccagcctggagtgcaatgacacgatatcgactcactgcaacctccacctcctgggttcaagtgatttctcctgcctcagcctccctagtagctgggatgacagacacccaccaccatgcctggctaatttttgtattttaagtagtgacagcattttaccatgttagccaggctggtcttgaactcctggcctcaagtgatgcgctggcctcggcctcccaaagtgctgggattacaggcatgagccactgtgcctggtcccttgctaaatgttttgttttgttttgttttgtttttgaggtggagtcttgctctgtcacccaggctggagtgcggtggcatgatctccgctcactgcaagctccgcctcccgggttcccgccattctcctgcctcagcctcccgagtagctgggactacaggcgcccgccaccacgcccggctaattttttgtatttttagtagagatggggtttcaccgtgttagccaggatggtctccatctcctgacctcgtgatgcacccacctcggcctcccaaagtgctgggattacaggcgtgagccaccgtgccccgcagttgcttgctaaatcttttaactgctggtcccattttcctcatctatgaaatatttaatggaagtgtactattaaagaaacttttctttgctgatgaatgcaggaggtatcattaaaaacccacatagtgctattttcataattactctttatgtattgtgttcttgggttaaatacttttgttctagagttacaattatttgtgtttcttaccaggtttaagaattgtttaagctgcatcaatggagcacatacagggagcttggaagacgatcagcaatggttttggattcaaagatgccgtgtttgatggctccagctgcatctctcctacaatagttcagcagtttggctatcagcgccgggcatcagatgatggcaaactcacagatccttctaagacaagcaacactatccgtgttttcttgccgaacaagcaaagaacagtggtatgtgaacattctacttaggaaatttagctatttatctgcctgtggagcacattaaggatcatgttcaacttaaagacaggcaaaatattcattgtcatttagggtctttatttttttttttctaactgcagatttatttttttatattgctgttccttccacaccccctattttttcctacctcttggccttccttctgttactcttgcctggaatgtcttcctttgtgccacttcatccaaacaaatagtacattcttatgggtatatttcaaagacttttctttgagaagtctctaggcctttccaactacttattttagaagacattttatttcttctattaaaatattcacctaaagctttttgactattacaatcaagtataaagaagaaagtaaagttacatagaaaagattatttttgtatatttcataggcccaggaccagtctggaggcagcttagaaatcatagaatcttctttttcagggcactgacaccagccacttagttctgcgtagtttattttttcagtgccagtgacaggttcatattggcatcatggcaggacactgccactaggttttctgatagaaaatttctttttctttttcttttcttttttttttttttgagacggattctcactctgtcacccaggctggagtgcagctcactgcaacctctgcctcctgggttgaagtgattctcctgcctcagcctcccaaatagctgggactacaggcacacaccgccacgcctggctgatttttgttttttgtatttttagtagagacggggtttcaccatgttaaccaggctggtctcaaactcctgacctcaggtaatccacctgcctcggcctcccaaactgctgggattaccaacatgagacaccacgcccagcctgataacaaaacttcaatttttctaagaatttagctctcaaaaagttttctggctgggtgtggtgatttatacctgtaatcccagcactttgggagaccgaggtgggcagattgcttgagctcaggagttcgagaccagtcgggcaacgtggcaaaccccatctctacaaaaaaaaattcaaaaaagtaggcctggtgcagtggcttacgcctgtaatcctagcactttgggaggctgaggccagctcattacttgaggtcaggagttcgagacaagcctggccaacatggtgaaaccccatctctactaaaattgcaaaaattacagccaggcatggtgttgcacgtttgtaatcccagctacttgggaggctgaggcaggagaatcactcgaacccgggaggcagaggttgcagtgggccaggattgcgccactgcactccagcctgggcgaaagggtgagactatattaaaaaaagaaataacaacaaaaatgtagccgggcgtggtggcacacgtctgtagtcccagctactcggtactcgggaggctgaggtgggaggatggcttgagcccaggaggtaaaggttgcagtgagctgagattgcaccacttcaccccagcctgggtgacagagagccagaccccttctcaaagaaaagaaaaacaaaaaaagttttctactattatggataaaacaaacaaaaccaaccacctggccaaaacagaaaagtgaaattgcattggttttgcttggtggaacttttgagaaaacttgggttcaaaacttccatgcctcttcctttcccatcctctgttctttgtgtaaaatcaatgcattgtgtttattccatatagtcaggtgaagcaaggttctgaggtggggaaccccagtccagagttttctgtttgcttctaacagttccactcttcccaatttgttaataaattgtttatactttttttgtgaacctaaggagcctcccaagtgtagtgttgaatacttaggtgcattttgaactgaaggcaaaactcaaaagtctaactttaattaaagtttgagtaagtttatctttgtctctcttcctaaaaatgaaaattttatggctggcaaaataagcagtaataatcccctatatctgaacaatggtcttccatttgcaaagtaattttgcctactgtttctcattaattttctttgtgaccttaaattgagaagtcagataggaagtgtgtgttatgagaagctgaagaccatttggtgcttcttcaaagtgttattgagactatcttctccatccccatctgctaccagtttgcccagaaggctgggaaacttaatttggcatagtgattaagtgtatgaacctttaaaacaagaaaaccccaatttaaatcctcattgccttttattagctgtatcatttagacaagttctgtacttttttgatcctctttcctgacctttatgaaatgaggcttgtacttagcacagtggctgattcataagtgaagtggtagctattattattattattatatgtattttttttagatggaggctctcactgtcacccaggctggagtgcagtggcccaatctcggctcactgcaacctctacctcccaggttcaagcgattctccttgcctcagcctcccaagtagctgggattgcaggcacccgccaccacgcctggctaatttgtttgtatttttagtagagacagggtttaccatgttggcaaggctggtctcaaactcctgaccttctgatccgcctgcctcgtcttcccaaagtgctgggattacagacatgagccactgcacccggctgctatgattatttcttagctttttatacatctatgtagtccttgatcccctccatttgagcacagctggtggttggaagccaagcttgacttctcctacagcttatgagaaggttgtagcctaggttagttttgcctgtttctttgggtaaagatgaactaactgtggaagaactagctgctttcaccaggcacgcagcttcaggaaagcggtagaagagggaagagttgcttagctaggccagcaccatcagtcagctctttttactcctccccaggttgctttacttcctgaacccagaatgactctcataatcactcagtgggttctagaaattatttaactgatttcagcatgtatccatggagggctgtaaagaggagaatgagacagaggacgcgtatctgatttaaataattttagatgtgataattaggtttttgaatgtttcttggaatttttattttctaaatgtgtgcctctttgacttcctcctgctgctgttgctgctattgctgctgctgctactgcttctaattattattagataagtgattgactggagccgaggaccactactattagagtcagctgaccagcaggttaaaatacagattcattctgtatgaatgggctttattccatactaactgaatcagaatccttggatgtgttggacaggtagatggaatctatattttctcaagcttctctgaggattctaatgccagctacatttgggaatctgactggattagatgatatttaaagaactgtccagcttgcagtatgatttagtgaagactgataatgtaacagatatcactttatagcttagaaaacattgctatacagtatttgatgcaggtcatgattccgttaggtatgtttattactctttgttttcctcattcttagtgtcttagtagttcacatcagtatagcttacttgttttgtttctgaaaagctggaagttggtgggtatcactgcgtcaagaaacttttaaaataaacttattttggaacattaaaaaatatatacaggctgggtgcagaggctcttcctgtaatcccagcactttgggaggctgaggtggaaggattgcttgagcccaggagtttgagaccagcctgggcaatatagtgagatcttgtctctacaaaaaaaaaaaacattagctagaagtggtgctgcccacctgtggtcccagccgaggctgaggcagggggatcacttaaactggggtggtaaagggtacatgtgtcatgatcatgccattgtattccagcctagatgacagagcaagattctgtctcagtatatataatatagattttacacacacacacacacgcacgcacgtagagaaaataacaaatctgatgtaccccttacccactttcaacacttagctaaccatggcaggcctgcttaatctgttttcatccactcctttcccagtgttttgacacaaatcccaggtatcatttgtctgaactattttggtatgtacaagaaacttttaaagaatgctaattttatttatttttaaataggtaaagcattcatatgagccaaaagtcttgggtgacccctgcccctgtatccccatttcttttcctcagaggtttcttatgatcaatctttatctattcgaagaatcagttggtttccccttaccctgttgttcacgacctttcctttcttccacatctctgaaggagaggaaaaaccatcggtagctaaggaggctatcacaaactccaaaggaacttttttcgtttggagaatcttttccttctcccagatgattgatcctcctggagaatattccttccccactcccatcaccttctcgactaatctgttacaagttcaaattcttctatactgtactctcaatgtggagtccatctttgggcttcaaagaatgattactgggcagataagtccccttcagtccctggtgatagcaaaataaagccttgtgaaaaacttcttacgttgcccctctctgatgttttcaaattccttatgcttacatgcattcccttctttcctagattgttttctctgctttgcatccacatactatgccctagtttggagcctggtaactagaagggcccagataactatgtcctctttcttaagacttttttctgttgtaaaccagctagagaaggttggctggattggcattgaggtggctggagtaagagccaagattaagaacactttgggccttttgcagccctgctttacttccttccccctccccgtgtacccacataggtagatatatgcatacactcaccaccttctgggggcggggtgtggggggggatggcggggtgggggagcggttggctggctgctgtcagctgttagcactttcaatcagaggaggaacctggtaggcagttcacaagcactgcaaatctctgttttgccctccttgctggccatactgactctagttaccttacttttgattaattcttggctttgaagttaaacatggagggcttttatcaaaactctgaaattttcattcaaatttttttacagctgccattaattgtgagtatcctgggcactcacacttcccaatagggttctgagtacctgcctagctttttgaggattgagtacaggggaatatagagaagtatgtgccactaaggctgcttggtatggtgtgcacatatatttaaactaagattggtgtttgtccctacagcagggctggagttctatatcttccacttcctgctttgccttcactagtgttaagtacttgtgagatggaatttttgttagaatcatcagtcatttttgttgaaagaggttgaagtacaaattttgatcataaaaactcgtttgtttatagatcagattggcttatttcctctctaatgaatctagtgaacatatatgtgtatacattctaatcacacaaaattagagacgtataaaggaaaagtttatcattttatctttcttaaccactttctaaccactttcttaactgtctcttgatgtgaacagctaggtgtaaatctttccacttgtataacatatacagatttcttcactttttttttttttttttttgagacggagtctcgttcttgtcacccaggctggagtgcaatggtgcgatctcagctcactgcaacctctccctcctgggttccagcaattctcctacctcagcctcccaagtagctgagattacaggcgtccaccaccatgcccggctaatttttgtatttttagtagagacggggtttcaccatgttggccaggctggtctcgtactcctgacctcaggtgatccacccgcctcggcttcccaaagtgctgagattacaggcgtgagccaccgtgcctggcctcttcacctttaaaataatcttactctattattctgaaggatattttcccccaattaatatatcatggactcctctccatccaggtcattataagtaatataatagctgcataatgtgacataatacagatgtctcacactccattcaagtactttcctattgctggacattcaggttgtttcgtatatgtgtgtgtgcgtgggccatcacaagcaatacagactggtgcatttatttctgtgcccacctttccaaggggtgctgcagcctgtgttggtcctaaaggtggtcctttgtttgtaggtcaatgtgcgaaatggaatgagcttgcatgactgccttatgaaagcactcaaggtgaggggcctgcaaccagagtgctgtgcagtgttcagacttctccacgaacacaaagggtaagagctcaaaagtcaattgacttcttcagactagtaaggatcttctagcttcaaatagctatgtttgtattaaattgtactagcttcctatagaatattgtatatttctatacctttctttataaagagataattcagaaaaataggtattaagaaattgaaattattgcttggacattctcttgaaaagttaaatacacgttaagctgggcctgatgaccaatacctgtaatttttttttctttttgaggtggagtcttgctctgtcgcccaggctggagtgcagtggcgcgatctcggctcaccgcaagctccgcctcccgggttcacgccattttcctgcctcagcctccggagtagctgggactacaggcgcccaccaccgcgcccggctaattttttgtatttttagtagagacggggtttcaccgtgttagccaggatggtaatacccgtaattttaacactgggaaactgaggcaagagggttgcttgaggccaagagttcaagaccagcctgggcacatagcgaaggcccatctctacaaaagatttttaaaaattagccaggcatggtggtgcggccctgtagtcctagctgttcgaaaggctgacgtgagaatattgcatgaccccaggggcttgaggctgcagtgagtcatgattgtgccactggactccagcctgggctggagcaagatcctgtctattaaaaaaagccaaaaaacaaaaaaacaaaaacaaacacatgttaggtattgataatgtttccatggatggaaacagtgatgttagatgctgtgtttttttgagacaaagatttttctttgtgtttactctaatgcattatatagactgggcactcagaaagtgcattattttatataaagaatgctatcctcgggagattgacttttctcattcactaatttttttttttattcagttaaatgtgtactaatccctgctgtttgatagattgtttaaagatgcagaagcatttctgcttcagggaagattcatggtttatcctattcctaatggtggtggcaagatagaggcatcccctcaaaggctaggagtaatacctcaaagcagcagagctgtccataattatccattatccattattccctccaccccgaaaatatagggaaacctttaaagggttcttttttaccctcttcttggaaagcgtcacttatgttattcatcgttagcttacattttttcatgtttcaaagagttctgcagtttgggagaatagcccagggaatgaatctactcgaaggggtgagtgtaattctcaatttaggaggcgtttgttgaagtgcaaatctttgaagcagacgttaacttttgctgaaggtagcccaggttgggtccctaagccaatccatagtgttccttaaggactagagagattctgagacagggagggcttggtctactctcatccaaggctgcactggtttggagctactctggagtctctaggacagacagcagattgtcactaggatcagtctgcagattgatgagaaaataaggcttgtcctccttctcttcataagggcaaaatagtcctttggagttataggaagttttccaggtgctgtataggtaattatattaaggaatgtattgtttactgttggatagtgagaaaaatggcttgactaggcttctggtagataatggagaggcttgaatggtgctatacatgttattttctctttacctgagaatattcttcctttggaaaatgggccagattaactggataaaacataagaaaggaattgggcattactttttacttatgtatctattttttgtcttatttatactgtaggcacagaaagtgtggtttcagagtagattttaagacagttaagtttctcattgacttatagaccctagaactacagatttgagtctgttattaattaatagaaaagtacatttttcatttgtggttcctttctatttatctagattgaaataggctactgaagactaaattttgtactgcagcaatatttataatccattttacaggatttggggatttttgtaagattttagtgttacaaattccaatttaacgtatattgactttattgtgagattttatatatcattgtttaaagaaaactttattctggccagacatggtggttcacacctgtaatcccagcactttgggaggctgaggcaggaggaccgcttgaggccagggattcaagaccagcctgggcaacacagcaagactctctctctaccaaaaaacatttttttaagtaaataaagagaaaactttattctgagaacatgggctttggagttcaacagacctagattccaacataggcccttaaacttgctgtgtggccttgagcaaattaccttcttagagtcccagttttcttatttttcagatagaaataatacctacttcataggtttgttgtatgaattaaataaattattgttgtatggattaaataaagttgtgtttatatggcatgtgataaatggtagctgttgttatttctattgaactttgatcttgtttaaacatttcatgttttttttaaatcctttctagtaaaaaagcacgcttagattggaatactgatgctgcgtctttgattggagaagaacttcaagtagatttcctggatcatgttcccctcacaacacacaactttgtaagttgcagatctcttctctttctggcatgttgagggctttgccaggcataacagagatttctcaggtaatatgcgtatgtatatatatatatagttggattgtttaaagttctttatgctgttgtttacagtaaggcaatttagatttcattagtcagagatatactctaatttgtgattatgaattctgtacatgctggaagtatgattcattttgtaaaaacttttttggaggccaagaaatgatgttgtcttttgtcatcttttatttattcagcataatttacacctgtgttcttgttgtaggctcggaagacgttcctgaagcttgccttctgtgacatctgtcagaaattcctgctcaatggatttcgatgtcagacttgtggctacaaatttcatgagcactgtagcaccaaagtacctactatgtgtgtggactggagtaacatcagacaactcttgtaaggcattgttcttttatccaaggaagatagggatgaggagtatacatactttaaagggtatttgttgtagattttgactgacaggtctggattctagactcatttaatgaattgtgatccagaaactactttagaaacagtgataattctgaaactagctaggtttggtggcattcatactccagaatgagcaggtaggagtaggacttgttatctgtcaaattgagattgacatactgtgactgtgattcagtaaggaaaggagcaaaaggatatgaaaacaagaagattttttgcttttcgctcttaatagtattatctactggggttgctagtagacactgctctgtattttgttgaatatgctgaatgagcctttgacattgagaaggagcagaaagcacggttgatgctattttcttcacttcaaactggagaaaacttagttgtttggacttaaaattgtttgaatataaaatcttgaaagattcttgtttctttcaggagacaatatatttcatatagataaaatgttattaaagaatttaaagtttacattaaaagtacatggtccaaactgcttttaaaaactgtaactaggtatatgaaaagtttaaaagttttgtccttttttgacagtactagagaaaccaagggagtgttattattagaccatgatgaaaacgtttttgctttcatggtcacttacgtattgattttgtgatgagagcttgagtagcacaaatggcacaagcttttaaaatttatcttatttttgtcccccaccctttttttttttttttttttttttttttggagacaagtctctttctgtcattaggctggagtacagtggcatgatctcggctcactgcaacctctgcctcccaggttcaagtgattctcctgcctcagcctcccgagtagctcagactacaggcacacaccaccacgcccagctaatttttgtagttttagtagagatgaggtttcaccatcttggccaggatggtctcgatctcttgacctcatgatctgcccacctcggcctcccaaagtgctgggattacaggcatgagccaccacgcccagcctttttttttattattattttttaaagacagggtctcgctctgtctcccacagtggagtgcagtggcatgatcacagctcactgtagcctcgacctctcgggttcaagtaatcctcctacctcagcctcctgagtagctgggactacaagtgtatgccatcatgcctagctaatttttgtattttttctagagacggggtttcagcatgttgcccaggctggtctcgaactcctgagctcaagcaatctgtccgccttggccttccaaagtgttgtggttacaggtgtgagccaccgcatccggcggcacaagcttttgagtctaacagacatatgtcaaaatctcagtgttgtcattaaccataaccacatctgagttttcgttcatgcatctgaataaaggggatattaccttccttgcattgttcttatgaggcttgctgacataacctgtgaaattactaagcacaagtgcccacctcatggaaaaaaggtgcctaattactcacttttctgtgatttattccttctattttagtcttttatctatgcattttcaagatggaatgtttccagagaagctgtgtgtgacatagtttgtgaaatgttatactgtagtttgaaaaatattattttgatatagctagacacaggaccagtatttcctagaaatgcacactgggccgggcgcggtggctcacgcctgtaatcccagcactttgggaggccaaggcaggtgaatcacctgaggtcaggagttcgagaccagcctggccaacatagtgaaaccccgtctctgctaaaaatacaaaaattgggggaagggatagcattaggagagacacctaatgttaaatgacaagttactgggtgcagcacaccaacatggcacatgtatacctatgtaacaaacctgcatgttgtgcacatgtaccctaaaacttaaagtataattaaaaaaaaaatacgaaaattagctgggcatggtggtgtgtgcctgtaatcccagctactcgggaggctgaggcaggagaacccgggaggtggaggttgcagtgagccgccattacacctctgcactccagcctgggcaacagagtgagactccatcttaaaaaaaaagaaaaagaaaaagcacacaggagcctgtatgtttattggcaggtcagtattattcacattcaataatcattcaaatccagttatttggaatattgttccctttattctaggtaatgtaaaacagttgaggaaaatgtgactgggaaaagttcagttttagtagctctgagtttgcaaaagcaaggcatgctgattgtctctgtaagattactgcaagcctaaaaaccagtctttccctgcttttgtttagattgtttccaaattccactattggtgatagtggagtcccagcactaccttctttgactatgcgtcgtatgcgagagtctgtttccaggatgcctgttaggtaattttttacctatagcttttcttttagaaagttatttggggtggtggggttggaagcttgaagacaaaaaataagagtttcttcgcattccctcctctctacgtggaaaccccttgctgcttctgtggaacttgatactggtggtacagcaaaaggtagaaatttctgtttatggacctgtaggtcttacattctggaaagtgactttgactgtagcttcttctgttatcatagcatatttcttaatatgtcattacattttaaagagcttgagattctgctttcctcagtatgtactgagttcaacctcaatggaaagggtcctaaaacttaatacagtgatttgataaaaataaaacccttaactttgaaatgcatgttgtggccgatgcatttgctaaaaccatgtatttaaatagactagtgtctttaaaaacatttaattagattttcagcataaatattgtttctcatgtgtctctgagtttgcatataacttgtctttctttactctgttttccagctttataatcagttttgttgcgtttatctactgctcagtgttaacacacatgaatttgaaacctaaagtaaaatctacatccaaaatatcttactttaggccaggcacggtagctcacacctgtaatcccagcactttgggaggccgaggcagatggaccacttgaggtcaggagttccagactagcctggccaacatggtgaaaccccatctctactaaaaatacaaaaaactgggtgggtgtggtgatatgtgccttttggcccaggtacttgggaggctgaagcaggagaatcttgaacgtggtaggcagtgagctgagatggcaccactgcactccagccttggtgacagagcaagactctgtctccaaaaaaaaatatattatgtatacacacacacacacacacacacacacacacacataatgtgtaatcagataatgtttaatgtgaaaatactatggaaatattaaacgcagcatatcttagaataaggaatttgcatatatctggatatatatttctgtatggcttttatttttcttgataatttgaaaagcaaatctgaccaagaatttgtagttacctctgaagattagaagaaaccaggcctctgaagccataaaacagaggattatgtgggaaggcatttttttcaagacaatagaacaatttcccttagaaaagctggcctttttccctttaattcatacatgggtgttacctgaatctgaacaaacctcgaacgaatctttagagcaaataatgaaaatgttatacctcttaatgcatgttcccagtttggttggtgggggttggtggtgactggaagaggccagtggttaatttcacatttaggtatttccatctaaaaactgaattcccatttatttactttgtttgctggttgtagcaggtaaggacaaacagagggtaaaatcctggcctttttacagacatgctcagcacgtctacttatctgtttaaataaattctcaaatttagtctctaaactgggcgtgttccaactagcttaataggtggtagcgtggttgtcaaatgttaatctgttctttcctggagatgttgtaaaaatttggagtagagtggtgctttatttaaaaaaagaaaacttataatgcactctccttttcattgaattcccaatacatatattatttcctgttccaaattttgtatgcaaaagcacctagacttaagataatttttagatgtcacacatttgaaagaatcaaacattttgtcaaaggttgtacaggtagagtttgcccttaagcatcttacttagtcaaatatgtacttgaaagacttcaccagtatgaaagcctaagtgccaatcatggaattttctttctcctcctagttctcagcacagatattctacacctcacgccttcacctttaacacctccagtccctcatctgaaggttccctctcccagaggcagaggtcgacatccacacctaatgtccacatggtcagcaccaccctgcctgtggacagcaggatgattgaggtaatagggcaccttgggggtggtaatgtcagtcaattaatggggtgaggttgatacttatttcagagttttgggtttcaaatctgatcaaggaatgttgcaacactttctcaggtctctggacttttacagtttattttatatccataatatcttcagactggctgaatagtctggttagtatatcattcaactggagaactaaaacttcctgaaaaaatgttaacatttgaactcttcccattatcagatttgaataggctattaatgaacaagtgtctaagatatttaaagagcagtttagttttggtgtgggacagaaattaacagtgatggagaactacagattctctggaagacttttgtgattttatttagaaataaaagggtggagtcctaggactttaataagcaggtgtttggggagatgtcaaagtgcccaaagctagtgtttttgaactgctttttcttctcttggctttttggttatgtcctattggtttaatttgctttctgcttcatctttaataacaactgaatacacttaaatacttcctttgttctttattcttctttatttctcattgctttggactagaataacaacctgagtgcttctcccagggcgtggtccagacgattttgtttgaggggaagagtaggtatttttcttcatgcctttgctttcttgtaattaacaggattgctaaaactgtcagacagcagactaccaaaaatgaaatagttgctaagttaaatttatatttcttgtcacttgtttccatgttttctttttctttctttctttttaaaattttttttggcagtagagtatatagaagtaaaaaaaatgttgtatgtggtattgatgataggtgaaatgaatttctgaagttaggccaggcatgacggtgtatgtctgttgtcccagctactccagaggctaaggcaggaggatcactggagcccagaagttctaggctgtagggagctacaattgtgcctgtgaatagccattgcactccaactggggcaacataataagaatccaccttaaaaacaaacaaaaaatgttaagttagattttgaggccaagggcattaaaaagttttttttttaaatcaattccaaccaaaggctaatgttagacttacttagttggtgctcacagcattggtattctgtttatacattagtaaccaaatgtgtttttggttgataaaccctagaataaatattctttattgaaagcttatcagagacaactatgctctctctcatcatgtagacacctgctgccttaggcacagtttatctcattcagacctcaaatcactttcaacataattgtcctgccactattgtgaggagatcatgtataagctataaattttattattttgactttatcattatgattagtcctgataatacaataatataccagttactgctacttctattaaatggtttgttcctgtatgaacactgtaatacttacagggaacagtaaaggtcagaattggctgggtgggaagatcacttgcgaccaggagttcaagacctacctgggctatatgtagcaaaaccccacctctacaaaaaaaaatgtaaaaattagctgggcttggtggtgtgcacctgcagtcctagttactcaggaggcttgggcaggaggattacttgagcccaggagtttgaggttgtagtgagctgtgtatgattgtgtcaagtaagaatttttgagtttttattataaaagaattagcacaattgttgtgcctaatcattttttactttagaagcagggtaaattttgattcctgttaatttaatcacatataagtcagcatttttaaagtagactaattgttgctttattcaaattatttgtgggtctcaaattattcatagttctcttgagtatttagactccaggaacaataggaaaattctttctagaataaattgatccaactatagaaattagcacagaataaaatatgggatatttaattgatacagggaagaaaattaccataacattaaggaaaatattctgctacataggaatataattgtggttaataaaaataaattgtgctttgctttaaaaacaaagaacagcttagttggataatgaaattacagctgccgatttctattgaaatccacattattttttgccagtgttttgcccacctggcagttatcctgctgtacttaaaaacacacattcctggacttctcacattcccctccaaaacatgctcagtcaatcgtgggtcggggattaggggtggatcttcattcttctttccagagtcagaatcactctccaggtaattctgaagactagctagttttgggaaccagaactaggctttcttgttaaattccgaattatgttttgggagcaggggaacagcttggtttgattctttttatctaattatataattagatatataattttatctttttatataattgagtgggagcattctagtaatagttgtgtggaacaagtatcttgtctatactgtagttacacaaagagaatatagtaggacttccccccaaaaaatgtccttttttaggatatgggggccaagtggttttatattattctattatactgttctattccaagcgatgaattttagattggggtttaggtctcatagagccctctgcaatttaaactattttccaaacagtttctaataaattctaaagatagcctttgctttctcccatgaggagaatgtaaccgatttccaaatttacccataaggcagtgttttgtggtgaaagagctgagggctgagatccatatatgatggtttctggttctatttctgccacctactggttctgccaagtgaccctgccaagtctctctacctgttcagatgtgttttcttatatgtaaaatgtaggttttgaacttggatttgtggtctttccagctttctgtgattttaggcttggataaagtatataggctgcttacctttttcaaatccaacttctagtcaatttagcctaactccttgtggagtaagagtgagcttcccccagaatccacctccccaccctggctttttaaaaaaagttttgagcctcagtggaacaagaatcccaatctttggaagggtctcagctgagagtaactttgctagcttcccttgaaagagtatgtttgttgtgtacattgctttcttttgagaaaaagaatgtggttttcattatatatgaaaaactaataccaggcttggcacggtggctcacgcctgtaatcccagcactttgggaggccgaggcgagaggatcacctcaggtcaggagttcaagacgagcctggccaacatggcgaagccctgtctctactaaaaatgcaaaaattagccgggcgtgctggtgcacacctgtaatcccagctactcgggagactgaggcaggagaattgcttgaacctgggaggtggaatattaaatccttctaatatttaatgaaaaatcagccttggagatactggccactgatatttgctgaatttaatcaaggaacgttgattagagtatgtttaggatttctatggtttttagaggtttttataatctattttgttcttgcacatcctcctcctcttttttccctcccccagagaaaatcttttgtgtgtaggagttgaccagctttccttttctgtttcaggatgcaattcgaagtcacagcgaatcaggtacttttccatagtcatttagccaacaataatgggctttttttctttatgcggtgtatcttctgttggcttatccttgtgtggcttctgtttgtcttgtctattaagcctcaccttcagccctgtccagtagccccaacaatctgagcccaacaggctggtcacagccgaaaacccccgtgccagcacaaagagagcgggcaccagtatctgggacccaggagaaaaacaaaattgtgagtatagacaacagtacctcctgccaattagggttcagtaagaaaaacctcgttggaaattagaatacttaaacttattttgggagaagattctaataaaatacattcaatgaaggagattataaatgtcactgtcatttttggcacacttgcatcagacagtttgccagtgctataactaaaatggtatttctcaaaagacaaaaattggaagtatggttaatatgtttatctttaaaagatatggaaacagatgacatgggttgatcctttgatgccctcattatcaaaagattattaccattgcatggagtataataatgatctctacttgtttcagaggcctcgtggacagagagattcaagctattattgggaaatagaagccagtgaagtgatgctgtccactcggattgggtcaggctcttttggaactgtttataagggtaaatggcacggtaagcttggggccctccctttactaactgcagggctttggtgtgaagtcaagtttcagcccagggggccaggaggaggagaggactgagtgctcctgggcttatagcagtactctcccttacatacttgattatacctgaagattgaacttaattctttttagactaagttcttataaagctcccaggataattagaaattagtgaataagacttgagccctataatcaaatgtcaggagtacttctcctttaaactgattaaatacagtctgcacatgggtcatgcttggaagctccttaagtgagcaagagtctgctgctatggagggagcatgggttctagaaactttaagctggaaaggaccttagagattgaaatggggactgatttgcccatggtcatgcagttaggcataggaaagctggaaatctcctgaagtaacttctctttgtcctgccctaggattagctgtgggtgtccctatcaaacagggaaggcattgacttaattcttgaatctatgtggaatattaatgttctgattttaatggaaacactttgtcacttggaagaaaggtactatttaacttatgtagttacagcttgtgtattttggcaacactgaacattttggcaacatacttagcatttctctgttaggtttttaatgcctctggctttaggactttgggaaataataggtatttccttgaaaatgctgcatgttcccaaaaagtcatctcttctaaattcagattacaataaagcaaaaatcacagagtcccttggtgcctatactactttggatgacactggaattatctttagagataaatgtgcaaagattgagagaagttaaaagcatcaaatgaatggagtattaaaattcaaggtactgaaaatatcaaacacctccagttttgagtacttggtggttttttttttttttttttttttttttttgagatagattcttgctctgttgcccaggctggagtacagtggcacaatcacagctcactgcagcctccaactcttgggctcaaacagtcctcctgcctaagcctcccaagtagctgggaccacaggtgaatgcccagctaatttgttttaccttttgtagagacaaggtctcactatgttgcccaggctggtctccaactcctggactcaagcagtcctcttgggtctctcaaaatgctgggattacaggcatgagccactgtgcccagccttaccatgtgctcgttaatgcatggtttttaccacttgtaattaatcatctgaccaatttctagttccttaagaggattggcacccgactgaacatttgtaaagtacatgtggaatgattccttttcctttgaaaattgcatctggctgggcagggtggctcacgcctgtcatcccagcactttgggaggctgaggcaggcagaacacttgagcctaggagttcaagaacagcttgggcaacatcgtgaaaccccatctctaccaaaaattaggtagatgtgatggcactcgcctgtagtcccagctacttggaaggctgaggcaggaagattgcttgagctcaggaggcgaatgttgtagtgagctcaatacagtgagtacacactactgtactccagcctgggtgaaagggcaagaccctgtctcagaaaaaaaaaaaaaaaggaaaagaaaattgcatctagtatgtactactgggctgtctcctgggtcccagagaaatgatactgttgtagaatatttatttatatgtatttagagacaagatctggctctgttgcccaggctggagtagtggcacaatcttggcttactgcagtctctgcctcctgggctcaagctagccatcctcctgcctcagcctcccaagtagctaggactacaggcacatgccaccacacccggctaatttttgtattttttgtagagatggggtttcgccatgtttcctagactggtctcgaaatcatgagctcaagcgatccgcctgcctcggcctcccaaagtactgggattgcaggtgtgagccactgtgctcagccagttgcagaatattttagatggcataaatatctccaggattccttaggaaagaacacaagcactttgtgggatagagcacttgtgtctgagataacaaggctgctagtagttgtaggaggcagagcaatggatattgcatttattgcttctgttagcattagaacatttttatatcacattttaaaagccccagctaaaagccagcggatgaagttttaagttgtacccaagtttaattttcctctggttgcgcactttcatttggggattcataatttttcaaggcattggtacgtggtactgcttctgagctttgtcttctctcaatagagtgagctttcaaactgtgataaagattatttgttacagtgttacttccataaagactgctattagaatggagataacttgtttttaagattctaggttttttaggccaggtgcggtggctcacgcctgtaatcccagcactttgggaggccgaggtgggtggatcacgaggtcagtagattgagaccatcctggctaacacggtgaaaccccgtctctactaaaaatacaacaaattagccgggcgtgggggtgggcgcctgtagtcccagctactttggaggctgaggcaggagaatggcgtgaacccgggaggcagagcttacagtgagccgagatcgtgccactccacttcagcctgggtgacagagcgagactccgtctcaaaaaaaaaaaaagattctaggttttttaagtcagaaagtctcaaaagtcagaggagtgaggagcagtggacttttatgccatgctttcagaaagcaagctctggtctatgaatgaagaagaaaaatgagtggtccaggaaacataacttctagattgttttgtgcaatacttttttccgccatattctggttcctgtatacagtatatctgttcagtatcttaaaaattacaactgttttcatgattttgattgaagatttttttaactcagcccacccacttatggaagtaaagcagaaagggtctcaaagcaactcagaagcctcaggtgcatgatttaaaactcaacatatttatttaaagcagcatctgtcaggcccaaagctcacaacctccttttgggcattaaatttggcatcaaggctgggtgcggtggctcatgcctgtaatcccagcactttgggaggccaaggcagggagatcatttgaggtcaggagttcaagaccagcctgaccgacatggtgaaaccctgtctccactaaaaataaaaaaattagccgggtgtgatggcatgcgcctgtaatcccagctacttaggaggctaaggcaggagaattgcttgaacccaggaggcgaggttgcagtgagccaagatcataccacagcactccagcctgggcgacagaacgagactctatctcaaaaaaaaaaaaaaaaagaaagaaaaattctttctctaggccaggtgtggtggttcacacctgtaatccctagcactttgggaggctgagttgggaggatcactttagcccaggagatcgagaccagcctggacaacatagtgagaccctgtctctacttaaaacacaattagctgaccatggtgctgtgtgtctgttgtccccgctactcgagaaactgaggcaggaggatcacttgagcctgggagatagaggctgcagtgagccgtgataacaccactgcactccagcctgggcaacagaacaagaccctgtgtccaaaaaaaaaaaaaagaaacttaaggagtttatattctagtggagacagtaaacaggaaaagtagaatatatagtatgctgtaattgctaaggagaaaaatggaggaaaggagatatggagtggcagtcccagttcaatgtttttaataggttggtcagggaggaatctgccaagaaagtggcatttgcatggagggcgagggtgggtggtgcagatatctagggaagcagtaacatcaagtgcaaagtggaccactcacctggcctgctccgagaactcaaggagatcttatggcttcatttagagtgagtgagaggtatactaataggagtgaggtccagtggtagggtgttttagggtcctgtaaagactatcatttgggttaaatgggatctggggttgtacgagacctttaggaggtttggcaagcctttgtttgaaaatgagtgtgatgagagagctcattatctgtctgagagcccattctaactccaggtagttcctactagtagaaaatagtttgattgggtgcagtggcccacatctataaccccaacactttaggaggctgaggtgggagaatcacttgaagtcaggaatttgagaccagcctgggcaacatgagacccttgtctctacaaaaaattttaaaaattaggtgggcgtggtgatgcacacctgtattgtagtcccagttacttgggaggctgaggtgggaggatcccttgagcccaggagtttgaggctgcagtgagccgtgatggtgctgctgcactccagcctcggtgacagagcaagagccagagtggggcgaggggagggcatggaatagttctttattagagttgaaatccgttttcctataatgtttgctcattgatcctagcagactgaatgaatccctttcatggcagtccttgggttatttatatgtaaatgaggggaatgctgcagtatagaacattccttctggatttcataagaaattgcaaataatctgttaccataactgtgttaacgagagctggctggcagatggatccctgcaagtaccatgggcactgtctttggttgaccctgttcagtcttcccatcagtgacttaatcagaggtgtgatatgtatttgcatagtagtgaggatttagaaaagcgagaagagttcaactggctaggatgatggaaaaaagaaaagatcaccttttaacagagataagtcatattcattgttccaaaaagtagaactggagggggaagatgtggcttaatgataacgtgtgtggaaactgccaaggaagttcagccgactgcaaggtcagagtaagtcactgcgtgggcttggctctgaattctgaggttatattactgattagggccagaacaggtgacaccaaagggtgggttcagtgacaactagagcatgcccagaggagagctataagaaagggaatggactacaaaacgaggtccatgaaataggaaggtccttagaagcagttccccctgagcgatcatccagcatctcccaagccacatgcctgaacccctagccctgtcctgtcccctcccgttaaaggctctgcccttttctgggtcctggagcctgggtcatagcgttggccattttcccagcacttccactcagttgactgcctcattgggtcagtttaccttcacaggatttcttaccttcatcccttctttctgagtccccacagtcaaccattcttcttgtacctttcctgagctattgcagcagattcctctctggtctccctctttctctcctacaggtgtccaaatcctaccctagagtttactaaacacagctcaggtttctctcatccccctcacctcacctttatttctgatgtgcccagtctgaaacattctctgtcctatttactaaaatccttcccttggtttatagcccatttccttcagaaaacctttctgtattctctttgaaaagagatttacttaggcacctgtagtcccagctgcttggaaggctgaggttggaagattgcttgagcccaggagtttgaggccagcctgggcaacatagtgaggccccatctctaaaaaagaaaaaaaaaaaaaaaaaaaggatttactcccccatcttggggaactccccttctgttccagcactcctgtcttggctccaactgtaccagaatggacacttatgcaaatgattgttgtcctcctactcagggctggttatacacgtttcccatatggtgtcccatatggatccatttttctagatagaaggtagctccaaacatagtgtggatctctcccatccagtcaacagcaccttcaccggcagcccatggcaaacacatgtgcaggttaactggatgagagccactttggaggctgctgttaaaacatggggactcgttgaaactttagatgataaaaccagagatcacagggagacagtttgggcctatcgtgaggaccatctctctaccaattttcttcccaaaaatgaaatggggagggctgggtggggtggcttacgcttgtaatcccagcactccaggaggccgaggcaggcagatcatttgaggtcaggagtttgagaccagcctgggcaacatggtgaaaccccatctccacccaaaaatacaaaaattagttgggcatggtggagcatgcctgtaatcccagctactcgggaggctgaggcaggagaatcgcttgcggaggttgcagtgagccaagattgtgccactgcattccagcctaggtaacagagcgagtctccatctcaaaaaaaaaaaaaggaaggaggaaggctccaacagagaggctccagaaacacttttgaaagtggcttttggccaggcacggtggctcatgcctgtaatcccagcactttgggaggccgaggtgggaggcctcacaaggtcaggagatcgagaccatcctggctaacatggtgaaaccccgtctctactaaaaacacacacaaaaaattagccagacgtggtggcgggtgcctgtagtcccagctactcgggaggctgaggcaggagaatggcgtgaacctgggaggtggagcttgcagtgagcccagatcacaccactgcactccagcctgggtgactgagcgagactctgtctcaaaaaaaaaaaaaaaaaaaaaagtggcttttaaatttatagcactctaaagtggaatggatccctggatgtgtctaaagttatatcaagaggctggttttacagtgcttgacaatcagttgtcagtgttataggtagaatagcaattggagtcagactggggttttgatcctggctgcagcgttctttgttttttggctgtatgaccttgggcaagtgactaaacttctcagcttgttgtctgtgaagataaattatttacgtcagagggcagctgtgaggattaacagagataaaagtatacacagtgccaggattcagtattattagaattactttttaatggtattgaaggcagagaagcttaatttcaatatatatctctgaatttttactagggaccatcttaggtctcactgaaatgtggattcagagttcagcctcaatagttgctaaatggcctgcttccttacaccagcaaccagccccagtcattctgtatttgccaggccattcatatgtatgcactgatttcatccccacaggacaaggttttgacctgtcacacatgacctcacctctgtggcttgccagggttggtgtgaatagtttaaccaaggctatcgaaggcctaactgtagcgatagcagttaacctatgtaacttttttgagtcatttgaattatgtagagattggacctgtaatcccagcactttgggaggccaaggtgggaggattgcttaagccctggaggtcaaggctgcaatgtgccactgcactctagcctagacaacagagtgagaccctgtctcaaaaaaaaaaaaaaaattggaaatttgccgtatctgtgtaggtatgtgattctttggataaatgattcactgtatcttcctcaaaactaggttatttgaaagactgagatcattcaactgattgcactgactgccaactaattttgcaggagatgttgcagtaaagatcctaaaggttgtcgacccaaccccagagcaattccaggccttcaggaatgaggtggctgttctgcggtgagtagaaagctggcggtccagtccctctggagtgctggagtggggagtacaaggactgtagagttagtggactgtgccgcaggttgggacgggcaggcagttaggactcactgtggagtttctgtggttggatgctcctcccttgagagcaaagggatgtttcctttagtttatgtggttgtcaagcctttcgaagagcccctttttaggagaataccctcctctgggcacagtaaactcaatagcccaatttctgtctctgggttttggtttgaggtgggcagaaataggccctatttttacctttatttcccagaacccttttttttatagctgagttgccttattttagacttcagaacagtcagctttccaatctttcagtcactatttagacttgtaggaataagtcatataatggagacttctacaaggagtccttgtgacctccacaggagggtcatggagtgtacattgatgaaagagaatgtcctctctgtaagcaaggctggcactgaactgatggcccagtgaactaatggtgggcttctctttgctcagaatgccacccgggttatcagccgtgccatgtgtttgtttttgggactgggggtggtgttgggactgggggtggtgtcgacagcacagaacccactgtccacgggaaagcacagtagacctccctgagcactttcctcctccctctcctctcttcccctcccctccccagcaaaacacggcatgtgaacattctgcttttcatggggtacatgacaaaggacaacctggcaattgtgacccagtggtgcgagggcagcagcctctacaaacacctgcatgtccaggagaccaagtttcagatgttccagctaattgacattgcccggcagacggctcagggaatggagtgagtagatggtctgatgcctctctgggacccaggcatcaaatttgtccctaaattggaaccaggatcaggaaaagccttctagtccattaagcgattctgtgatatctttgcacaagcctctggcctgggctggaggggccaattatcaggaatgagttgttcaggttccagctgggtggggtggctcacacctgtaatcccagcactttgggaggccaaggccagtggatcacttgaggccagtagttttgagaccagccttgccaatatggcaaaaccctgtttctactgaaaatacaagaatgaaccaggcctggtggcacatgcctataatcccagctactcaggagctgggacaggagaatcgcttgaacatggaaggcagaggttgcggtgagctaagatcacgttactgcactccagcctgggctgcagagcgagactctgtctcaaaaaaaaaaaagagaagttcaggttcctccttgggactgaacttcccccttggggctcagatttgggctctgcctgctaccctggctttatcagaaacctgagaatatagtggggtgcatgtaccttctgcttggacagctgtggcaatgccttctgctcagctgtctgaggcatggctgtcccacatgagggtttaagcagatgttgtttttgggataatttttttttttttaattaaaaactttttcctggccaggcacggtggctcatgcccataatcccagcactttgggaggctgaggcgggtggatgacgaggccaggagttcgaaaccagcctggccaatgtggtgaaatctcatctctactaaaaatacaaaaattagctggttgtggtggcaggcgcttgtaatcccagctactcgggaggctgaggcagaagaatcacttcaacccgggaggcggaggttgcagtgagtggagattgtgccattgcactctagcctgggtgacagagccagactccatctgaaaaaaaaaaaaaaacccaaaaaaaccacacttttttccttagagacacaggttctcactctgtcacctatgctagagtgcagcggcgcaatcatagctcactgcatccttgaactcctgggctccagctatcctcttggctcagtctcataggttgctgggactgcaggcacatgctaccgtgcccagctaattttcgtgtattttgtagagtcggaggtctcactatgttgcccaggctggtctcaaactggactcaagtgatcctcccacctttcctggctagcctagggtagtgcttctcaaacttctcctctgaagtagaggagctcctcgtacccctagacatctgggagttactaagctatagctgtgcttgcaagtcctacataaattctcacactgtctttaaaattcatatggaagttgccttctgtgtattttaagaaatggaatgacttttcagaaaaattgagatataattcatacatcataaaattcccccttttaaaatgtacacctacctcagtgtttttctggtattgagttgtgcagccaccaccactatctaattttagaacattttcattatcccggaaagaaacacatgcccattgtattagtctgtttgggttgctctaaaggaagacctaagggtgggtaatttataaagaaaagaggtttatttgactcggggttctgcagactgtacaaaaagcatgacaccagcatctgtgtctggtgaggccctcaggaagctttcactcatggcagaaggcaaggggagccacgtgtgatgtggtgagagaaaggagcaagagagagagcatggagggaggtcccagactctttaataaccaggtttcatgtgagctaatagtgtgtgaactcactcgttactgcagggaggccaccgagccgtttgtgaggaatccatccccatgacccaaacacctgccacttaggtcccacctccaacactggggatcacatttcaacttgagatttggagtggacagatatccaaacaatatacccattagaggttacccaatacctcccacccacttgcagtctactttctgtttctatggattttgcctactttatagttcaatataaatggaatcatgtaagatataatatagtcaggtaacatataatgatgtttcggtcaatgaccacatataggaaggtggtcccacaagattataatactgtatttttactgtgccttttctatgtttggctatgtttagagacacaaatactcaccatgttacaaccagctacagtattcagtacactgagggccatacagttttgtagcctaagtgcaacacgttataccatttagccagggtgtgtagaaggctgtaccttcttggtttgtgtgaatacactttatgatgtgtgcatgatgacaagttggctaacaacacatttctcagaaggtatccctgccgttaagtgatgcttggctgtatataatacataagatatggtattgtgtgcctgggctcttagacctagcatagtattttcaaggttaatgtgtagcatgagtcactacttcattcctttctgtgtctgagtaacattccattgtatggatatgccacattattcattcatcatttatggacattgggttatcagaattactttagagtaaaactgatgcttgaagaagtgtcagcaatggtcaggcgccaggggcccatgcctgtaatccaagcattttggaggccaacatgggaggatcacttgagcccaggagtcaagaccagcttgggcaacagtgcaagaccctgtatctacccaaaaaaaaaaaaaaaaaaaaaaggcggcatggtggcacatgcctgtggtcccggctactgggaggtgggaggatcacttgagcccaggaggttaaggctgcagtaagctattgactgcactccagtctccaaaaaaaaaaaaaaaaaggtgtaagcatgtttgtgctgtggcctcaccttcaggtaagcagtgatgtgaaccaggctgaacagcacagggtctatccctgtgtgtaacactccttggagccaggccttcagtggctttacttcttagctgtagtttaaaactgctttctactcatgcccctcaaacttatttttaataatttcttttcccttcacagctatttgcatgcaaagaacatcatccatagagacatgaaatccaacagtatcctttggttgttgagttcatttgactgctcggttctaaatttagggaaacagaagggaggctttctatcacaagtggctctcggtgccaggggatatctttttaaggaaagaggcagaggacaggaaaacagaaaagtcagaaaattagtaggcttggcctgtccctcagcagcttatgcctcacctggactgatgagagcgatgtttaggttaggttcctttctgagtttatctcagcaaaagtgatttggagagatttccgtaagcttgaaataggcataattttatcacactattagtaaatgtaacctgacggggattgggcttttgtcttaagtttatttctagtttgtggccagcgtgtgtatgtctatctgcttgttatgtggatagcaagtagctacaagccaaatgttgaaaggtttccaaaatcactaattaaaatagtctttcttgactgggcgtgatggctcacacctataatcccagcactttgggaggctgaggcaggtggatcacttgaggctaggagtttgagacttgcctggccaatgtggtgaaaccccatctctaaatttaaaaattagctgagtgtggtggcacgtacctataatcccagctactcaggaggctgaggcacgagaattgcttgaacctgggaggcagaggttgcagtgagctgagatcacgccactgcactccagccttggggacagagcaaggctgtgtctcaaaaaaataaataaataaaatggtctttctcaaaggtacataagtgggttcttcagaagtcactattagaagaggagaggggttgtttttatagaagagtaaatgaagaaaggtatttttaatgctgtgaggcgtgaaatttaacaattttgaatctgccaccctccacgagcctttccttgtgaaagaaagatggcattacaacccacgttttgcctcttgagcagtgagaggcatgatagttgtgttggattatgggacatggcctattttaggtacatgtctgaggtgtggaacacctttcagtggtggggtttttagcagccaaacattataccatgaaagcagacaccacagatttaaggaggtgtgaattcctgggcaccaacatcacaagttactttgtgtgtgttttgttttttaattttttgttcttttttaatttttttttcctcacaagtttgacttaaactgtatgacttctttacccagaagcgagccgacttcagttctcattttgaagtcactgagtggtaccgattctagtgaggaatttcttactacaacattgaacactcagtaagggatttgctattttgttaaccactcaagtttcagatggtgatttgagggcagaatacaggcagaaacgactgtaagctgtcaggccatccttggccctctggggagcactggagtgtggcctctgctcatcctgttagggtttcaagtacctgtattatgtggaaaggtcacaaggccagagacccagcacctagatgtgcaaatggggagaagaagcagggaagaaacgctggcttgcttttggctagggccaaataatctggcacattgaccaatccctgcctgtcttctggaagaaggtgcatttcaaaagcactttaaagaacttcagaaaccttaggaagttcagtgcagagaggctgtgacagaggtaaggtggagagattaccgtgttataaagaactttgggatatttttcaaaattaacctgaccattcttttgaaaccagagtccttaacaagcattgagatatatttctccatgaaggcttaacagtgaaaattggagattttggtttggcaacagtaaagtcacgctggagtggttctcagcaggttgaacaacctactggctctgtcctctggatggtgagaatctgggctcccaccagcagtctctggtatagggcaaaaggaatgccttggagatttatgtgcaaacttaaagcgtttctgtacatttccccgaaatccacatgacccctagtgacagccagcctcagggcaattgtagattttcttgaggaagctgttgatcagaaccactgtgaagcttagtgtggagaggagttaataagctgggtgacagaaatgctgggtcttggtcctttaaagacaaggattcctgagctgttttaaccagtgcctgagttggagtcctttgggggaaaagctatgtggggactgaagaatggactcattcataactaatgaaagggacagcctggcccctagatgtctgtgaggcctgtcatatggtgataaatgcacttttgtcatatggtgatacatgtaggccccagaggtgatccgaatgcaggataacaacccattcagtttccagtcggatgtctactcctatggcatcgtattgtatgaactgatgacgggggagcttccttattctcacatcaacaaccgagatcaggtaagtctgtgctggtgcgaaaggacccaactcgtgggagcccctgggcctccgccagcctaagcagctagagggttaggacttgttattatctgttgttcattcaccccccattagctcagctgttttctttcccttagatcatcttcatggtgggccgaggatatgcctccccagatcttagtaagctatataagaactgccccaaagcaatgaagaggctggtagctgactgtgtgaagaaagtaaaggaagagaggcctctttttccccaggtaaggctcagggctgctagaatgtgattaaagcatgggttggttcgtaaagatggcaatataaggtgggagtgttttgttttgttttatagggaggggacccaggtcctctacaagatggtggggggcagggtacatcctgtgtctttgagacacagctaatgagagcattcttgggctttgtttcagatcctgtcttccattgagctgctccaacactctctaccgaagatcaaccggagcgcttccgagccatccttgcatcgggcagcccacactgaggatatcaatgcttgcacgctgaccacgtccccgaggctgcctgtcttctagttgactttgcacctgtcttcaggctgccaggggaggaggagaagccagcaggcaccacttttctgctccctttctccagaggcagaacacatgttttcagagaagctgctgctaaggaccttctagactgctcacagggccttaacttcatgttgccttcttttctatccctttgggccctgggagaaggaagccatttgcagtgctggtgtgtcctgctccctccccacattccccatgctcaaggcccagccttctgtagatgcgcaagtggatgttgatggtagtacaaaaagcaggggcccagccccagctgttggctacatgagtatttagaggaagtaaggtagcaggcagtccagccctgatgtggagacacatgggattttggaaatcagcttctggaggaatgcatgtcacaggcgggactttcttcagagagtggtgcagcgccagacattttgcacataaggcaccaaacagcccaggactgccgagactctggccgcccgaaggagcctgctttggtactatggaacttttcttaggggacacgtcctcctttcacagcttctaaggtgtccagtgcattgggatggttttccaggcaaggcactcggccaatccgcatctcagccctctcagggagcagtcttccatcatgctgaattttgtcttccaggagctgcccctatggggcggggccgcagggccagccttgtttctctaacaaacaaacaaacaaacagccttgtttctctagtcacatcatgtgtatacaaggaagccaggaatacaggttttcttgatgatttgggttttaattttgtttttattgcacctgacaaaatacagttatctgatggtccctcaattatgttattttaataaaataaattaaatttaggtgtaatggctggctgttacctccttttaaagtaattctgagctcacaacttgaatgccccatttgttcaccctcttcaggagcagaattcaagaacaggaaatgtgcccagagcctaggctgggaatgaatttgtaatttaacctttgtactctttgtaaacctctactgaagagttaagtataaaaattaattaagcagaaagtactctaaactcagctaataccttaagtaatacattttataaactatttatttatttggtaggtacagcttttttaaacacaaaaatagattagataaattccagcttggaacaagctagtgctggttcacaaggttatgctcacccttcaattaaaatcaaaatgactacaagacttgccatcagctctcttcaggaccactgctgggtcagaatcagaaaccttgggtgccatgaaatttttacaaaatttcaaatcaaagccaggctttgcagctagataatagatcacttgagtacgaaccacacatgtaagtgcacgtatatttgagttctcaatacaattaccctgatgggcaagaacccacaggtgagagcagaggcttggttcccctagagggccctggctggaggccccaacaccaaccagacgacaggagggccagactgctacccagtactgtacctcctgctccttcaagagcctccctaagggagaagaagatctatacttccactttgtttgctgcacatgtggcaacaagattgctaccctgatttgggacacttgagagaacttgaaaaaaatgaccacccttaaagccctagaaaaaagttgtatgtttgttaacagctatgctgcgctcactttgcattgtgtgttcttgaaagctctgtataaatcaaaattttgacgacacactaaatacactagagaaatacactatagaggaatccttttatagggctgaagactcctttggtaagaaaaatatgctgcattaggggcagctgcaagtttactatttctggggaagaaaagatcaaagataagagccaggtttgttttttaaagcaatcaatccaaacagtttgggtgtttgttagttgttacccctgaggggcttgaggtgtaactatatcagctataaaaatagcaattccatacatttaattaggttactttatatctttcactcttccccatggctgtaataatggagattgaatgagactaaggctaagcccaactccactcaaatccaagtcacacgtcaccttggctgcagtacagggaagctccgcacaccctggcttgggaaagtttcggccgatggagcccaagatgcagggcaaccatctactctttagggttctgatgattccactccagaaaggtgcatgaagaggtccccgagctctgtcatgtcgacatcttcattgttggggacatgccggctttctcggttctcgatgaaatcccagagccgcactgaattaaagaactgcaaaaacagccagtggacatgcctggttactgctaagagcaacaggaaggctgcgttccttgatcgttcttttgcctaccccatttctctgccaggaacggtacctggaaatgcccacagctgctaagtgtccccaactagagatggctaaagtccttaccctcacagtgccttgagaactgagctgtttccgaggtttctcaggctctgctagccgcccatcggggtaagcatggcgataaagacatttgcttccaaatgggcaggtccccttgccttgctcaaagtatttacaggcttttttcctgaaaagcagaaagaaaaagtcaagaggctggtgggaaaatgaggggtccaaactgggccactgcctgcctccatccttaccacccttacgccagaggtaggtcagcctcacattctaggtggggcagctgaggctgggagaggttgagtgatttgtctcaggtcacacacagctgggattctgatttccaagcaggataggaagtatccccacttacctgcagccttgcaaaggatattaacctgcctggggacttgctgtgtggagactgcagtgctccacaggccctccggcagctccagagcacctcctgggtcaccacagagctaagccaggcctggtcactcctctgggcactaaggtctgaagctgggccacttgtctctgctcaaagttccctaggtaccccaccaagccaactctccccttcctcctggccgcagtgctgtcaaggtggctacagggaaagcagagggttttagcaactgcctaaagccataggtctccttccagttttcctgtctccaacctcggcaccagggagggcttcttcacgccttatgtgctttggaccccttctctgaacagtgtttttcaatgcataaaacatgggtctacagcatacagtgaccaaacagttcaaaatgttttccctctctcttaattctaccattctccccacagacctctatgttaagaaccctgcccaaggaaactcaatcaaatgaattcccattttgctcaaatgaactctggtttatccaatcataaaggatcccaaactgaagttaaaaaaaaaaagatacccaagaatccagagggccatctcggagtacagaggaaggggaaagtcacagaaataaagccaaacaacagaaagggcacgctgctgtcaggggcagctggggtgtgtgacagcgggagacaagaacagggaaaggaggctcctgaatccagtggttttccgtcttgtcagatgggatggccgcaggccggtggtgaagttctctgaggacggcttcatagcagcataaagaaaagccctctggccgggtgtggtggctcacacctgtaattccagcattttgggaggccaaggtgggtggatcacttgaggtcaggagtttgagaccagcctggccaacacagcgaaaccccatctctactaaaaatacacaaatgagctgggtgtggtggctggcacctgtaatcccagctactcgggaggctgaggctgaggcaggagaattgcttgaacccaggaggtggaggctgcagtgagccaagattgtgccactgcactccagcctgggagacagagtgagacttcgtctcactgggggtggtggcgggggggtagggtggggggagagagaacaagctccctggccagctgatctgatttgagcacaggtggctggagagcaggtgtgtggacgacacatcctccaggcccctgcttgcctggagttctgagcggacttcaaatgaccgtgagcagtttgctctcaccagagcctgctggacaactccagagcatcctagcacactggctatgaactcgatcaggtcaaacacattatatactggtcccccactctcacaagaatattactctttttcctcccccaggcttatctggtcaccaaggccaaaagcctccagttcactctgactcactctgtgtcctcggctctcacacccaactgtgttcattctgtttacaaatcacttcccaatctccccttcctttgggttcccacacttgtggaagcctctggggcctgcctgccagggccacttcctcactggcctccctcccactcccaccagtttccaccttcagagcagcacggaggagcttcccaaccttttttttttctttaaagagatgaggtctccctatgtctcccctggacttaagcaatctgccctcctcagcctcccaaagtgctgggattacaggcataagccactgcgcctggccccaacctgttcttaaagaccatggtcacactgggattcaagtgtcccttagattccagtctgtaggtcccaccacatccttctacacacctgtttcaatgccaggagccactcccagtgtcccccagacacaaaacctacacccttctgtgcccatgtccttccatcacttccccctacagacaggtgcttcctgcttcatggttcaggctcccatgctgcttcccctggcagcccccggtggatccaagtgctttctctgttgtgatagatggtccctcatgaagaactggtcaccagcaaacctgtatcataattgcccttttgcagtttcccatgaagttgtcttacttggcggggcacagtggctcacacctataatcctagcactttgggaagctgaggtgggtagatcatctgaggccaggagttcaagaccagcctggccaacatggcgaaaccccatccctactaaaaaaatacaaaaattagctgggtgtcgtggcgcacacctgtaatcccagctactcgggaggctgaggcagaagaatcacttgaaccctggaggcggaggttgcagtgagctgaaatcatgccattgccagcctgggtgacagagcgagactcgaaagaaaaaagaaattgtcttactaatctctacatcccccagtggtgcttagctagaaggtacctgacccatagtgagtactcagtaaatgtttgtggattgcaaaaaacacagtcattaaaggaaagcaaagcaaggaaagatccaaatagcaataacaatctccagactgcttttcagcagagcccctttctacaggctgggacccttttctacaggctggggcccttttctacaagctgggacccctctgcttgccacgccttgccctcttgtggacacacaggaagattgtatgaggaaaaaatggtaaaaaaaaaaaaaaaaaaaaaatcaagctttagtaaactaatatgcaacataaaggaaccattaaaaaaggtaatgcatagtttcacttttagtatgacaagtaaacgcctgccatacccaaccctcctgcagataagtcttaacacaaatatttcaagaagacctgaaggcaccagagaatgaacaaacgcagttagattctttggaggagtaaacacaaagaagaatagcaatggcaaaggctaagttaccttttttaaaaaaggtagcttttgtggctcacatctgtaatcccagcattttgggaggccgaggcaggtggattgcctgagctcaggagttcaagaccagcctgggaaacacagtgaaaccctgtctctactaaaatacaaaaattagccaggcgtggcggcatgcgcctgtagtcccaccttcttgggaggctgaggcagaagtgcttgaacctggaaggcggaggtggcagtgagctgagactgtgccactgcactccagcctgggctacaaagcaagactccatctccaaaaaaaaaaaaaaaaaaaaaaaaagaagtagctcttatcctggagcaggccaaaatcataaccacatggggtggctaaaactccaaggggaaatccaatctttctggcctgaagaactaaaagacaagagttcaaggaaatcacagccattggaaagtgaggaagcaatcccacaaagtaaggggcctgtgaaaaagtgctcaaaggctgtgtataaactctgcccaaatctgactaactcccaaaccacacaggaatgcgacaaagtcagctacgaatgcaaaaccagaactgagatctgaactgctacctgggtttgagttcaaacaatttacctgcctgttaaaaacagcaacacttggccaggcgcagtggctcatgcctgtaatcccagcactttgggaggccgaggtgggcggatcacctgaggtcaggagtttgagaccagccaggctaacatggtgaaaccccgtttctactaaaaatacaaaaaattggccaggtgcagtggtgcatgcctgtaatccctgctactcgggaggctgaggcaggagaatcgcttgaacccgagaggcagaggttgcagtgagccgagattgtgccactgcactccagcttgggcaacaagagtgaaactccgtctcaaaaaaaaaaaatcatcactttacagataaaccataacagaatcctaagtctctctacaatgtaatatttacaatgtcaaggataaaatctaaaattactagacatatgaagaatcaggaaaatgtgatccattcttaaaagacaacagaggtcaacttcaagataacaaggatttcaaagtagctgctacaactatgttcaaggagatgaaaagaaaaaaagattgaaaaagaatgaatatccccagagatctatgaacaatataaaaaaactatcataaacggaagtagagtcccagcaggaaaagaaaaaaacaagacagaaaaaaagttaatgaaacaatagctaaaatttcgctcatcttggggagtgacataagcgtagagaaaaaccactccactcctaggcaaaatatcaacatgctgacaaccaggataaagaggaacatttgaggccgggcacggtggctcatgcctgtaatcccagcactttgggaggccgaggcaggaggatcacttgagcctaggagttcaagaccagcctgggctacatggcgaaaccttgtctctaccaaaaaaaattagccaattagctgggcatggtggcgcacactactggtggccccagctactcaagaggctcctgcttgagcccaggaggctgaggctgcagtgagctgagattgcaccactgcactccagcctgggcaacagagtgagaccctatctcaccgaaaaaaaaaaaaaaaaaaaaaaaacaccaaaactaaacaggtccacatcaccatgtccttgctcattgctgcatcccagagcccagcatggtgcctgagagaaggaagagaggaagaggcccctaagaccacactcctgggaaggagaacgaggacacgggctgacagcagagccaggcaggcagcaggggcacgtcgaaactcaaaagcacttaccccatcccctgtttgaaagcttcaatcaactcgttctttttattctgatcttccacccaatacacacttggaattacaaactctgatatcacacggcattctggacaagacctgaaataagaattagattactaagggagaagtcatgttacgaagcctgggcacactctctgctaaacctcttgctcaactgcctcaccactacaggcatttccttcaccagaaattccaaaagatgaaatcacaatcatccaagaaccttatttactattaacaaaatagggtttcccaatgagaacacatggacacatgtgggggaacatcacacaccggggcctgtcggtgcaggggcaaggggagggagaacatcagcacaaacagctaatgcatgcatggctgaaaacctaggtgatgggttgagaggtgcagaaaaccaccgtggcacatggatacccatgtaacaaagctacacattctgcacatgtaccccagaacttaaagcaaaaaaaatacacacacacacacacacacacacacacacacacacacatatatatggtttcctcaacaaaaaagacagatgaaataaccctcatacattgctggtgagaatgtaaaagggtgcagccactttgaacagagtctggcagattctccaacagtttaatgtagagttattataccataaaacctagcaatcccacgcccaggtgtatacccaagagaaatgaaaacacatgcccacatgctgtgttcacaaatgttgacagcagcattattcataatagttgcaaagttaaaacagcctaaatgtccactagctgaggaatggataagggaaatgtgctgcgtccatacaatggaacatattccgccaggagaaggggactctggcacatgctacagtcgggatgaactctgacaacactatgctcagtgaaaggggccaggcacaaaaggccccaaattctatgattccatttataagaagtgtccagaataggcaactctgtagagacagaaagcggatgagtggtgagttaaattgtgggcttttatctcaatagagcagttgtttcaccacacgattttaggcaaattacttgacccccgcaccccaggcctgtttcctaatctgtaactgaggagggtctttgagggaatgagatgagcggacagatgtggagttctgaacagtagaacgcgtgcagtaacctctccacatgccagctcttcccctgtcctgctggagaatttgagactcctatgttggccacattgagcacatcccatgtgccaggcatcatgcagaatgttttacatgcattattccacttcatcctcaaataaccctattttcgtttttggtggggggaaaaaacgaagctcaaaatgattaacaggcaactgggctacaggcaggtactactggatttcaaacacaaggctaggagatgaaaacaggtcagtgccatttaacacctttttacacagatcatctttgctgagttcctccccaacacccagaaagcttggtaggaattgttgcccatcttttataggaacaggcacttaggctcaggaagagtaaatgacttgctgaagttcatgcagccaggggccagaactcaccagttactcttgagggtaacggagggcttaaaagtggacggaataaagtctcaaatcaaacattctcctagctcccacagctaagacccctggctgtacttacttaatgattgggttttcaaactgtttggcacaccgccactgccggatgcaggacaaacagtacgtgtgattgcaattggagagaatcccaaatctcctctcagaagcagaggccttctccaggatcacttccatgcagatactgcacactttgtcctggcttgcctggaaggcaaaggccttttccatctcgtgttcgaacgtcaacatgcagatctgaagcacagacaggaaggaaggctttggttgtgggccactgaggagtggcaggagccctaggagtagctgcagccacactgccacagctgagatcaggaaggaacactgacagcgactgctgtgagcaaaggcccaggctcccccaagtcaggacactgacatctccctcagaccacacaaaggacttcaaaccatcactggtccagccccttgctttcctaggaggtgacatggtcaccacccatttaggactgagaacacggagatccaaaaaggttaaactgcagtggagtcagagtccgtaaggactgcggccctagtcccccagctcctctgggcactgtttcccccgactctgagccatgtctacatcagagatgctgactcgtccttaccatgaggcttgaggctggcagcctagtcctatgtaagaagcaccacttctccccaagaaaatgattcaatgaattcattcattcactaggcatgccctgaattccttctatgtgctggcatttgagcaagagtgagaagacctaggcccagcccttgtaagctcagtctgtccagatctgagacaagccaacactcaccgcagagacctcacacacttgcataaagaagacagctctaaccctctgcttccctggaagacaatggagagtgtctccttgtccgctgccacatggagtcagtactaatttaccccttgattatctaggaatacgctgtccatttaaacatgccttaggccaggtgcagtggctcacacctgtaatcccattactctgggaggccatggtaagaggactgcttgatctcaggagttcaagaccagcctaagcaacatagcaagacctcacctctgaaaaataaaataatttttttttttttttgagacagagtctctctctgtcgtccaggctggagtgcggtggtgcaatctcagctcgctgcaagctccacctcctgggttcagactattctcctgcctcagcctcccaagtagctgggactacaggcgcccgccaccacacccagttaactttttgtatttttagtagagacggggtttcaccatgttagccaggatggtctcaatctcctgaccttgtgatccgcctgcctcgtcctcccaaagtgctgggattacaggcgtgagccactgtgcccagccaaaataaaataaaattttaaaagttagccaagccaccacacctggcatttttaaatttttttattattatttttcttgagacagggtctcactcttattgcccaggctgtagtgcagtggcacaatcttggctcactgcaacctctgcttcccaggctcgggtgatcctcccacctcagtcctgccgagtagctgggactacaggtgtgcaccaccacacctggctaatgtttgtatttttttttttttgtagagacggggatcttaccatgttgcccaggctggtctcaaactcctggggtcaagcaatctgcctgccttggcctgccaaagtgctgggattacaggtgtgagtcaccatgcctggccctcccccgcctcttatccagcttcgtaccctctgcatcatgcatagggcctagcataaggcaaagcctcccaaaacactgcagacattaatgactttaaaaggcccttccaacaagtggctcctcagattctatgatttgggctcaaatcttccaaaacttcacctagctggatcccaaccatgaggaagtgtgaacccagggagggaggatgctgtatctgcatgtgatagagacatacacacagacgacataccatggtcctgagctagatctgttctttgaacttagcatgattttatatttcagatacgacttctttttctctttattctgagtaattaaaaattggcaaaataggccgggcatggtggctcatgcctgtaatcccagcactttgggaggccaaggcaggcggacaacttgaggtcaggagttcgagaccagcctggccaacgtggtgaaaccccatctttcctaaaaatacaaaaagtagccgggtgtggtggtgggcgcctgtaatcccagctactcggtggggctgaggcaggaggatcacctgagccagggaagcagaggttgcagtgagccgagattgcaccactgtactccagcctgggtgagagggagactccgttaaaaaaaaaaaatggcaaaatgactgcaggaaaaagaacctgaaaacaggatgtaaatataccagatacataatatgggtattactggcagggggatgcctgtggaaataccaacaattctgtcacttagtacatttcagatt

SEQ ID NO: 543 - DNA, 4386 bp, Homo sapiens
ggtcgggaggacgagcaccgagtcgagggctcgctcgtctgggccgcccgagagtcttaatcgcgggcgcttgggccgccatcttagatggcgggagtaagaggaaaacgattgtgaggcgggaacggctttctgctgccttttttgggccccgaaaagggtcagctggccgggctttggggcgcgtgccctgaggcgcggagcgcgtttgctacgatgcgggggctgctcggggctccgtcccctgggctggggacgcgccgaatgtgaccgcctcccgctccctcacccgccgcggggaggaggagcgggcgagaagctgccgccgaacgacaggacgttggggcggcctggctccctcaggtttaagaattgtttaagctgcatcaatggagcacatacagggagcttggaagacgatcagcaatggttttggattcaaagatgccgtgtttgatggctccagctgcatctctcctacaatagttcagcagtttggctatcagcgccgggcatcagatgatggcaaactcacagatccttctaagacaagcaacactatccgtgttttcttgccgaacaagcaaagaacagtggtcaatgtgcgaaatggaatgagcttgcatgactgccttatgaaagcactcaaggtgaggggcctgcaaccagagtgctgtgcagtgttcagacttctccacgaacacaaaggtaaaaaagcacgcttagattggaatactgatgctgcgtctttgattggagaagaacttcaagtagatttcctggatcatgttcccctcacaacacacaactttgctcggaagacgttcctgaagcttgccttctgtgacatctgtcagaaattcctgctcaatggatttcgatgtcagacttgtggctacaaatttcatgagcactgtagcaccaaagtacctactatgtgtgtggactggagtaacatcagacaactcttattgtttccaaattccactattggtgatagtggagtcccagcactaccttctttgactatgcgtcgtatgcgagagtctgtttccaggatgcctgttagttctcagcacagatattctacacctcacgccttcacctttaacacctccagtccctcatctgaaggttccctctcccagaggcagaggtcgacatccacacctaatgtccacatggtcagcaccaccctgcctgtggacagcaggatgattgaggatgcaattcgaagtcacagcgaatcagcctcaccttcagccctgtccagtagccccaacaatctgagcccaacaggctggtcacagccgaaaacccccgtgccagcacaaagagagcgggcaccagtatctgggacccaggagaaaaacaaaattaggcctcgtggacagagagattcaagctattattgggaaatagaagccagtgaagtgatgctgtccactcggattgggtcaggctcttttggaactgtttataagggtaaatggcacggagatgttgcagtaaagatcctaaaggttgtcgacccaaccccagagcaattccaggccttcaggaatgaggtggctgttctgcgcaaaacacggcatgtgaacattctgcttttcatggggtacatgacaaaggacaacctggcaattgtgacccagtggtgcgagggcagcagcctctacaaacacctgcatgtccaggagaccaagtttcagatgttccagctaattgacattgcccggcagacggctcagggaatggactatttgcatgcaaagaacatcatccatagagacatgaaatccaacaatatatttctccatgaaggcttaacagtgaaaattggagattttggtttggcaacagtaaagtcacgctggagtggttctcagcaggttgaacaacctactggctctgtcctctggatggccccagaggtgatccgaatgcaggataacaacccattcagtttccagtcggatgtctactcctatggcatcgtattgtatgaactgatgacgggggagcttccttattctcacatcaacaaccgagatcagatcatcttcatggtgggccgaggatatgcctccccagatcttagtaagctatataagaactgccccaaagcaatgaagaggctggtagctgactgtgtgaagaaagtaaaggaagagaggcctctttttccccagatcctgtcttccattgagctgctccaacactctctaccgaagatcaaccggagcgcttccgagccatccttgcatcgggcagcccacactgaggatatcaatgcttgcacgctgaccacgtccccgaggctgcctgtcttctagttgactttgcacctgtcttcaggctgccaggggaggaggagaagccagcaggcaccacttttctgctccctttctccagaggcagaacacatgttttcagagaagctgctgctaaggaccttctagactgctcacagggccttaacttcatgttgccttcttttctatccctttgggccctgggagaaggaagccatttgcagtgctggtgtgtcctgctccctccccacattccccatgctcaaggcccagccttctgtagatgcgcaagtggatgttgatggtagtacaaaaagcaggggcccagccccagctgttggctacatgagtatttagaggaagtaaggtagcaggcagtccagccctgatgtggagacacatgggattttggaaatcagcttctggaggaatgcatgtcacaggcgggactttcttcagagagtggtgcagcgccagacattttgcacataaggcaccaaacagcccaggactgccgagactctggccgcccgaaggagcctgctttggtactatggaacttttcttaggggacacgtcctcctttcacagcttctaaggtgtccagtgcattgggatggttttccaggcaaggcactcggccaatccgcatctcagccctctcagggagcagtcttccatcatgctgaattttgtcttccaggagctgcccctatggggcggggccgcagggccagccttgtttctctaacaaacaaacaaacaaacagccttgtttctctagtcacatcatgtgtatacaaggaagccaggaatacaggttttcttgatgatttgggttttaattttgtttttattgcacctgacaaaatacagttatctgatggtccctcaattatgttattttaataaaataaattaaatttaggtgtaatggctggctgttacctccttttaaagtaattctgagctcacaacttgaatgccccatttgttcaccctcttcaggagcagaattcaagaacaggaaatgtgcccagagcctaggctgggaatgaatttgtaatttaacctttgtactctttgtaaacctctactgaagagttaagtataaaaattaattaagcagaaagtactctaaactcagctaataccttaagtaatacattttataaactatttatttatttggtaggtacagcttttttaaacacaaaaatagattagataaattccagcttggaacaagctagtgctggttcacaaggttatgctcacccttcaattaaaatcaaaatgactacaagacttgccatcagctctcttcaggaccactgctgggtcagaatcagaaaccttgggtgccatgaaatttttacaaaatttcaaatcaaagccaggctttgcagctagataatagatcacttgagtacgaaccacacatgtaagtgcacgtatatttgagttctcaatacaattaccctgatgggcaagaacccacaggtgagagcagaggcttggttcccctagagggccctggctggaggccccaacaccaaccagacgacaggagggccagactgctacccagtactgtacctcctgctccttcaagagcctccctaagggagaagaagatctatacttccactttgtttgctgcacatgtggcaacaagattgctaccctgatttgggacacttgagagaacttgaaaaaaatgaccacccttaaagccctagaaaaaagttgtatgtttgttaacagctatgctgcgctcactttgcattgtgtgttcttgaaagctctgtataaatcaaaattttgacgacacactaaatacactagagaaatacactatagaggaatccttttatagggctgaagactcctttggtaagaaaaatatgctgcattaggggcagctgcaagtttactatttctggggaagaaaagatcaaagataagagccaggtttgttttttaaagcaatcaatccaaacagtttgggtgtttgttagttgttacccctgaggggcttgaggtgtaactatatcagctataaaaatag

SEQ ID NO: 544 - protein, 644 aa, Homo sapiens
MEHIQGAWKTISNGFGFKDAVFDGSSCISPTIVQQFGYQRRASDDGKLTDPSKTSNTIRVFLPNKQRTVVNVRNGMSLHDCLMKALKVRGLQPECCAVFRLLHEHKGKKARLDWNTDAASLIGEELQVDFLDHVPLTTHNFARKTFLKLAFCDICQKFLLNGFRCQTCGYKFHEHCSTKVPTMCVDWSNIRQLLLFPNSTIGDSGVPALPSLTMRRMRESVSRMPVSSQHRYSTPHAFTFNTSSPSSEGSLSQRQRSTSTPNVHMVSTTLPVDSRMIEDAIRSHSESDSALSSSPNNLSPTGWSQPKTPVPAQRERAPVSGTQEKNKIRPRGQRDSSYYWEIEASEVMLSTRIGSGSFGTVYKGKWHGDVAVKILKVVDPTPEQFQAFRNEVAVLRKTRHVNILLFMGYMTKDNLAIVTQWCEGSSLYKHLHVQETKFQMFQLIDIARQTAQGMDYLHAKNIIHRDMKSNNIFLHEGLTVKIGDFGLATVKSRWSGSQQVEQPTGSVLWMAPEVIRMQDNNPFSFQSDVYSYGIVLYELMTGELPYSHINNRDQIIFMVGRGYDDLSKLYKNCPKAMKRLVADCVKKVKEERPLFPQILSSIELLQHSLPKINRSASEPSLHRAAHTEDINACTLTTSPRLPVF

SEQ ID NO: 545 - DNA, 4093 bp, Homo sapiens
gtaaaaggagccagtcctgggacaagaagaatcagacaacgctggtgtgaaataggagagaagcacagaggtttaagaattgtttaagctgcatcaatggagcacatacagggagcttggaagacgatcagcaatggttttggattcaaagatgccgtgtttgatggctccagctgcatctctcctacaatagttcagcagtttggctatcagcgccgggcatcagatgatggcaaactcacagatccttctaagacaagcaacactatccgtgttttcttgccgaacaagcaaagaacagtggtcaatgtgcgaaatggaatgagcttgcatgactgccttatgaaagcactcaaggtgaggggcctgcaaccagagtgctgtgcagtgttcagacttctccacgaacacaaaggtaaaaaagcacgcttagattggaatactgatgctgcgtctttgattggagaagaacttcaagtagatttcctggatcatgttcccctcacaacacacaactttgctcggaagacgttcctgaagcttgccttctgtgacatctgtcagaaattcctgctcaatggatttcgatgtcagacttgtggctacaaatttcatgagcactgtagcaccaaagtacctactatgtgtgtggactggagtaacatcagacaactcttattgtttccaaattccactattggtgatagtggagtcccagcactaccttctttgactatgcgtcgtatgcgagagtctgtttccaggatgcctgttagttctcagcacagatattctacacctcacgccttcacctttaacacctccagtccctcatctgaaggttccctctcccagaggcagaggtcgacatccacacctaatgtccacatggtcagcaccaccctgcctgtggacagcaggatgattgaggatgcaattcgaagtcacagcgaatcagcctcaccttcagccctgtccagtagccccaacaatctgagcccaacaggctggtcacagccgaaaacccccgtgccagcacaaagagagcgggcaccagtatctgggacccaggagaaaaacaaaattaggcctcgtggacagagagattcaagctattattgggaaatagaagccagtgaagtgatgctgtccactcggattgggtcaggctcttttggaactgtttataagggtaaatggcacggagatgttgcagtaaagatcctaaaggttgtcgacccaaccccagagcaattccaggccttcaggaatgaggtggctgttctgcgcaaaacacggcatgtgaacattctgcttttcatggggtacatgacaaaggacaacctggcaattgtgacccagtggtgcgagggcagcagcctctacaaacacctgcatgtccaggagaccaagtttcagatgttccagctaattgacattgcccggcagacggctcagggaatggactatttgcatgcaaagaacatcatccatagagacatgaaatccaacaatatatttctccatgaaggcttaacagtgaaaattggagattttggtttggcaacagtaaagtcacgctggagtggttctcagcaggttgaacaacctactggctctgtcctctggatggccccagaggtgatccgaatgcaggataacaacccattcagtttccagtcggatgtctactcctatggcatcgtattgtatgaactgatgacgggggagcttccttattctcacatcaacaaccgagatcagatcatcttcatggtgggccgaggatatgcctccccagatcttagtaagctatataagaactgccccaaagcaatgaagaggctggtagctgactgtgtgaagaaagtaaaggaagagaggcctctttttccccagatcctgtcttccattgagctgctccaacactctctaccgaagatcaaccggagcgcttccgagccatccttgcatcgggcagcccacactgaggatatcaatgcttgcacgctgaccacgtccccgaggctgcctgtcttctagttgactttgcacctgtcttcaggctgccaggggaggaggagaagccagcaggcaccacttttctgctccctttctccagaggcagaacacatgttttcagagaagctgctgctaaggaccttctagactgctcacagggccttaacttcatgttgccttcttttctatccctttgggccctgggagaaggaagccatttgcagtgctggtgtgtcctgctccctccccacattccccatgctcaaggcccagccttctgtagatgcgcaagtggatgttgatggtagtacaaaaagcaggggcccagccccagctgttggctacatgagtatttagaggaagtaaggtagcaggcagtccagccctgatgtggagacacatgggattttggaaatcagcttctggaggaatgcatgtcacaggcgggactttcttcagagagtggtgcagcgccagacattttgcacataaggcaccaaacagcccaggactgccgagactctggccgcccgaaggagcctgctttggtactatggaacttttcttaggggacacgtcctcctttcacagcttctaaggtgtccagtgcattgggatggttttccaggcaaggcactcggccaatccgcatctcagccctctcagggagcagtcttccatcatgctgaattttgtcttccaggagctgcccctatggggcggggccgcagggccagccttgtttctctaacaaacaaacaaacaaacagccttgtttctctagtcacatcatgtgtatacaaggaagccaggaatacaggttttcttgatgatttgggttttaattttgtttttattgcacctgacaaaatacagttatctgatggtccctcaattatgttattttaataaaataaattaaatttaggtgtaatggctggctgttacctccttttaaagtaattctgagctcacaacttgaatgccccatttgttcaccctcttcaggagcagaattcaagaacaggaaatgtgcccagagcctaggctgggaatgaatttgtaatttaacctttgtactctttgtaaacctctactgaagagttaagtataaaaattaattaagcagaaagtactctaaactcagctaataccttaagtaatacattttataaactatttatttatttggtaggtacagcttttttaaacacaaaaatagattagataaattccagcttggaacaagctagtgctggttcacaaggttatgctcacccttcaattaaaatcaaaatgactacaagacttgccatcagctctcttcaggaccactgctgggtcagaatcagaaaccttgggtgccatgaaatttttacaaaatttcaaatcaaagccaggctttgcagctagataatagatcacttgagtacgaaccacacatgtaagtgcacgtatatttgagttctcaatacaattaccctgatgggcaagaacccacaggtgagagcagaggcttggttcccctagagggccctggctggaggccccaacaccaaccagacgacaggagggccagactgctacccagtactgtacctcctgctccttcaagagcctccctaagggagaagaagatctatacttccactttgtttgctgcacatgtggcaacaagattgctaccctgatttgggacacttgagagaacttgaaaaaaatgaccacccttaaagccctagaaaaaagttgtatgtttgttaacagctatgctgcgctcactttgcattgtgtgttcttgaaagctctgtataaatcaaaattttgacgacacactaaatacactagagaaatacactatagaggaatccttttatagggctgaagactcctttggtaagaaaaatatgctgcattaggggcagctgcaagtttactatttctggggaagaaaagatcaaagataagagccaggtttgttttttaaagcaatcaatccaaacagtttgggtgtttgttagttgttacccctgaggggcttgaggtgtaactatatcagctataaaaatag

SEQ ID NO: 546 - protein, 644 aa, Homo sapiens; identical to SEQ ID NO: 544

SEQ ID NO: 547 - DNA, 85094 bp, Mus musculus
  misc_feature (1)...(85094): n = A,T,C or G
gttcagtgagacaaagtctcactcttccccaggttggcaacacagtgattgtggcaattgttttgcttaggcttcccacctgctgggtcactaacagccacacctggtttaacagactttacaagtaacgatttgcagtagtttcttttgttctggaccctgtctgcacgtgggtgcaagcaagcatgtgtgtgtgtgtgtttgtgtgtgtgtgtgtgtgtgtgtgtgtgcgcgcgcgcgtgtgtgtttcacatgtgtttgcccttgtgtgtggagaccagaactcaactcagcatcattcttcagatgtattttctttactgagactggtgtctttgactggcctgaagctagctagccagcaagtccatggctttacctgcccctcaagcactggtattacacattacagctctttttaaacagtagctctaggaatgaaacacaggctcttgtggttgtaaggcaagcagcactttaccaactcagctacctgcccggtccctccacttgttttttgttttgtttttgtttgttttatgtgcattggtattctgcctttatgtgtctgtgtgagagtgtcaaaacccctggaactggagtaacagatagttgtgagctgccatgtgggtgctgggaactgaatctgggtcctctggaagagcagccagtgtgcttaaccttagagccatctctccagccccacctccatttgttttaaagaccctggctggcctgtacttattatgtacataaggctagcttcaaatttgctgccctctttccacctctgcctcttgactactacgattacaggtatacaccaccatacctagcatttcctttcagttaaagtctatcctcctgtgtttgttttgaaacgtagtctcttgtaacttacgcttccctgcctctgcctcccaagtgctgggcttacaagtgtgcacttgggcagagagttccttttcctgcacgttctcatcagcaggttaacaccacatcagacagagtctcattgtcctttgacatacatttccttacattgaattaatacactgttagaatttttatatgaaatgtttctccaagattcatgttttgaacactttatcctcagcaaggaccatgtgggttctggaaattttgggaggtgaagcctcattagaggaaagactcactggaaggaagcaggtcccgggtaccttctttttgccttttctctgtttcctggtacccagatgtgaccttctctccttcaccaggctgtctatattaggcagggttctcctgaaaaccagaacagatggattgtatgtaaactataaagggatttaattagaatggattacaacccacagggctgtatagtccaacatcatccacgcacacgctgtagaggctgggaagccagtagctgttcagtccgcaaagctcggggcctccacagtctcagtctggctgtggaggccaggaggggtcttggagaatcatgtgtcctctctcagttcctggtggaaagctgaagaaattgcactctgctgtcaaggaaggattcacgaactcaccagccaccagcaaaggcaggatgagcaacaggctttttcttgggacttctttttatgtccatcagaaggtgctgccaactctgtgggagggtctttcttcacccttcatataagcttctgagaatgccctcacagacctgcccacaggcacgcctcttggttgattctgagtcctgccaagctgacaatcaggactagctatcacactcttgattagctcctacttctgaacctatgagacaaaattagtatttcctttttctcccaggtatcctatcaaagcagtgagaaatgttattaacgtacctgctgcatctcacaaatatgtagccggccaggtgtggtggtccacacctaccagcccagaacgtgggaggcagaggattgctgggttgcagagtgagcccctgaatcaaaaacaagaacaatcaaccaaagctgaacggtcaaaataacaatcatcttgcctggcagttggcaacacacacatttaatctcagcactcaggagtcagagtcaggtggatctatctctgtgagttcgaggccagcctggtctccagagtaagctcaaagatagccagggctacacagagaacccctgtcttgaaaagccataataaactgtcatcatcatcgtcaatatcatgtttacaatagcttgaaagtcatctggaaactgcagcatttccagatgggcttgatccacaacgattgagaccagggctaagttaaatatgaggaaggaatcatcttttgtgctcactgtaaagcactgtgcaggggaggcccagtgagagggaaagaaatcacaagtgtgcctgctgaaatgacaaggaaaggtactcagagccaggtctcacagagatcacattccaccacggtggtcaccaatgtcactgaagctccatctcagacccgagggctccgctcaactgacttctgcttcaactccagcataagcgtcttatctggcctagtggtctagacgtcaaataccactatttttattgttagggtttttaaaaattattttaaaatgtttcttttacttttgtgtgtataagtgtcttgtctgtgtaccatgtgtgtgcctgaggcccagtcccagcagaggtctggtgagggcactggacccctaggaactgaagatatggacagttgtgagccatcgcgtggctgctgggaacccagcccaggaactgccagagcagccagtgctcttctctgctgaccctctctgcagcaccctcgttactttacatcattcgcttcatttctctctcttttcatctgattttccccaggggttccaagtgtttcagtccaaggaagggctctcaactttgtggctgagcagagaagaggaaagggcttctctcaagcgaagacccccgagtgttcgtaagcttaagaagctggttcatagagctgtgtattatgtggcttctctcccacaacttgatacaggtaagtcagcggatgaagagattgcctgtcatttaatacacttcaggagggaagggtttaagagccgagctgctcctgtttttgacactggatgcgtctcaggagccttgagatggataggtgtgctgctgtgactttagtttcccttagattagagggttcactgttgaagtctccccaaagatcaactccaggaaagacgacaatgtctccagggttgtggaggttcctgatagactaaaaacttgtagctattcaagtttctctcaagactgaaaaccattcccaatgttggcttccacttactcttatctgggtgacaggtcaagctggacttcttacctctggaaatagaggaggttttagggttcccagagaattactgaagagagagaaatcctgtttccatcacttatggcctgagcattccttgttgcagcaaggcagtgacccactgttaggttctgaaagacttaaacacaggccccactgcagtgattgggatggcttctgtctgacccagtgtcagggactcggtccaaattcctggagcattgtgggtgtttggtacactgagttgtaactgtgggtattccgaaagaggatagagtataaaaggtgaccatggtgaagcaagagccaggagagcagccaagcccagaagcggagaaggagcagccaggctggatgaaggttaaagccatcaggtggtgacaaatcaatgaagcagttgtctctagctcaaggtgaacacctgtaatccctactgaaagggctgaggcaagtggatcatgagtctgagcctaggctgggatacacagtaagtcactgtcacagaactgagaggaaagggaaaatcaacaacagaaaatagagtaggaggaagaggaggaaagcaagcaagctgacctgctatcccactagccaagggcatcctaaggtctccaaggccttggcctatatgctctctttcctaagggcagggcggggaggggaggtcccagcttgttacttcatcttaaaatttccaattcccctttgaattttgatccttttgtttccagacagggtgaaggacccaggctgcaggtttgaagttctttgttctaatttcttctgactccactgctctcaggaaaaaatgggctagacttcagtgaacaggtgtgaggtctgggaaggggcctacagagtcaccctatccagaaggcagcaggactcagctccatcctgtttccatcacttatggcctgagcattccttgttgcagcaaggcagtgacccactgttaggttctgaaagacttaaacacaggccccactgcagtgattgggatggcttctgtctgagagaacagcctcggcctcagtgggcatcagaggagcttccgatgggttctgcaactccgggaggactgttgactaccacttgggcatgcagagagggagttcaggcttcagagaagggatttcaaagcgctaaataaggaaaaaggttgaagattttgtggaaccctaagcttgtacaatttgaaaaatctactttctagaaaacagcttacccaaggacttcaatttttaaatgctgtaaaacaagttctggagaacttactgggctcttaactaggcctcagaagaagactagggacctattgcctgagcttcaagccagtggtttgacactcatgcacttagtctgcacctgcgtcaggcttctcctgcaagttggctaagagtgtgcctgtggttgtataaccccattaagatgaagacagggaaggctcagcatcctgtgtgtcttgtggccaagccaagcagaaggtgcggtatgagatggacatgaacacactaatttgatgtttcatttcgtcactgaatattctctgtgcctcagaggccaatacacaaagaaacaaacaaatagactgagacccaggtccttccctcaaggaggtcattgcttagaagcagtaattatccctaaacaatgtgtagctaaaacattcaacagagatcactagaaggacatgcatcttctttagacaagtgtaccgagaaagctaaaaccccagcacatgtgcaggagcagacttggaagacgggaatgcatgagagccttggaactctgggaggagttgggcatcaactggcccagcttgttttagaccatgttccaagaaatccctctgtcctgggaaagcaggggtcaataaagaagagacaataacagatcccttgaaggaagaagaccatcaagacctcttggctcagatctgaagcatcgcccatttctctgtggaatatgaaggaatggtgaccttctgacttagctctgggatgtgtgtcccaagttcctttggagtgtgggaggcaggtacatgagttctaactctgggcctgtggtaagaggataaagtgtaaggagtgatactggtggggaaagagcctgggagaacagccaagcctgggatctgagaaggggcagctgggccagatgcaaggtcacggcagaggttatttggaagtcactgagccccatgtgctgcagggattttccactatgggcatagcagggtgagaagtgctggctgagaatgatgcacctgggagacacacaggatctttcatgtctccacgcctcttcaggcagcagtctgccctctgaaggtagtggttgcttttaaaatgagtcctctatgtttaagttccctgacaatcaatatctgaacttggggggggggggcaaaatgttaattgtagctgtgcacagaggtgcctgccaataacaccagcacttgggaggtacaagtaggaggaacaagagtgcaaagtggccgggtgtggtggtgcatgcctttaatcccagcacttgggaggcagagatagacggatttctgagttcgaggccagcctggtctacagagtgagttccaggacacccagggctatacagagaaaccctgtctcgaaaaaacaacaaaacaaaacaaaacaaaacaaaacaaaaacaagagtgcaaagtgatccctggcaaggtggtcacttcaaggctagcctgagttacatgagaccctctaaccctgtttcttagtgtctattgctatgaagagacaccatgaccaaggataaactcataaaatgatacatttaatggggactggcttacagtttcagaggtttagtccattgtcagtatggttggcatgcaggcagacatggtgccggagaagtcgctgagagttctatatcaggatccatagggaacaggaagaaacgcttggcctggcatgagcttttgaaactccacagcccactcccagtgacacacttcctccaacaaggccaagccccctaacccctctcaagtagtgccaccccaattactaagccttctgagcctatggggtttttatgtttgttttttatattttttagacaaggtgacagatccctggctgacctggacttgctttgtagaccagaatggcctcaaagtcaagagattagactgcctctgtctgcacagtgctgggattaattaataatgctcagaaatgagggccatacttattcaaaccacgacaccccgactcagaaaaccaaaccaaaccaaccaaaacaaactgttctcctataagaatctacaggctctttctgttgctcttggttacccactataactagatggaaagactcttgatgaaaaaaaaatgtatactgtagtgtaggtttcaagctagactgatctgagaacttcctccctgccagttagctctcatagtgatgggaggaaggagcttttcagactgctggaggagaaaaaaaatcatcaatggtataacctcacagtgaactctgaatgctacagcaccaagatgctaggcaagaccaaatggtaaaagtgtggcatgaaggttatggaggtagccacctgctgattggatttgtggcctgcatcacaggaaggcattcatgtgtgacattataaatctgggccaaaaagctcatggctgtggaaatcatacagcctagaggggaacctatgactgttgttttgctaaatgctcatgttctcagactgccctccaagtgtttatatttatacacagagactaatgttgctttcagttttggccaggcaagcttctttatgtagtgggcagcagtcaaagcaggatcataaactagtttttttgtttttttttgtgtgttgttttttgttgttgtttgttttgtttttggagacagggtttctctgtatagctctggctgtcctggaactcactctgtagaccaggctggccttgaattcagaaatctgcctgcctcttcctccccagtcctgggattaaaggcgtgctccaccacgcccggctgtttttttgtttttttttttaaactgaaaagtgactgttgtgctcagccctttctccccaggctcaggtactccatgaaaaagagcagcagaaacaatgcaggagtgtgaggattgggagaacaggtaggcgtgctgtgaaatgctgcctcttggacctggcatggcttttgcccctatgacctcactgcggctggcgattgacttgcacaacatcaagttaatagtccagcggcagcactaattggattggacccactgggttggggagggcagtggggacatgtttcaaggtgtccaggggaagtaggaagggaagattgagggtgaatacgaccaagataaattgttggaggtggagagttggctcagaggctaagagtccttattgcctgtgcagaggtcctgggttctattcccagcactcccatggcagttgacaaccatctataactccagtcccagaggctttgatgccctcgtctgacctcccagagcaccaggcacacatgtgatgtacatatatacatacaggcaaaacattcatacacttaagaatgttttaaaagatacattgtatgtatttatgaggttaacaaagaataaatgatattctaaaaaacaaacaaacaagcaaaaaaacaagttttcttcaggtgacagcatttgtcaaggtttcaaatttgtttgaaattggaaaactgtgcttgacctgttggcgcattgctataattccaatgtgaggcgaagtcaggaggagtggcttgagttctaggccagcctctggtacactcagactctgtctcaagagaaataaaacaaaaatgagaaactttttaaaaactctagactaagtattttttaagatctgctctttcacactttagaaactgctgatgtttgaccttacgaaaatgatcacaaagtcgcagagtataaaacccccaagaaatacctctgtgagaagtacaccaactgttaacactgcctacactgaacttttcttagttgtaagcagggaaactaatggctaactgtatgaataagcttgactaggttacttgtacattgctgtgggaggtgtagtttagatgtgattgacatttaaatctgtatccccagtaaagatatcacacacacacacacacacacacacacacacacacacatgactgagcttcccccgattagttgaacaccaggcaagctttggaaaagggcaaaggcaagcttcgggaaggaggaaatcaaaactgtaagcatggaagtgtgccttcttttccaggctgccagcaggccctacaagtttctaagcttgcctggacctacaaccaattctttaaagtttctttccctcaggaactgggagagatagctccgtaggtaatgtgcttgccagtcaaacatgaggaccagagtttggtgcctattcacgacaagagcatatagaatcctagggagcctttggtcctagtaagagattgccttgaggaacaaggtcaaacttcagttgtggctctcaggttctggctctgccttccctctggtatttgtacagtttcagtttctcaagagaatcggacagcataggactattagtcatgcatacaacgctggaaagtctctctctctctctctttctctctctctcacacacacacacattcatgcatgaccaattggtcaccaacgatatagggcagacctgtgccagatggtgcaaataggcattgctgtgtagagacagactattaagagaagccacaaacaaacaaaaataaatatggtgttcacagtcaagcttcaagtgacaacccaaatccaacttggcaaatctctgggaagcaagtaggctaacagagtaatataaacaagaaaatattcctttaagctgataagctacccacaaaacattctcacgaaatttaaactttgtgtcgcggcaaaggccctttagtgccatacaaaacttggacatctattcatcgttgtgtaatacatgcaagcttttctgggaagacttcatgaggaacctcctatacttttgaatgtcttcccacggactggaaagatggctcactggttaagagcactagttgctcttgctgaagaccggggtttggttatcattgcctacatggaagcttgcaatcgtcggaggtcctcttctgacttctacatgcatcaggcacatgtggctcacacacataaatacaggcaaaaaactaagtgaacatgaaaaaaagtttaaaattttttcatctcacttgatttttcctaacagatattcgtaaaaaagtaatctgggctagaagggaactaaaaagtttcaaagtaacggtcgctgaacggtgacatccagtacagcgctgcggtaaacgccatctttgccaaattcccacgagctgctcggcgcgctgccctgacgtcacggtgctaggggcggagcgtggggtagcaaggcttcccgaaggggctgaacgaggcggggcggggtcttgtgaaggggcggagcctaactcgtcgaggggcgggacagggcgcggtgtaggaggggcggggccgcgagctctccgcccggggtctggcgtttatagctccgcgctggccggcccgtggcgactgcagtgttcggggtcgcgatgtcagggcagcaggagcgtgcagagcggcagcgagaggaactgagcgcgtcggcctcgccgccctcccgcttcgtgctggggctggacgtgggcagcacggtgatccgctgccacgtctatgaccagacggcgcgagtgcgaggctccagcgcgcagaaggtgactaggcgcggcgggagggtctcgggatctgactgcaccctagctcttcctgcacctctggggggctcgggccggcgtggcccggtgtctgtctctcgcttcctgtcccgcgggactcagcgctctagctttacctgggtggaaccgaggtgactctcggggcagcgcgggcagattgtgtatatgtggacagaaggtggttagtgatttgcgtggtttttctgcacttcctcgtcgaccttttatgccttttagctcttcagattttgatggaatataaaactgtgggtttttttttttcggttgtgttatttaaacaattcgttgcatttattatttgtgtatctgtgtgtgctcgcgtgctatatggcacacatttaggagtcagaggacaactttcttgggcatcggttttctccttccaccatgttggcccggtccctaggattgaactcaggtcttcaggcttggcagaagtacttttaccgccaagccaccttactggttgcgttcgtaaaagtgctaggtcctcacattaacatttaacttccatggatattggagacactgagcacattttgaaagctttgttatccttatttctttccatctttgagaattcattaaaaagtatcttctggcttgagaagcctgccaaagcattggttggtctttgttagcaaagccttaaacctcagatgatactagttaacagccaacccccattttaataaagcgctaatttctatacagtggtcaatgcagttgattgagtgtagtgttcttatttactcctttaaatactagcattttctaatgtttaaaatattagcgaagggatatgagagccatttaacttcttccttacagcactgggctccccccttttttccctgtgctatcctacatcgactagggtaaaagttaagtagtgactgccttaagaatttactttgaggaaatagactagacgttcccttcagggatctgagctaggaggtgagttgcagcaactgcgctgctcgctctctctctggccagctgtgtcggaacactgcccacccactcagtccatccctgtcccaacctttaaggacaggtctaaggcacatactgagctcttgtcgtattgcaagtctttatcacaaacacaacgatacttcttagtttttcttacaattctagtcacaaagtacttttgctgaaacggtgcattttaaatttttttttttaattaaggaatgagagtttggttcaggaaggagatggctcagcaggtaaagaggacttcccagtcctccctcctaagcttggatccctgagatggacagggagaaaggagagcataggttgccctctgtcctcggcactttaaactggcacaagtgtgctccctaccctgaagtaaatatgaaatttgataaatttttaagaagttggtaggcaatacagctgcatagttgttgcacaatttaaggaaatttgatttttagaaagtattggggtttggtggtacatacctttaattccagggcctgggagatagaggcagatgggtctctgagttcaaggccagcctgcctggtctaccgatggagctctggctatgtaaagaactgtggagacgatgcctgggaactgatgggaagaacactgtctttgggatgctaagcatggtcttaaaccgtgatagctgatgtcagaacttaagggtgtgcttctgggcagataactacatacaaaaataagttatagtggtttttgtttgtgtttgtgtatttgtggtcttaagatctctctctgtatccaaggctggtctggaactctctctgtagcataggctaggttggaaataggtatctgcccaccccatcccatccctgctgagacaccactagtctttgcttatgtggccatttaaaaaaataattttatgtctgttgtctctagtgataaaacatggggtctttctttggccaactttctagaaacttaatcgtgcatcagattgttagtccaagcacactggcctggcatgtgcagtgccctgggcgttacttccaaccaacaaaaagataaggaggcgccttctgaggctgtgctgcagagagctgaattcattaagaataaggtcttgctagtctacactgtcgtttagcactttaggacttcatgggtggagagtaaatgatgagagtaaatgccggcctagtggtgcacatctttactcctcgcgcttggagggcagaggcagtcagatctctgtgagtttgaggctagcctgttcttcatagcagattccagggcaaaccagggctgcacaatgagactctgtctcagaatcaaaataattaaaatgctaggaattcagtttacttcatgggttctggatgtagccttctcagtggaagttacaccccttcttgtataatggaaagattgttcataaaaacctaaaatcttagtgtaggaggatttgattcatatagccaaacaaggcacatggaaaggaaataaaaagggaaaaagagaccgtcctttgggtatgtgagcaggacgggcttccattatctttaagttaaaatttaaatccaaacgtgaaactttgcattcggtttgtaggaagctgctcaagactccagttattttttttcccattttttgtggtgatgctggttctatcacaaacacacacacacacacacacacacacacacacacacacacacacacactctcacacacacacacacacacacacacacacacacacacacacacacacacatgattctgcacatcctcaacctttgtaactttaatccctccacccccatggtgccattgagatgtaagggtactttgccaccaagcctggtgacctgagatcaattcctgggacccaggtgcttgaaggagggaactgactcatccaggttgacctctgaccttctcacgtgctctgtgccaggtatctgcacacacaaaatactaagacagtctttatagtggacagttaaatgttattgttaagtgttagaatgcgtggcccatatctgaagccctcacaatgtgtattgatgtgattgttttggaaactggagaaaactcatcgtgttctttcccagaaggacgtcgtgctactatgaaaaccataaaatgtgatggtgggaagaacaggatagaaaggctcagcacagaggcatcaaggcctccagcattggcaagctgtgttcactcttgaaaaaacaggctctggcttttaatcaactgaagatgctttcttcttgactttcactgttttcttctgttttggcttagtcctcttctgttgggggcacatttctcacgttacatggttagggtttccagtggtttgagcttgttcccagggattaactgttagaatcttagacagccagggtggtgtttcctggagctatagaatctgtaagaggtgggttctagggagagatcgtaggggattaggtgcttccttgttttgcacccaagagatgtggtaactgcaggaacactgccttcctgctctctgctcctgtctcttcctcctacttcctcattcctcctccctctcctctctccttccttcttcctcctcttcccccctcctgtccctgtctgttcatcctctctccacccccctccccactcccccaattcttgtgacttcaaactcttggcaatacttgtccaagactcccaagtgttcgaatcatagaggtgtgccaccatgcatggtggctatttcttgtgtgtgtttggggcacataatgtttccttccaccatgatatgatgcagccaagggaggccttgctgaactaagggcccggggtgtgtgtgtgtgtgtgtgtgcgcgtgcgtgtgcgtgtgtgcgtgtgtgcgtgtgcgtgtgtgcgtgtgtgcgcgtgcgtgctgtgattctgaactatcaacctccaaaactgaactataaaaacctctgctgtgggctggagagatggcacagtggttaagagcactggctgctcctccaaaggtcctgagttcaagtcccagaaaccacatggtggctcacaaccatctgtaatggcatctgatgccctcttctggtatgcaggtgtacatgcagatagagcactcacatacataaaataaataaagatcttaaaaaacaaacaaaaaacaaaactggccaggcatggtggcgcatgcctttaatcccagcacttgggaggcagaggcaggcggatttctgagttcgaggccagcctggtctacaaagtgagttccaggacagccggggctatacagagaaacactgtctcaaaaaaacaaaaaaataaaaaaaataaaaaaaataaaaaaaaataaaaaaaccaaaactggtgaaaatggacatggcatgcgctgtccagcagtgtaggcgacataatctgaagtccaccattaggtctaagggcttggaggtttgaagcaaggatacctacatgaagttgttttgagagagagaatttgttgcagttgaaacattctagcataattagaaaagcctggcaaagttgatggaagggaagtagatgttgttaaacttgcttcctaggggcacaggggagactagcagacgtcaaacccatcaccttgtaacacaccaggcttttcaggtctcatcttgaccacttcctccatgttggacagtttcttcaaatggtacttctggtgggcttcctgctcatctttcagtatctaaagcactgatctctggctgttatttgtaagatcagcctctccagagagtgaacctagcacctgctgccggttaaggagaagcagcagtgtggtaaggggcttcggggagcctcacatagactttacccctttccagggcccagccagcctagaacctctgctctctgctatgggctcttctcagagtctgagtgactagcacacacccccttcatctctgcagtgcctgtaaagtcggaggcactcacagaggctgagggaaagaaatcggggagacaccttcagtgggcgctcctttctgaggagaggtaatctgactcaggtctcattctaaggaagtgaagtggggtgaagggggtgaactaatccacgcggggcgttgtcttctgtgtaaagctttcccacctgcccattcttagctcacattaacaacatttgttaaatccactctgatcctctttgctccttctctttgttctcattctgatgcctttggaaatagggtctgtttgtaatccaagctgccctggaactcaaaacagacctcccgagtgcccggatgacagacaggtgtgtggcccatacctgcttatctttatttttgtcgattttcttttatcggagtcttgaaaaatatcggggataaatatatttgtttaagccatcagttaaattttaatctgtaggctcttaaaaacattttcaaagttaattttaagattttcatttatgtgtctgtatccttgtgtgtgagaatgcacggcccatgcacgccagtgcccgaagagtctagaagagggcctcagattctcaggagttggacttgaacatggctgtgagctgcctgacgtgggttctgggaacatctataggagattaaccccaaaactccttcacacactgtgaccttattggcttcccaccagtacctcactgagtgtaaccacctgtctcttctccgtatatagttttgtcttctgaagacatcatataaaagctgagtgagggactgggggtatagctcagaggatattgtgcttgccgtacaagcgtgagaactggagtttggaccaccagcacccgtgtttatattaggtgggcatgacagcccacccatgatcccagtgcttgggtgggggagacggagggtcctgccactaactgcctagctagactagtcgagtagacaaaccccagatccaagtaggagactctccctcgatgtccttcttgcataattagtgttaaccgcctacctcacaggatctaggaccgtccaagaatatgccactggccctggtcctgaggggtatctcgattaggttaaaggttgcggaagcaccgtcttaactgtagatgggaccggtccctggtcaggggaccctggcctgtacacaatggggagtgtaagcagaacactgatctctgttcctgagtgtgggtgcagtgtgaccagctgcttgaagctccagccaccttggctcgtccagcatcatggaccgtgcccttgaactggaggccagaagaaagcctttgtcttttaagttgccttaaatttagagaagggaagcagctcctgtgtagctgggacaggtccccagaaagggtgacccttctgttagttttttatcagggcattttacaatggcgagaggcaaaggaggaaggatctacatgtgcacacatgtgcaaatacacatgtgcacacgtgtgcacctgcacacaagttggatatgacagtgcatgctttaaccatgggggctgaggcaggaggggcaacacgaggtgtcactctgcagcctgccaccctcgcaatgtgccacggtaaacatttctttctattgggattaaaaggaaagagaacaacggagaaagacatgtcctatctatacagtaagacctgtcagggccgagttattcagctgatagccttttgagatttgctcaggctgtgtgtatccacagctcattcctggtttgatggtttgttttctgtctgttctctggggtgggtgtgttggcgtatgtggcagatgagtgtttatctttttttttttttaaagacataaactcatcatgtagccctgactggcctagaactcactatgtagaccaggctgccctcacagaggtcctcctgacactgctttctgagtgctaggattaaaggtgccattatgcctggaaagggatgtgtattttagtaagaatttgttgagcaagggctgtgggcacacaccctgtagtcctacacttggatagctgaggcaggagaattactagttcaacgtcatcttaggttaagcagagagtttgggcccagcctgaactacgtgtgagaccctgtctcaaaacaggtcaaagcacatcacagcaccagcagcgcccaccccacgccccaaacccaggccttttcttgatcggctgtaccaatttgcgttcttactagcagttcatggagacccagttgttctgcctatccgtcagtatccgtaattgtttggcttatgtgtttattcatatttactactttctttttttctttctttctttctttctttctttctttctttctttctttctttctttctttctttctttctttatgtgtgtgtgttggctcagtgccgtagcgctcatgtagatgccagaggggcagcttcatgactgtagttctctttatacttttatatgaggcctgggaatggggcttaggcaccttctgctcagccacctggccagtgaccagcttattactattattattattattaatctgtatttatctacaattagtggtaacacataggtcttgttttttaaaatactgttttagagttttaaatttttaactcatgtgtatgggtcttttacctgcatgtatatctgtgtaccatgtgtgtgcagtgcccatggggaccagaagggtggatgtcagatcccctggaactggaagatggatgtgggctaccatgtggctgctgggaattgagtcccggtcaactgtgtagctagtgctctttactgctgagcaccttccagtcccaactggtttctttctttttctttattttgtttgttcgtttgtatttatttatttaaaaatttggggcagggccttcttaaggagccctggctgtcccataactcccagatgtaaaccaagttggctttgaactcacagagatcctcctgcctctgtcttcccagtgctgggattgaagacatgcaccaccacgagtttatttaccatccatctccttttcttggcaagtgcttgttttgctgctttgcgcgtctttttaatttatttttggtcttgttttgtgcgtttttaattgggttgtttatttgcttgttgtgccttctttctatatttggaatccaggtcttgtgctggtagtcatccgcggctattttctactaatgtgccctttataatttaattctcttttctttcttccctctccctgcccttccctctctcccctttcctgtcctctccttccctccccctccccttccctcttctttcctcccccttctttctcctctctctctcctctttttctttcccttccctcctctgattttatgacacgggatggtcttgaactatccttgcctttgggagtcttcctgcttttgcctcccaattactaagattatggcctgtgcacctcccacgccgggaacactcattttcttaagagccctcttgccttttgttcgtctgtttgtttgttcatttgtttacttagtttttttaaggaaagatctccctgtgtggtccaggctcatctacagctcttgatccttttgcctctgcctcccacctgctgggatcacaagtgtgtggcactgcttggctctagttctaaatttcacatatgtgcttgtgtgtgcaccatcaagtggccaggcagggaactgggcagtgatctgtccctttgtgctcctaggcttttagtttgcttttcaggaacacatcccgaccagtgcagcttctgtgtgaacccaggatcaatccacaacctcctgggcgataggcctccctagtcatcttttttttctttcttttctttctttcttttttttttttttttttcaattgctgttgattttgagacagggttttgctgtatagcctagggtggcctggaactcacaatgtagctgagacagttgctactctcctgctgtttcggcttctggggtacactggcatagctgtgtgctattttgtttgtttctttgtttgtttgttttacacaattatgtttttgttttttgtgggtgttttgttttgtttttttgagacagggtttctctgtgtagcccctagctgtcttggaactttctctgaagatcagggtggcctcacagaggtctgcctacctctgcccccaagtgctgggattaaaggcaggtgccaccaattacaaaacatctccattgtagaaataaatgtaaagctaaaataaaatgtaagccctctatagacacctgaatgctgctgtgttggtggatagcttttatttcagggttgggtggggaacaaacccacggttttgtacacacccggctctcttttcaaacagtaaggattaattacatgcaaccatgttacttattttaaccagtattttaagatgccagtattatcagctttgtctaatgccattctcactaaattttgttttcatgaataggtagaaaatgtttaccctcaacctggctgggttgaaatcgatcctgattctctctgggctcagtttgttgccgtaataaaagatgctgtcaaaggtaatggtttacaaagagactgtcgtccacagtggacttcttcctgatgaattttccacggattttgaggattactaaatttataatacatacactaaatgtatataatatatatgaccttttatatatcatatatatcacttatatatgatatatagaaatatatatttataaatatgaataaataatagacatacaaacatatttttaaatgtcacacaccaattgtatttgagatcagtttaagctgcttaggagactctgccttaaaaaaagaaaaataagagggtcaagttattaagagcacttgctgtgactttagaggaaccagtctggcttctgagcaccaacatctactggtttaccacagcttgtacctccagcttcaggaatccaatgcctccttctagcctctgcaggtgacacatatatacatgttctgtttgtttgtttgtttgttttgtttttgttttttgagacagggtctcagtatgttaactctgttgtcatggaactcactctgtagaccagactagcttagaactaagagatcaacctgcctctgtctcacgagtgctgagattaaagatgtcagccaccactgacagcctcatagtttttaagtagaaaaaaaaaaagctgggtttagtgtaataagaaaattgcaaatttaggggcggggactgggttgcttttcccttttgtcttttgaggttttaccatttcagaatttcttttatgaattgtaagaataaagagttggtggatagttcagagatagaacatatgcttagcacagtgccctgcttgtagtcttcaggttttgtttgtttgtttgctggtttgttttgtttttttaaagccaaagactgtactgtgaacatgtgtctattcctcatagttagggttgtcagtgatgttaccaactctgaccaaaaaagcaacttgggaagaaagagttatttcatcttacagcttagacgtcgatcagtcatcactcatggatgccagggcaggaactccaggcaggaactggagcagaggccttggagcgagcagtaccgcttactggcttgcttctgttggcttgttcatcttgccttaaacacccagcacacttggccaggcatagcactaccacagaggactggatccttccacatgagtcattagtcaaggaaatatcccacaggcttgtctaccgacaaatctgatggaggcattttctcagttgagagtctttcttcttaggtgacgctaacttgagttaaatcaacagactaaccagtgcaatagagaagcataggtttgctttgtttgtgattctcagcaaacgtccccggctgggttctttggccaattgtgcctaaatactacaagatgatctcacaggacagggacacttgctgtgtgactaagaagagtccttataccactcaggaaatatacagtaaagccacttccagaaaggcagtggtggcgcacgcctttaatcccagctaccccggaggcagaggcaggcagatacctaagagtttgaggccagcctggtctacagagggagtttcaggacagccagggctatacagagaaatcctgtctttaaaaaacaaaaaagagaccaaaccctacttcccaggattctcttacctttattttaaagaactttattttcggtctagaatatgagctcatgtgacatttatatagctgccagtctgtctgtccatctagagcttgctctttttttaatatttatttatttatttatttatttatttatttatttatttattatatgtaagtacactgtagctgtcttcagacactccagaagagagcatcagatttcgttacagatggctgtgagttactgggacttgaactcaggacctttggaagagcagtcagcgctcttaaccactgagccatctcaccagcccccgagcttgctctttttgagattgatagttaaatttaaaaaaaaattaaaaatatttatttattttatgtatatgagaatactgtcactgttttcagacacaccagaagagggcgtcagatcccattacaggtgtcagccaccatgtggttgctgggaattgaactcaggacctctggaagaacagtcagtgctcttaaccactgagccatttctccagtacccttaagatttcttttttaaagatttctttttcttttctttgcataccttcctgtatatctgtccaccctggctgtgcctggtgcttgtggaagccagaagaggacagcgttctctgtggaactgaagctagagattccagttgtaagcctctgtgtgggtgctgggaattgaactctggtcctctgaagaacagctgtgttgctaaccgctgagccagctctccagctctttttttattgacccttttcaacagtccagctcagtagactgtttcttattttgggttgtcttattcttcctgattagagttaggttaaacattttttggaagaaatatcaatctgggaggtgacacatttttctctgtcctcacatgaattgattttaaaagaatattacaggctgagtgtggtgatatgccatgggatgccaacacgtaggaggctaaggcaagagaattgaggccagctagcactgcattaatgaaacctagttgcaaagaaagaaagtggtttatatggaagtggtttataatgttcgttataaaaacaacacattttgccgggtgtggtagcacacgcctttaatcccagcacttgggaggcagagacaggtggatttctgagttcaaggccagcctggactacagagtgagttccagaacaaccagggctacacagagaaaccctgtctctaaaaaaccaaaaaaaaaaaaaaaatcccaccacatttctaactcaggaggccgatagatctctgtgagttcaaggccatcctggtctacatcatgtattccaggtcagccggtgctacatagtgagatctagtctaaaaacaaaacaagaccaaaaaaacccacatttttttattttaggaaatttggttgaaaaagctcatgctttggtcttaccctatacttattgattgtttacccagcatgctcgaggccctgggtcctattcccagtagcacgaaagcaaaacagaaattgaaaaactgctctgagcataaaagcacatgtcacgtggaagcctgtgacctgagtttgatctctggaacccctgagaaggctgaaggagagaactgaatgcacatgtgtaccatgtgtcgtccccccccccccccgtcatatagcacagtgacaacagcttagtgggtaagggtgcttcctacctactcttccagaggacccgagttcggttcatagcacccatgttcgatggcttaagacggcctgtaactcaagccctgtgggtgccggatccctctccttctctggcctcctcaggcacctgctcacatgtggtgtacacacacacacacacacacacagaggaataaaaataaatctttacaaagtaacaagaaccaaactccttaatgtcagcttagtggagggcccatgcctgtccttccaacagtcagactggtggagcaagaggattgctgcagggctaaataatgagattggggccagcctgggctacagagtgagctttatctcagaaaagcaaaacaaacaaaaacaagctcatgtttttatttctatacttgacatctgtttgagttgaaaaatatgttctcaaattcagtcattatactaatttccgtggagattttaattcaccatcaccaggcagcttctattataattggttattggctaaattaagatctaggtttttagtattattaggaaaaaaattagtgtgattgatatttgggttttttattttttgttttttatatttatttatttttatcttattttattggcattggtgatttgcctgcatgtgtggaggctgttggatcccctgcaaactggagttacagatgtaagctgccttgtgggtactagaaactgtacccaggtcctctgggagaacacccagtgcttttaaccgttgagccgtctctccagccccaccccattttaagttttaaaagggcagtttttgttattactagagtatctttttttcttttaaatatacataatgcaaaattatcttagttctgataacaggactcagacattgttgtcagaggttctatgctatgtttacacagttaaacgtcactgggttttaaacatgccttatctgtctttaccttcagctgcaggggtgcagatgaatcaaattgtcggtcttggcatatcaacacagagagccactttcattacatggaacaagtaagtgttttgtgtggcctacactgcctcagggattggctgctgggggaacctgtctggggagttttcatttgtgaagaaagacagttgtgtttggctaagagatttaaatgggtctccttttagctcatagatacactttgctcatcatttgtgcttaaaataatgagaaagaagccaggcatagctcctacttcagtactatgcatagtgcaattataaccacgctgtagggatggagaaatggctcagaggtttaagagcactgtctgctcttccagaggtcctgagttcaattcccagcaaccacatggtggctcacaagccatctctccagcccaagagatttatccttaaaaaaacaaaaaccaaccaaacaaacaaaaccacaggaatggagacagcagagtggtgtacagctatagttccagcacttgggaagctgaggcaggaggattgtttgagcagagtctgagggcagcctggtcaacactgtgagttcccatttcaaaagaaaacttgaaataagagatggctgttttcttcaaagttccctatcttgtcttgtggtagcacaaaggtctcagaaacttgccctatacttagagtcaggggtcctaacaaagcatgagagtagaatttatgttcttattgctcgtattagtgtgtatcttcacagcatctgagtatgtgtgtgctgtagacagtcgcagcagcaccagctgcagctgccaagctgatcgcctttgctcttccaactttcattatctgggcaagagaccagggaggaaaccgaagcttagagaataggttgggggactggagagatggcttagaggttaagagcactagaacttatcctgaagttctgagttcaattcctagtaaccacgtggtggcttacaagccatctacagtgagatctgatgccctcttctggtgtacaggcacacatataggcagaacactgtatacatgctacagaaataaattgaactcttgggaaaaaaaagaaaatagtaggttgtttaaggtcgctcagggactagagctgggattacaaactatctttttgttatttgtaccccaaccccactcccctgtttgtggctttgtacccactggccagctccctggtggggtagttttgtttgagataagcgttcactaactagctcagattgccctcaggtaatcctcttgcctcctggactgtgagattgcaggtattagccagtgcgttcggttttgctttttctgaccatggtgaagccctgtcttcacagccatagaaactgattttcctcacggtactaacatcaagaagtttaaaagtttgaacttcgtgctttctccttgacttcccaaaggccccctcaaagccaggaagctcggtgttgatggttttcagtccttcatgttttttacctattcttttgagctaaaccctctttttttcttcatgtttcatccacggcacacttagcttgctttctgcagtgattattcatggtatttcctccatttttgctgcttttgaaaactcaccacttgtttgtttcttcagtcgctgagtctcccggggagatttcgccagccaactccagatcagggtgtgtgccaattagcagtgtagatatgagtcataaaccgggagggatcactcagtaacgttgaacttctcaggcactgggctctctctgctgctttaggaactgaatgcgaagctgatgtcacagcggccctgggggatttatattctccattgcaggatgtgtaaactgccctcttcctagcaaagcagctctttcactggaatatgttttgtgttaatggttattactgattgcttttgacaccaagtatgttaagagccacagaataaagtgtcactaggattgaaggcagtttgtttatgatactgccagtcatgttcctctatgttctctgcttttaaagagctcaaactgacctacttcaatgctagatgagttttggagtacatgcctctacgtaggatcgacttcttgattgttgagttagcctcattttcatcttgtggtttttatccccccctcccctctttagctgttcaacccttcagctgctgtgctgtgcctgccttagagcctttgaacacataagagtcattctgtcagagcgcctgtgcttcctcagagccaatcctattgtcatttctcaccacagcctttctttcctccccacaggcaggctgtccctaatcgacccctgtatttctccttcatgagccttgtgcctgttgtctgtaagccacggagtgattatttctttgagtgccatggtaaaagtatactcaccagagcaatgatgcctgtattctgttcgctgctctggctccggcttctagaacaatccttcataaatgtttgctggagtccatggaggactgagcaggggtccaggctactcaggggcactagtacggtgatagcattagcaattaaagatagttacactgacagagaaaaagaactgctcagaaagaagttctggagcgtgcaattaattcacagttcaggttcaatcctctgcattgtaaaatagaaaggaggagggggatcaaggagggaggagaagaggggaggggggaggnnnnnnnnnnnnnnnnnnnnnnnnnnnnnnnnnnnnnnnnnnnnnngggagaagagaagagaagagaagagaagagaagagaagagaagagaagagaagagaaaaatattagtatatatatggaggtgacttgcaggagcctcaaaagaaaagggttgtcatctcttcttcctcctccttctcttcctcatccttctcctcctcttcttcttcctccccctcttcctcctcctcttcctctccatttcttttttttttttttaatttatttatttatatgtaagtacactgttgctgtcttcagacactccagaagagggagtcagatctcgttacggatggttgtgagccaccatgtggttgctgggatttgaactccggaccttcggaagagcagtcgggtgctcttacccactgagccatctcaccagcccctcctctccatttcttatgtttgtactgttattgtagtattgacccagagtttgatagattattctttgctttgtcttgttcttttgatgaaaaaggtgtagtctaggtgagccattaactgatcttcttgcctactcagtgttcctacttgattttgccaccacggctgggagattgagtaattgattaattagttaattagagataaggtctcactttctcccaggtagaccaggttcgtgttgcactcattgcaagcttcctgctttaagcttctaaatgctgagattataggcaggtaccacctgctgtgccatctccctggccctggggttttctttattggatacatcttggtaatcatattagatagccaattctaaggtttccagaagtggcgaggtggaggacactgtagagctgctggggtcagaggtttgtttatgattagatcaggctgaccatgtagaaaggggaaccattggctttgtttgcttatttttgagacagaatcttactatatatccctagatggcctggagttcactgtgtagaccaggctgggctggaactcagggaaattcatctgcctctgcctctgcctctgcctctgcctctgcctctgcagtgctgggataaaagcatgtgctaccaggtcaggcccattggcttttcaaaacatagagcatgtctcaagggcctcggcagtaattttgttactgcacgcgtacatgttacattgtttcaaagggatagtggtttcgtgtacatgttacattgtttcaaagggatagtcggtttggggtaggatctattcaaaatctgattctacatgctacaaaatatttctaagggttttgttttgttttgttttggggggtggggggggagtgccactctctgttccaggctggcctgaaactcatggcagtcctcctgcatcagcctctcaagtgctgaataagccacggcccagttaatgttacataattggtatgtgctgtgttatgagaaccaaagagaatgcaagaataagttccatttagttgattgtagtttgaaatttctttttttatttgttttctcttctggtagatctttttttttccccctgtgctaggactgagcctggaccttacacattctaagtgtcccatcaatgcctctaaccctctgtggctggccttcgatgtagtgtctgatttgtactttcctattcccatctttcttaggaaaacaggccatcattttcacaacttcattagctggcaagacctaagggcagctgaacttgtaaagtcctggaataattctctcataatgaaggtaatttttttaatcaaatgggtttttttctttttctttttttaagatttattttatttatgagtacactgtagcgattttcagacacaccagaagaggatgttggatcccattacagatggttgtgagccaccatgtggttgctgggaattgaactcaggaactctggaagagcagtcagtgctcttaactgctgagccatctctctagcccaattgtttgtttgtttatttgtttttctataaatgtctcttaacttcagatttaattgtagagtctcctaccctttaagttttaggacattaagacaaagagccagtcagtgaaatgtaggagtagcctacccaaagcattggtggtagatttaaatgcttttctacttactgacccttggggaggctggagggaatttggggtagacctgtgcttcacgtgctcaagagatctcttacttctgcctggggaaaggaaaaggatgtagccggcatggtttgaggtgcccaaactgcgtcatcctttcttagaaagcgtgtggctactggcatagctagctagctgacttctgcagctcttcacactacctggtgcattgtaggctaccggaaaggatagtgagaatgcgaaccaaccatgaggacagcagtaacagcgcattagctgtaagtgagcccaggctaccaagggcatgcacgcagttactggggaaaaggcgaagctcctcagatagggcgcagcctggggcgtttgctgtcactggtactcagtgttctaagtgttgctgatggtgacttttttgtttttgtttttgtttttttgtttttttatctgtaatgactgtagtaatcagtttattacacagatgaatcattcatgaatgtacaagctccagaggagcaacagggtcttaaatatacacacggatttccatcaaatacatctccacccttacatcgaaataggcctaaagcagttaaaaacataagaaaaataagagctattagctatgtactaactgagaaaccacatacaaaccaaagattatggaaaggggctaaaaggaggaaggctgaaagggcagggagatgtttttgtttttttgagacggtgttacgcactgtgtaaccctggctgtccaggagctggctctgtagatctggctggcctcaagctctgagatctgcctgcctctgcctcctgagtgctggggttaaaggtgtgtgccaaaaactgatcagatgttgatttctaatgccttgtgactgaatgccttctcggctactgtagggctctgaactggcgcaaggggtgcatctggggaatgacagacagatggctcttcacgcccacgtgacgttgtgttggtactggggaatcggaacttcagccctcgggtgtgcacaggcaccttcatctctgagccatttcctgtttgtttgctttcacacagggtctccacgatagcgcctgacctagagctcagtatggagcccaggctgactttgaacttgtggtcctgcctgtctcctgagtgctgaggttggcctgtgtaccactatacctgacttcatgtcgtgtttttacttgtttctatttgatgtctatgagtatcttgtctgcatgtgtacatgtgtatcacatgtgtgcccaatgcccacagattgttgcaggaaattttttaaaaaaagaactggcaccgtcctgcccttgtgcctctgccccagtggccgggtggccacacactagcaagtaatggccgacctgtttttatctcatggagactctgactctgaactccaaaatctcttcacctagctggctaagttcccactggcgagtctctaccatgccagccctgtgcttcaaatcctccacggcctttgtggtgcacatcaggcaaactcacactttgctgccatacctttctctctggaacccagaagagcagccgtgtgagagaaaacacaacacaaactcagttcagagacaatggtgactcaatctctgggcgcaacaactaaaacttaatcctgtaaaccttactaaaatctgattcctccagtggtgaatccttgcagatctgccatgataccaggaaactctagcagctatatcttacccacatgccgtccccattccaaaaaagcctaactctctcctgctccctctcttcctctgcccaaccccgaagtcccacctacttctcccagtgggtggctcctttgtacataaggggattggttcacaagaagtcacctgagtacttttgactccttccttgtcggaagccccgcccaagagagtggaattagcatacaaacagcaccaggcccatccacaacagatgtcagaagagggtgttggatcccctagagctggagtttcagaaggttgagagccaccacgtgggtgctttaactgaacccaggggctctgcaagagcagcaagtgttcttaatcactgagatgcctctctaacctctgtttttgttctgtaagaaacggattaagctggacatagtggtgcacatcattaatcctagtgtgggggaagcagaaacaggtggacctgaactccataagttcaatgccagccaggactacatagttataccctgtcttgaaaaggggagggggtcgagaaagaaaacccaagtgcccttaaatgtatttccttaaagatctcttttgtttttaaaacagctattgcatggggccacccgagtccttcatttcttcagtagaagtaaagtaatgctaacggtcagccgcttcaatttcagcacccagcatgccaccttaagattgacctggattttacaaaacctatctgaggtaagagaagattgtgtgtgtggagaggggatcatgactgtggggaagaaaaatttaaagagtaagaacaataatccagccttttggggaagtgaccagtactcctgggctagaagacagagttttcaattggttcctgtgtttaaagtctttgtgttatgtcataacacaaaaaagattgacagtaagtttgaagctaacctgggctacatccaggagctctaacgatgtctaacgatgagatgacattcttatgtatgctagataggtacccaacattttgggtgactcaggcatgctgggggcggggtggggtgggggggcggtgctgaacttgagttaggctcaggtaaaagcaaaggtgacaggctctgcaaagccggcgcctctttttgattgcaggccagttttagggagtgtggcacaaccgtggcttgcttcatggggattacttcagttccctgccaaaagccacgcctccaagatttggagcctgagcactcttaacttggagcagtccgggctcctgctccagcagcttatctctgtcatcctccctggctcctgagaagctgttctcttaaaggtcttacctgtgcttctagttgtcaggacagatagctgccctgtgataacaaccctgatggatcagtgaagacctcaatacctgatcctcctgcttccacctccaagctgctggggttataggtatgcaccactgtaccctgatcatttttctgatgtacgccccatgatttaaatcatctttggcatatgaaaaaccttgtgtgctgttgctgtatgctcactctggcagcacgcttactaacgctggaacggtcggagaagatcagggagccccggcataaattccacagtgaatttaggaagcaccccagttttcctttcaaactgtatgttgaacaaattttagaattaaaaaaaaattgactcaagaatgctaaataagccgggcatggtggcgcacgcctttactcccagcacttgggaggcagagacaggtggatttctgagtttgaggccagcctggcctacaaagtgagttccaggacagccagggctacacagagaaaccctgtctcgaaaaacaaaaacaaaaacaaaacaaaacaaaaaagaatgctaaataagatattactgaaagccaggtgtgatagtgcatacctttagtcccagcacttgagaggcagaggcatctctgtgagttcaaggccggcctggtctacaaagggagttccaagatagccaaggctattacatagagaaactctgtcttggaaaaataaataaataaataaataaataagcaaacaaatatttagcttctagcctctgtgtacaatgtgcaggtgactgactgggtgtgtaccaatgcatataccacacggagtaaatataaataataagtgtgaatgcctatgagtgtgtggatgtccaggagagatgcagtgactgagataatagccatgtgggagatacccttagtgccccgtggcatgaggtcgagccggggtggaaagacaggctgagcagataaggacaaatgaggcaagccatgtctcaggaaattattattttctgtctctctagaattccaacttttgtattatcagatttaaagaagctttggcctttccctcccttgggcatgcttttggtttggtgttggtgctgtgttgagtagctactctgtggtcttccgactgtgtggtctgtgccacaactgctcagctgctatagctggagcaaataaacctagctgagtccactcaaactgtattatagattctaatatttgatttttagagagtttttgttataaaaatatctgagggttttcctttcgatatcacaatataaattcttcactaattttaaaccaacaatcttgaggttctagagactgtcagggttgccatggcaactgtccgaggttttgttcagctgctgagataaaacaccctgacaaatacaagtgaagggtttattgcagctacggtgccaggttccagtccactgaagcagagaagtcacagtggcaggagtttgacagagctggccacacggcatccttagtcaggcacagagaacgggatatatggtgctcaccagtacttagcccgctttctctctagctttgattgattgattgattgatgagacagggtttctctatgtaaccctggctgtcttggagttctttataaagaccaggatgtcctagaaatcacaagagatccacctgcccccaccccaagtgctgggattaaaggtatgtgccaccatgcctggcactttctctgtgtttgtagatggaaccaaaggcagggaatggcagagccctctctaaggttcagtctttctacatcaatgaggataagcaagacatttcccccacagatgattctggatcgtgtcaagtagactattaaaactatcacaccaactattagctgttagaatatttgggtaaacttttcaaattataacaaccgtaccttagataaacgtgcctcattgtctgtgatactgccatttttcgaagcttcatttaaatttttagccattaaaaaaagtggaggaatcggagagctggctcagtgatcaaatggacttcctgctcttgcagagggcctgggttcagttcccatcgcccacgccacacaccacacaccacaacagcaccgcacaacccacggtaatctctcatcctggtaatccaacactctcttctggcctccacaggtagatagcaggcacataagtggtgcacatacacacattcaagcaactaagcatccgtctacataaaataaaaatagaactttaaaaatagaatagagctggagatggaactcagattgttaaatgtttgcttagcttgaccaagcactgggttcagtcaccagctgcacacaaaagggagttgggaagagtcggggaacagggatgtaatcttgtgtggaacaccacaaaaacaaaacaaatggtaattaccattttgatcaaagaactaatactcaggtttgggccctccgcccacctagagtcaggcaagcatacagagtttatatagagaggatctgtatcgctctccacattgcctggaagttacacatcccctgtatgctgcaatcatcaggaaaggggaagaaggtgaatgccctataaaaaactgccttagcaaaatgatgatgcaaacacaagctaacaggattagtcttctttctgttgctttcctgagaacctatttagtgcccgagcaagtccatttgaacgggtgcatggaaaccttttgtattgggaactttaccactgcccaaacagctgtgtatgtgactgtgtgtgtgtgtgtgtgtgtgtgtgtgtgtgtgtgtgtgtgtgtgtatgtgcgcgtgcgcgcctgcctatgtgtgtgtctgtgtgtgtatctgtgtattgtgtatgtatgagtgtgtgtgtgtctccacatgtgggtacctgtggaggccagaaaagcaagttagattccataggagtttcaggtggttgtgagggactacctcagaaatgcctgatgcagctgcttcaggaagttcttgcttttcttttctttctttcttctttttttgttttttcaagacagggtttctctgtatagccctggctgtcctggaactcactttgtagaccaggctggcctcaaacttagaaatcctgtctctgcctcccaagtgctgagattaaaggcgtgtgccaccacgcccagctctttttttttttttttttaagatttatttattttatatatgtaagtgcattgttgttgtcttcagacacaccagaagagggcatcagatcccgttacagatggttgtaagccaccatgtggttgctggaaattgaactcaggacatctggtagtgctcttaaccactgagccatctctccagcccccaagaagttcttttaaccatggaataatctctctccccttctcccctcctcagtttttaaggttaaaaactgtttctgtgagaatttcagacatgagtactaactacatttaaattatttctacccctccctctccaccctctgactcctctcttgtctttttcactccctttcaaattcatgacctgttctttaatcatgattaataaatacataggtatatatatgtatataaataaaacaggctaaatccacatatacacacactgtgggattggataacctattaggagctcatgcccagagaattcagatttttcttctctcaacagccagcacctatagggcttcatcaggcatgtggtactgtgagatttcccccatccctgttggcttataatggtgcagatatgatcatgctgctcttcctttggccaccatgttgttgtggtttcatgggtgcagctgccctgacatagatagaagatactattgtgcaatagatggctcagtcccctggctccttaagtctccccatcccctcttccacaacacaggtaggggttgtgttgtgtgtcagagggggtttcacacccacagtcagggttgtattgtaagtgtatcaaatggtgttttacattcctcagtccattgttctctgtatattttgactaggtaagggggcataacacttttaaaaaataggcagtctttggatttaactcttaagccatagtatgatattaattctttagcttgtatggtatatttgcatatttaaactaaaatatatacatatatatgctttgcttttttaaattaaaaatgtaaagtttttaaactaaagttttcagtgaagcacagagtgaataggaagaactccttcctaagtcccattcactaagaattaagatcttttggaatgtattctacaaatgatctttctaggtatatttctcagtattgcagtgtatctgtatttttgtgtgtgtgtgttcctgatattgaagtcagttgtagttgactaaaacgttcttctgatttcaaggtgaaaagggcagttgaagaagacaattgttgctttgggacgattgatacctggctgttatacaagctcacgaaaggtaaagtcgacatcacagacctgttccaatgaatccaagtaagactgagggcccagtgttgcttaagagagaatcgtagttacgtccaccccggtttttttctttccatgttccaaacactgctgtttgccacaccggtgagactacatgtcgcaataaagctagaaacagcacccccatgtatgacggtgaaagaggcagaataagaagacacagacttaattccaaagagcttaagaaacctacaaaggaaatgagaggaaagtcagaaaggggtggggacaaacatggggcgcacagaggccgagcacagcttgggccccaccgctccctgtggggtaggggagcagcactgtgtaccccccttcactgagtcatactggggactgggccttcgatagctggctgcttaagaaaacccccagataaactgaaggagctaggcaagctaacacaggaacacagcaccatgctaacatagcgtgactccttcagaagaccagacacagggtaaagtgagatttcaggctgattggtaaaacatcatgggtgacacaaggggaatacaaacaagcagattagttaaattcagggcccgaagggaaggtcagcattgtaaaagaaaacatcagccatctgatgaccgcaactgtccgggagagttcagcaagaagattgatattcggaacaacaggtagaaatgttggaaatggaaaacagtgaatcaaatgaaaaacacagtggagaatttcaccaatacgcttgacctgctaaaaggagaaataaaagggcaggagagccatacccatgaagtgctgcatccagacaccaagaagagagaaaagggacaggtgtgaccacagtgtccaaaagacgctaacatgtgtttgaattataatgctgtgttttagcatcgtgtaagcatccaagtgatacaagagacaagcaaacaccaaagagaatgatgggtcagtgacattatagcagagagtttcccaaagcaagaataatggatagccaatagaaggggcacttagaatctcaaatagatattaccacagaggaacctttgatgaaagtcaaaatgccaaggcaaagagcagaggacactgagagctgcaaggagaacatgccaactcatgtacagaagcagaaacatcggaaagacatcaaatcacctgccaacaaccaacgtggaaccatacttccaagccctgggagtaatggctgccaactgagagcaaaccgcccagcaaagccgtcttttacatttgagagagaaacaagggtgttcgttgccaggcgcaggcagttcttgactctcaagccagcgatgcagaggatgcatcaaggagtactgtacacagaaaaggaaggaagtctcaatcataagaatacaggaagtgggggctggagagatggctcagtgggtaaaagcaccgactgttcttccaaaggtcctgagttcaaatcccagcaaccacatggtggctcacaaccatctgtaacgagatctaatgcccttttctggagtgtctgaagacagctacaatgtacttacatataataaataaataaatctttaaaaaaaaaaagaatacaggaacggataaattttgtgagctgaggagagcaggaggggatctatcatggagtagtaaaccagcaaggcctaatcctaatagggcagaaagaagagaaggagagtgtggccaactagaaaatgaccaggaatgttgtagtcagcgccgtgtcggcaaaggacaagctgctggagaagttccctctccttccactgcgtgggactgggggtcggggtgggggttgttgggacacagattgcaaggagtggtggtgggcacctttacgagccatctcagcccgcagtgacattcttcataggactagaagacaacgagcaatcctagctggatttggtgctgcacttctgaagcagaggccaggtggatctttgtgagttcatcaccagcctggtctacagggcgagttctaacccagctagagctacacagtgagaggctgtcgcaaaacaaaaataaaaagaatgcctttaactggaaggcagggacaggcggtttacatagcaagctctgggacacccaggactacataaagaaaccttgtctccaaagaacaaaacggattgtttgggtctggagagatggctgggtagctaagaatattcgttcttgcttttccagagcacctgtgtttggttctcagcacctataccaggtgactcacagtctggaaacccagctccagggctcccacgccctcttctggcttttatgggcacctgcatacatgtgcacagacacatacagataaaaagaaatcttttttggaaaaaatggatcttagcataagatgaaactaaaacttctagaaaatgacataggcaaaatgcatcaggttatgttattggcagagactttctggaaagtctattagcactggacttatctcaataatcggtagacaggattgcttgaaattaaaaacttctgcacagcaaaggaaacagttgcttacatgaagaaacaacctatagagcagggaaaataatctaacacagccgcccccacggcaccctaaaaatggctaataattactttttaaagttttaagtatgttaatcctgagggaaatacaaattgaaactactttgaattccatctcacccagatcagaatggctgtcatcaagaaaataaaggaagccaggtatggtggctcaggctttcaatccctcatttggggggcagaggcaggtgaatctctgtgagttccaggctagccttatctacatagcaacagggcaacagagagagacctggtcttaaagcacattagagagaagacaaatgacagctggtgctagggatgcctaggaagaggagcccgattcaccgctgtcgctgggagcggaagcttgtgtggtcatgatggaaatcagtatggaggcttctcaacaagtgaaaagagaattcccatgtgacctggctctaccactccagcgtataactaggggattataagcatgccacagagatacctacacatccatgtttactgctgtactatttatgcagccaagaggagaaaccagcctagaagttcaccaatgcatgaatcaataacaagaaaatgtggcacattcacaaagtgcagttctattcagctctaaaagcaatgaatggagagtcatgacaggagaatgaatggaactggaaatcacgtgaagtgagacaaccaagacttcgaagaaaagataccacattatatctcatttgcagaacctatgtttgagtctgtctgtctatctgtctgtgtctgtgtctgtgttgctgagtctgtggcattaaaccagaggatcatgagagagaatttagagattttaagggatgggaacagggtgctggaatacatgtaccatgaagtcaaatgtgcagtgtgtctgggggaaggagagaagttagaccagacatgaggaaaaaggggagaggcaactcagaacaaagtataataacataggaaaatgccataacgaaatgcattgctgtgtgtgctgactttaaaaaggggagggggactggagaagtggatcagctgttaattgctaaacaccctcatgttagttcacaagcatgtctgactccagttccagggaatccactgccctcttctgactcccaggggcgccaggcacatatgtggtacacagacatacatgcagaccaaacactaatacacataaaatgaagtgaataaatgtaactttaaaatttgaaagaataaaataatgataacactgtgcttggatatacttcagggtgtgtgtgtgtgaggatgccacctagcatttggacacacctcttcctttaaaactcatgatctaaggttttatctgtaaagttgcttttgtaaggttcaaggacttgtaagatagcttagccgatcacggtgtctactgccaagcatgatggcctgactttagtcccgagaacccacatggtcatgagagctgactattgaaaattgtcctctggcccccacatgcagacagtggtatgtaaggggcgggatcagagggctcaacaggtagaggcacctgctgccaagcctgcccaccagacctgatccctgggacccacgaggtggaaagagagcacagaccctctaattggcatgtgtgtgctgtgataaaacacacgcacacaaacacatacagaattgtagttttgaaatttttaaataaaattccaatcaaaataaaacactataaaggtttataaagattagatgggttttttcctggaaacttgactgttgcaaacatccattttagggtgaatttgaagatagacacaggtctagattataaaccgaggttgggagatttatatttcctgataataaatgtgttatttctcctgcaaatccaggttcttcctacgccacggattattcaaatgccagcaccactggattttttgatccctatgcggtaaagacttttctctttttttgaatcacccacttttctgtattgcgggctagattcttctttaactgactgtagttgagagcccttgtcttgaaatgtgggtagaggtgtgaggccggtgagcttgcatatcctgacgctgtattctcatgcatagatgcgctggagcaggctcataaccaccatggtctccatcccactgtctatcctgcctcctgtgaaggataccaggtaactaactgagcatcggaagcacgctgcacagctgccttccaagtccttttgctttgctgggaaagggagttttgtttttgtttttgtttttttttgtttttttttttttacatgcttctgcatctattctataactttatgggctacgcgaaaagcagtttgccggattttagggtgagtgcgtccagagctacaactaactctttcatcgatctcatttgaagctataattttggatcagtggatgagaagatatttggcgtgcctataccagttgttgccttggtaagtagaaggcattggggtgggggtgtaagagctaaataattggatagttggggcgagctttcagagaaacagaaggtctttagtagaataatgcctgagccaggggtggtggctcccagctttactcccagtagtcactcaagggcacaggcaggcaggttttgtgagtttgaggccagcctgatctacacagcaagttccaaggctgccagagccacacaggtaggccctactgttcttagtgttagtgttaaagcatttgccaccaggtacaaggccctgggctcaatatcagcactaaagaagaaacacacattctgcctggtatctcttttactttcttttaagttaaaagggtcgtgtatataatgagaagcatttcctatataaggaaactgtggcattttctaaagatgctgtgttctgagtaaaagaacacatctgtagatgcttgatttgaaaaacagcaaggggtcactgctgcttatatttcatcagaaatagtttatatttcaccagaaaatcagtaactgggcagttgatactggaggataaagttgtagctagatgttataaaatccttagcttgctggtgtgaatagaataattgctagggtctgcttccttttagatttatgtttactttatgtgtttggatgctttgcctgcatgtatatacatcaccatgtgtgagcagaacccagaagagaacgtttgatctcccgacactagagtaacagatggttgtgagctgctgcgtgggtgctgggaatcgaacctgggtccttcgcaggagcagcaaatgcttctaactctgagccactccacaactcccgggtttggtttctaaggtttctcttactgctggactttagctctctggccagaggagagagtacagagtgagaaaccctcaggatgccagccgtgctggaaaccctcaccacctgtccccagatgaactctccacattagccagggagtcagaatgggagggggtatatttacttataaataacaggtacatcttattatgtagcttaagttggccttgaatctctgtgtaggccaggctggcctcaacctcaaagcagtccttctgccttggtctctaaagtgcttccatgcccaggcggtatcatcatcaccaccatcatcagcatcagcatcatcaccatcatcaccatcatttaaagcaggctcctgttattagtccaggcttgcctctgacttaagatcctcctgtcagggtctctgatgctgaggttatgtgttcagctatgtagtaacatgagttttatcttttattttaccttttaaatatttatcactgtgtgtgtgtgtgtgtgtgtgtgtgtgtgtgtgtgtgtgtgtgtgtgtttgggtgtgcgcatgcaccatgtgtaccatggcatgcatgcggaggtcagaggacaacttccgggagttgcttctctctttctaccatctggaggtccaaagatcagactcagggtgtcatgtccagcagcagctctgtttatctgctgagacattttgccagccctagcttcattttatttctttgtttaatatactgctggtgaccatgaccacatatagataaggcaaatgctctatagtgtgtgcttaatggtcctcaccactcaggaggctgaggcgagagaggaggtctaggctaccctgggaaacatggcaacccatctctaaaaagaattgaaatggagttggggtgtaactcagtgtggagtgctcaccagtggacctgaggctttagggttgatttccagcatgtagaacattaagtatcattatgtgtgtttatatatagccatggtaacaaaattataatcttctaaagcaataaacacgtttaagacttttaattttatttgttctacctctgtcactcttagtaaaagaaatttgtgacttcaggtcctgacaaaggatgatgagacctctaaggtgaaacgaaaaagcccactgtttcagtgccgttcttctactgacacttctaaaactgttcacgtttataaaagccatgaactagagtggtatcagaagcccttggacaagtcacttgcctgcagtgctggccctgagagacccttggactgtgcaactgttgtctttggggttcatttttaacttaaggaaatggcaaaagagcaagtgaactatgtaatcacgagaatcgtgcaaatgggggatggactgtgtgtaatgaagcaagccagggtacagtgtgtttctgacagtctgactgacacctcggcaggttggtgaccagcagtcggccatgtttggagagtgctgcttcgagacgggagatgtgaagctaaccatgggaactggaacatttttggatatcaatactggaaaaaaccttcagcatgttaatggaggtaaataatcttgttagttagataaaattacattcatgtttgtttgcgatgtatatcaataccaagcccccatttcatggtgagggtattctttcatatgttttattattagagaaaattaatccccattgcctttaattaattaattaaaggaattatattagcagcattaaaaataaagatgttgccagatggtggtggtgcacatctttaatcctagtactcaggaggaggcagaggcaggcaggtccccttgagctgaaagtcagcctgttctacagagcaagttccgagactatacagaaatatgtctttggaaaaatccaacccaaaaaaacaaaacccaaatatattaatacagcaaattaacagatggatttggctattttggccagctttccatatatttatttgtattacatattatatttgtttaacatttactattagagtctaaatctctctttttccctcatatatatttatttattttggtgtgctgctgctgggactcaaacccagggccttagcatgttaggcaagcaagtattatacgccttgaagtacaaccatgatttattttttctgtgcattagaaactttgggggagtagtaattgccaaccaatgatcgatacatatttaggacctttttagttttttgagagcgagtctcatgtagcgccatctggccttgaacttgctatatagacaaagatggcctggagctgctggttccccggggctagggttataggttttgccaccatgcctggtttatatggtgctggcaatagaaccagggattcatgtgagcgggacaggcactcttccaactgagctttgtctctgtagccctggctatcctggaacttgctccaatagaccaggctacccttgaactcacagagatccacctgcatttgcctcctgagtactgggatcagaggcgtgtagcaccactgcccggcatcctcagcattttcaaagatgcatttaaaatccgttttcctgcctttgctctgcagccttatccctttctccgggctggagagtcagacctagaaaaggggatgcctgtattccactgtcctgacttagggctctgcatagaggccacaaataaacacaacagtgcttatttagtgctctggctacgtaatctctagtagcctttactttgcaattaaaatacttattgccatgtgtctagagacatggatgtacctgtggctactaaaacctaatagctcagtggtagctatctccctggcatgcaccaggccttcagttcaattcctacttccccaaaccaagaccagccatccaacagcaaaaccaacaagaacaacaatgcccttcttatgtgttcccatagatgtgaaatcttatattgtctttgaaaaaattaaattgagaactctgttaacattttatggattggcgcattgtattaccgcaagaaacattcggttttccacacagtacaaaagttctttagaatgcatgcatatttcttttcttttattaattattttcattatttacatttcaaatgttgtccttcttcccagtctgtctgtctgtctgtctgtctttctttttttttttttttttttttttttttttttggtttttggtttttcgagacagggtttctctgtgtagccctgtctgtcctggaactcactttgtagaccaggctggcctcgaactcagaaatcagcctgcctctgcctcccgagtgctgggattaaaggcatgcgccacctccgcctggctcagtctttcttttttaattccattttgtttaaagtacattttaaatgtagttttctcatttagtacaagttgtctaattaaaaaaaaaaggaacaacaaaaacagagacctgccctttactcgccttgtacacactggatgctgggctctgtggagtttcctttatgagtgaattcggttacacacagctgctctctaaggtgggcctcttttcacttgcagaagtgcaggctgaaggtccggaaacggtaagatctcacctagttcaagctgggatttgaattcccacagtcttattagtgcttaagcaatttgtggttatttatatgcatggtggttgctgcactgagttgtgtattttgttatatgacttcaattattcatttgtatatttactttctaaggcttttatccactaattggatggaagattgggcaagaacttgtatgtttagctgaaggcaatgcaggagacacgggcaccgccataatgtgggctcaaaaattaggtaagtcgcctttaaacaaaatccacaggccgggcttgaattcaaatttgctacatggttttagatcaatagtcaatgaatggaccattcatcttgagacattaaggtaaaatgatatgtactaggagaaatgtagaatattcttttaaaaaaatattgggttggtaaaggttaagtgttaggactactgggcaggggtggcacaagcctttaatcccagcacttgggaggcagaggcaggtggatttctgagttcaaggccagcttggtctacagagtgagttccaggacagacagggctacacagagaaaccctgtctcggaaaacaaaaacaaaaactcttacatgcgttctcgcgaccggccaggaagaacgcaacaaaccggaatcttctgcggcaaaagctttattgcttacatcttcaggagcaagagagcaagagctttattgcttacatcttcaggagccagagagcaagagcgcaagagagcaagagctctattgcttacatctttaggagccagagcgcaagagcgcaagagcgcaacagcgagggcaagagcgcaagagctttattgcttacatcttcaggagcaagaagcaagagccagagcaagagctctactgcttacatctttaggagccagagcacaagagcgcaagagagcaagagtgcaagagcaagagagagaatggcaaaaccccgtcccttttaacgagaattattctccgcctaggacgtgtcactccctgattggctgcagcccatcggccgagttgtcgtcacggggaaggcagagcacatggggtggagaactacccttggcacatgcgcagattatttgtttaccacttagaacacaggatgtcagcgccatcttgcaaccgtgaatgtgagggcggcttcccacaaaaaacaaaaaagtattagctctagggatcacaaaaaaggaaagaaaagaaagagagagagaaagagagggagagagagagggagggagggagggagggagggagnnnnnnnnnnnnnnnnnnnnnnnnnnnnnnnnnnnnnnnnnnnnnnnnnnnnnnnnnnnnnnnnnnnnnnnnnnnnnnnnnnnnnnnnnnnnnnnnnnnnnnnnnnnnnnnnnnnnnnnnnnnnnnnnnnnnnnnnnnnnnnnnnnnnnnnnnnnnnnnnnnnnnnnnnnnnnnnnnnnnnnnnnnnnnnnnnnnnnnnnnnnnnnnnnnnnnnnnnnnnnnnnnnnnnnnnnnnnnnnnnnnnnnnnnnnnnnnnnnnnnnnnnnnnnnnnnnnnnnnnnnnnnnnnnnnnnnnnnnnnnnnnnnnnnnnnnnnnnnnnnnnnnnnnnnnnnnnnnnnnnnnnnnnnnnnnnnnnnnnnnnnnnnnnnnnnnnnnnnnnnnnnnnnnnnnnnnnnnnnnnnnnnnnnnnnnnnnnnnnnnnnnnnnnnnnnnnnnnnnnnnnnnnnnnnnnnnnnnnnnnnnnnnnnnnnnnnnnnnnnnnnnnnnnnnnnnnnnnnnnnnnnnnnnnnnnnnnnnnnnnnnnnnnnnnnnnnnnnnnnnnnnnnnnnnnnnnnnnnnnnnnnnnnnnnnnnnnnnnnnnnnnnnnnnnnnnnnnnnnnnnnnnnnnnnnnnnnnnnnnnnnnnnnnnnnnnnnnnnnnnnnnnnnnnnnnnnnnnnnnnnnnnnnnnnnnnnnnnnnnnnnnnnnnnnnnnnnnnnnnnnnnnnnnnnnnnnnnnnnnnnnnnnnnnnnnnnnnnnnnnnnnnnnnnnnnnnnnnnnnnnnnnnnnnnnnnnnnnnnnnnnnnnnnnnnnnnnnnnnnnnnnnnnnnnnnnnnnnnnnnnnnnnnnnnnnnnnnnnnnnnnnnnnnnnnnnttgcactctctgtctctgtctgtctgtctcccccaccccaccccacccccccaacaccaccctggggaatcaagctgagattgttaggctcagcagcagcctaaccccgctgaggttctcccacccctggggaatcagatctcactaatagcataatggtcctgaggattgaactcatgtcatcaaaagcttggtgacaggtgagccattatgccagtctctgtttttgccttttggccattacgaataacaaacaacaatattataactcatatttcttacacaaaatgtgaagtctatagctgtcttagtctgctttttctcgctgtaacaacacgctgtgggaaggaaagagtatcagttagcttgtccatcccaggtcacagtccattgaggggacccaaggcaggaactgaggcagagaccacggaggaatgctggtttctagcttgctcctcaccacgtattcagcctgagttcttatacaactcaggacaatctctgcctcggggtggcaccatcacagtgtgagctgggccttcccacatccatcattaatgtagaaaatgccctgagccttgcctctaagcaatatgatagagagatttgctcagtaaggttcctcctcccagataactctaacttgtatcagatgattgacaaaagagcaaccagcacagtaccaggctatttaagatggccgtgattatcattcgtaaaagtatggtgtggggtgtgactttaaattttactgatttgaattaagctgatttatttaatggaaaaaaaaagttctgttggcagaaaacaccacctctcagagggtgatgccggagggtgatgtcgagtgatttgttttcccgttattcctcttccctgggactaaactctctcggctttgcacaggctgggcagtcactctactggaagcatattcctgcctgcccacctctgtgagcctgcaccctgcgtggtgagcatattgtttgggccttggttgaggcaatgggaagagaaaggaaagggagagagaccccagctgaagcacattgtcgttttagagcagaggagagactgttcgaggagaggagcagggtgcagggccctaagaattttatagctcagaaaaggggacttttgtggtggaaaattacatcagcaaatctgttctttgtagactcggggccaaggcagaaatgttcttttttttctgatgttcttatctttgtccttgtcagagtctcccagctcctaacttcctgcagatgttttcactgtgctgttggttggcttttctttttttttttttttttttggtcaggcaagcgtttctcatctgctctgaggccctttgtttttagatcattaacccttacttacagttatttatcaaggaaaaaaaaatttatttcagcactctgtatcactaaagtgtcccttcttaagtgcgggtcctttaacacccttgccttgtatcgtgtagcattaagaccctagaagggccgggcggtggtggtgcacacctttaatccccgcacttgggaggcagaggcaggcggatttctgagttcattgccggcctggtctacaaagtgagttccaggacagccagggctatacagagaaaccctgtctcggggaaaaaaaaaaaaaagaacaaaaacaaaaaaccctagaagggccagtgagatggctcaggggcaaaggccccattgccaagcctgatgatatcctgacaccctggaccctgtgtgatggaaggacagagctgagtcatgcacaatgtcctttgacccccacaacgagcactgtagccaccatgcccctactcccaataaatacaattaaaaagttgtcagacccacaggaaactccatttcctcaaataccaaaaggcagaaggggcagatggctgcctgtgatgcgggttagcatcccaaagctcagctggactccaggctccctcagtgtacccagtacccatttcttttctttgttttttcaaaaataatttttattagatattttcatttacatttcaaatgctatcccgaaagttcactataccctcccccccccccaccctgctccccaacccacccactcctgcttcctagccctggcatttccctgtactggggcatataagcttcacaagaccaagggcctctcctcccattgatggctgactcggccatcttctgctacatatgcagctagagacacgagctctggaggtactggttagttcatattgttgttcctcctatagggttgcagacccctttagctccttgggtactttctctagctcctccattaggggccctgtgttccatccaatagatgactgtgagcacccacttctgtatttgccaggcactggcatagcctcacatgagagagctgactgtcagggtcctctcagcaaaatcttgctggcatatgcagtaatgtctgggtttggtggctgattatgggatggattcccgggcagtctcttgatggtctttccttcagtctcagctccaagctttgtctctgtaactccttccatgggtattttgttccccattctaagaaggaatgaagtatccccactttggtcttccttcttcttgagtttcatgtgttttgcatttcaaagtccatgctagcatcctagccctctcaccttctcccctgggttaaagcccccagcttatggggcttctgtcccctcagcgactcattctcctagccctgatatttcagctctgctctctctgtcctccccctgctccccccccccccccctggtcgcttccccccccttctctctcccctccccctgctctccctggtgtcgctccattcctgcttccctcaccacaggtccagactgctgatgtctttatctccctgctctagacaattcccaatgcttctggctgttctacatctacattaaaaaccttccccttagccatacaaaaagaaagtctgggaactggagacagggctcagtggctaagaacactagctgcaaggttaaaaaaaatatttttgaagttttagaaagcttggtggtgcaccctgttaattccagcacttgggaggcataggcaggcagatctctctgacagttccaggccagcctggtctacagtgctgaattccaggatagccagggatatgtggaaaaattctgtgtaaaaataaaaaccaaaaaaaaaacagtcaaccaaaaaacccaccaccaccaacaaaacccttccagattatcagaaataaaaataatatagtttacatatttcttctctttttagttaatgcttttcagttttacccccatagagataagaagaaaaacccagaatcctgaatttcacattcattgaatcccaagttccatgtgacaccacattgcctgttccagaatatttgctggtcagctgggctggggctgttcctgttcagagagaaacttctcacagagagctgaccttgaaaggccccaaagactcctagctcagattggagacaggccctgcctgaggccagaaccgcccctgcgcagaaaatgcaacaattgtttcaactagagaaggagggggtcagttgaagatttacctttcagtttcagccccgctgtggctaattcttgctccctttgcctgaaatgtgcataaaagtaaacatttatttgaatgtatccctctctgagaacttatgagtaagttgaaaaaaaaatcctaaactgtattctggaaacagacttgtccgactgagcagccctacccttctcccaggctctaaccaggccatagatcttcactgcctcctcccaccttctctaaacaggagggaaaactcagagcaggtgatgaagtctcacaagcacacacacacacacgcacacgagcatgcatgcatgcatgcacacacgcccccactcagacatgcacaaacacacacacacatgcactcagacatgcatacacctgtgcagccttggcagggtgatccccacaggttctgggatagccagggctacatagagaccctgttatctatctttatttcaagtttctgtcttccttttcgcagttctccgcaagcctttctgtactttctgctttgctcccctgccaccccttcttcaatgtctttattatctcagtcttaggaacatttcacatctgtaaacctcattcttcagttctaagtgagtggccagggtgtgcctggagctgcatgttggttggcacaggtgacactcctgccctcttggaagtcccaggctccaagaaagacttgcattaattgtctggaatactatcgagggtgcagtggtgtgtgtctttaggcatagctaccggagacaggagacttgctttaccttagaggttctttgaggctagcctaggtaacatagcagtacctcgtcctaagaaagtctaagtccatcaggtgagatggtacccaccatcagatcggctccctggagggaggactcactatcctgggctacataatgagcaccagacttgacagcaggaagaccctgtctatgacaacaataggtaaactgatgggctggggatattattgtaccacgttagagtgtcccaagcatgtttaaggctcggaggttaaccttctgcaatagttaccttccttcctaagtatttacaaatatttattttatacacatgtcggagctaactgttaagtagacacagcagcagaagcgaaggttttctacaggagggtcagaaggcttctttaaaagtggttaggctagcctgctctcaggaggcagaggcaggtacatctcttgagttcaaggccagcctggtctacagagagagttctaggaaagccacacagaaaaactcttgtctcagaaacaacgtggttgaactggatgctgaataaaggattatgatgctccgtcaggtgaggaaggcctttggctgaggagtggtccacacactgaggaccagtgtgcaaggacagcaggggaaagcatgcccgaatacactggtggcagttctcggctccaccgccctcagctgacaaaggtcaggggacattttccttagtaggatcactcttaattgcttgtcgtggttgtgcctgcctgccccaagcaatccccagtagactgctttgtaaggacacattccagactgtttacttgaagtaaatggctctggcttcttcccaggagagatgcagcgtgcctcattagaggagttgattttgtatatgcctgtgatctcagcacatgagaaggtgaggaaaggttgctgtgagttccaggtcagcctgggtctcagtcacactgtcctctagctgggtttctgtggctgtgataaaacatggaccaataccagcctgcagggttaacctggctcacacatcaggttgcagtcagtcattgagggcaggtgggaaggaaccatggaggaaactggcctgtgccccatggctccctcggcttacctgcttatacaacccaggatcccgcccacatgttacataaagaaaatgccccacaggcaagcgcacagaccagtctgatggaggctgaccttaaactgaggttcccctcccagatgagtctccttgtttctgtaagactatggcgggccctagcttactgctgaccccctgagtaaaccatgaagatctgagaatcgatgcaaaaagcaagaggaatttattgtcccagtgcactggggtcatcccagacccaaaggagaggcggtgacccccagtggcctgttctgcgtggttttatatggcttccaggggtggaatagagcatcagcaactaggcacaatatgattggtggaacagtgcgccctttaaactgattggtctttagggaatgaggtagcaggagcttactcagcctctctcttctggcctatgtgctctctgacctgtctcttttaggagaggaggggtccagtggaacttttcaaaggctgagctgacctcttcatgtcaagttgacaaaaactaactagcagagagataccctgactaaaaatagataagtaaataaacatttgtttagctttttatttatttactttttatgtaaataaattgtgtggcttttgctggcttgaaattcacattcctcttacctcaacctcttgattcctgagagattagtcatgcaccaccatgcctagattattttactgtttaaatgtgaagccttatcatggttcctcctcaacagagttatgtaagcaggtcattcactctgtctccccttgccttgtgataatgaccttacaactattgcgtcccgctcgaccggcaagaaagacgcaacaaaccagaatcttccgcggcaagagctttattgcttgcttctcaggaagatcccgaaccgggaaaatggcgctgcttttataacccgcagcgtgacgtttcagcacctgatatggcgtgacagcttccgattcgttgcttgcccatcaccccactattacaccccgagaataggagtgactaggagtgaattcactctcgcacctgcgtacaaggcttgtttactagttaggcacagtggaggcccgcgccatcttataatggcgattgctcgccgcacacacggctctcctcagagattactggcggcacgcacgcgattgctcgaagcacgtaccggctctccacatacaaccacacccaccacaccccccccacaatatcagacttggacccaaacagccctactcccagtggaactttgttgggctctctattttataaacttacatgtcagttggtaacaaatgttcttaatgctctcccattggagattgtggggggttggttttcttctgcagtttagtggtactagctttagagttctggaacaatagtctcttttctttcataatttaaatgatgtggttcagccgggcgtggtggcgcacatctttaatcccagcactggggaggcagaggcaggcggatttctgagttcgaggccagcctggtctacaaagtgagttccaggacagccaggactacacagagaaaccctgtctcgaaaaaccaaaataaataaatgaatgaatgaatgatgtggttctgggctgcagtgtagcttcgaggcagagcagttgcctggcaccagaccctgggcttaactcccagtgctgcatagatagatagatagatagatagatagatagatagatagatagatagtgcaaagatggatggatgggtggatagatgggtagatagatagatggatggatggataggtgaatggttggatggatgaaactgtgccattgttcagagtttcttgtgagaaatgcccaggccaccatcactgaagtgtttgttcctcaatagtaatttggctgtggtttgtttttttttctgttgatgcaggatcccttgtatacaggctgtcctggaactacctaggtagtggaggatggccttgaacttctggtcctctgtttccatctcccaagtgctgggattacaagcctgcaccaccgtgcctgggttatgtggcgctggggatagagtccagggtttcaggagtgttggcaagcttcctaccagctgagccacattcgtgggcccccaattttgtttttcctttgtttttagtttttggcttttagctctgttgcagtgtgtctaagcatgtatttctctttggaatatgttgagatttttttatttgtttggagggcctccgcatccctctcttccatccttcctttctttctcctttgctcccctccattttcctctccaccaccacccccttccttcttctctccttcctgaggtaggtctcaatctgtagctcagcttccggcattctttctgtctcagcctctctgctgccaagatcgcatgcatgcaccattatactcgagcggtgttatttgttgatcatttttaactagcatatcagttatagaagcttgggatgtagttggacaatagagtgtcttcctagtagtaaggctctgggttagacccacaactcctcaaaaacatcataaagatcatatgtattagcagggcctggtgacatatatcagtaatcctgattcttgggagttcaaggccatccctgagtatagagggctagagaccagcttaggctacgtgagaccccatctataaatataaagaagccttctgtcttaaaacggtgctgtgtgtgtttcagttcatgtgctgaggcctgtaacatttgctccagggacacatatctgtcacctcaaacacttgacacttatttatggtccagcttctgcactatggccctggtacagttttctgcacttatcctactgagcaatagcttttgatttggggtgctaggggttcaatccagggccttgtacatgaacccctgaatgtataggggttttttctttcttttactgttggagtttaaagtaacttatttttcaaggagtggtttctctgacctttactctacttctgtggctcaaacaagaggaccccgccgtcgtattttcccatagacccgggaactctgtttcttgtctgcttcttcagttcttttcctcgtgctcagggtaacttctgtcatgctgtctccagtttttccagtttctcctgttgtttccatttcttttgagtcaatccaaatgagttcatatttttattatactttttgtttctaaagtcctcagtcagctgtcttcatatattctattttcttttttttttaattgagaaaggatttttttaagatttatttatttatgtatatgagtaaacattgctctctttagacacaccagaagagggcatcagacctcccatcacagatggttttgagccaccatgtggttgctgggaattaaactcaggacctctggaagaacagtcagtactcttaagcactgagccatctctgcagccccaaaggatttttgttaaatatttatttttattttatgtgtatgcttgcaacatatacttgggcccctcagtagccagaaaaaggcatcagatccccttgagctggaattatagccagttgtgagctgtcatgtgggagctgggaattgaacccgcatccaccagaaaagcagccagtggggtgtttgtttatttgtttgttttgtttgtttgttgatttttcaagacagggtttctctgtctagtggtggctgtcctgaaactcactttgtaggtcaggctgacttctgattcaaaaagatctgcatatatccctgtgctgggggattaaaggcgcctgtcaccaccccctgccgcagccactgctcttagtgcagctctgtccctcctctgttcctttgctaggctcctgcctttggttttaagtctgagaagcagaccgtggctgtttgttgttttcaagtttttctctgatcttaatgtctgaggtatcttgggctttataaatacctattctcttgcaaaggattaagaaaattaaccaattttaaggtgtttctgacattaggctatttatgagactcctgtttaaatcctctggggaattttgatattgtaagtttttctttcttatattaatgtcttatttattttctgcttacgaatgctttgcctgtgcccacagaggtcagaagagggtgttagaaccggaatgagtgggaagcgccatgttatctgggaactgaacccaggtcacctacaagagcaaaaagtgctttcaaccactgagccatcccagctgccccttaagttgttcttgtaggcagtccattaggatgggctgagaaggcaaacgccccactgcccttgggttgtttccattgtcctttctgttttccaagcttttgctctgctgtttggctctgtcactcagtagtgccacctggtggccagtcttggaagtgttctgcctagagagtcgttcagtgattggtttatctgtgctcacatcttctttgtttgggcagtctttgaaaaagatcattacaaggtaatgatcttgaatgccgcttttcaggggtccccctgatagtttggcaggggctgcgccctggtgtcctggctatgcagtgtgcattagtctctgctgaacacgttccttctgtctgcatggcagaggagagagggagggagggaggaaggaagccttttccatgtgcccttgacctgacattgttttccctactgtttttccctttgaaattttgaaaatattttttctcttgtaatctatcctgaatacagtttccccttgaatgaaaacactgaggacatgagcgctcctaggtatgggttaagaaggtttattgtagataaatggaagagtgcagccagaggcatctaaaagggtccagattgaacctggccttgagatgagagaggtagggggaggaggagataagagaagagggggcagagcaagatgagtcacagacctggggggggggtagagactgtgcagccaagatggctggaggaagggcaatgacaccaggggctggagagttgagagtaggagcggcaggtgctgaggtgccaggcctctatcacagggatggactgagggaggctggcagccagagtcctcagccatttgtcggggtttgagaaccaaaacctctccctttccgctttccatctcctctcctcctgtcctatctatcccctttctctccttagaaaacactcagcagggcagtggtggctcacacctttaatcccagcctttgggaagcagaggccagccagtatcctctacagattgagttccaggacaggtaggaatacaacagagaaatcttgtcttttaaaaaaaaaacatttaaaaaaaaaaaagaaagaaaaaaaaaggaaagaaaagaaaaaagaaaatggttttctaagagataataaagtataaaaacaaaagttccatattaaaattggacaagacgtggctggtgaggtggctcagcgggtaagagcacccgactgctcttccgaaggtcctgagttcaaatcccagcaaccacatggtggctcacaaccatccgtaacaagatctgactccctcttctggagtgtctgaagacagctacagtgtacttacatataataaataaataaatctttaaaaaaaattggacaagacaaacagaaggaataatctaaaagaaggcataagaatcagaaacccacttgttggggcactcaggaatcccattaaaagcactaaactgaaagctgggattaatgtacttagctagatgcctagctttgatcttgcatgtcttatcttgattataaaaattaaacatgatttttatttttgttttggatacaagttgttggtagccaagattttcctcaaaactactccatagttgaagctggccttgaactcctgagtcccttgtctttgcctcctaaatgctaggattataggcatgcatctctatgcccagctactagatatgtgtttcttccacttatttatttactgtatgtgtgcaagaattctcgcatgccacagtttgtggtggaggttagaggatacattgggagagttagttctactgtgtagattttgggatcaaattcaagtcattagacttggtagcaagtgcctttattttgcaggatatttgatcacatggtgaaccctgagattgttatttactggaaaaacctgtttctagttggggtatgactcagtccttagaatacacctttaatcccaaacagtgaaggtaaagttagtttgtagaagaaagcacccatgtttgaaagtgatgccaaattgagtggcagacagagtgatgagtcagagaaagatttggcaggataggatctgcccgagtcacaagaagggagaggaaagggaagatacttaagggagcagggcaaagagagaagaggagatagttttaccaggagagtgtcacagagtcaggttgaagagagaataagcgagacataagacagaaggactgagaacgacggaagacagaaggactgagaccgacggaaggaagacagagaatgagaaggacccagaagattagaacaaatggccaaagttagtatgaaaccaaacaaaacaatcagtcagaggcccagagagaagccagattgaatcagtcagcataagaagagttttgagccagaacagcccagttgaccatccagccagagctcagaaagaacaagaaggggtgagcttattcagcagtaagcctgagaggctgaaaacatcctgggtctagataagattgaacggaggctacaagcttccaggactgggcctgggttagcagagggaggcaggagaggacagctgtatcaagagaataaagtgacttttataccttcacctgctaaatcatttcactgcccctgacttctgtttaaaggcagatttgggggagttgagagggttgagaaagggtctcctgtaccctgggctgaccttgaacttgaatttgccctgcaactgagaatgacccggactcccctgcttccatcccaagtgaacttagttaaacatgtgactatgaaatactagaggaatttcgatttgccatctggacattttgaccaaatgaatgaaacctaatggatctgatacctgtcatattgagtaaaattggtaggtattatgttattaaccttgtgcagtgtagcaggatactatcccacctagctgcaaagtcagccgcaaatcatcatcattaactcgagttgcctatctttaagcagctcttcttaggtgacagacctagtagtaagacaaagctgcttcagttgagacatgaaatggcagcactgtctgcttgactgggggctgaggtgtttttacctgaactctgccattttctcattcaaaagtcacttcagactgccttcactggagctcagttggtagagtacttaccgaaagtgcacaaacccctgaatccaatccccagaatggcataagttgagtatggcagtgcatgcctgtaatcccagcagtggagaggtagaagcaggaagtcagcatccttggtgacccagaaagtccgaggctagcctgggctacatgaaactctatgtatctcagtacaagcaaacaaacaacctaaagtcctgtataatgacacatggctgaatcccaggacaaggggaataggagcaggaagagtaaccattcaagaccatccttggcaacatgctgttttagggcaacctgggctacatgagaccctgtttaaaaagaaaacaaaaggccaccttgtgcacaaaggatcaaactcagggctttatagctaactgaccaataaaaagtccttaacctagtaaatagggaagtggggcctcaggttgccatggaaacctccaaactaactgccggtgaaaaccataggtaatactgccagccaaaggagagtcaagttctgttggttgcttttgagacgggatcttactgcctagcccaggctaggcttgaacttacctgtggtggttctcctgcctcagctttctaggtgctgagattaccgggatgaatcactctatatgatgtaatatagtaagaataatgtattacaacaaaaacaacagcaagaacaaaaacccaaaaaaacaaaatggcacaaatggactcttcttcaacttacccaggtatctttaaggagtgagacctgctacgtatagagcttatttaggaggctcttcagggcggtctcccttgtccacgcctttgctgtaagctcttgcacagtcaggacagaatgcctgttttaaatgaagaaagagcccttacttatcttctggccctaatttgtggggaccctccgcgtactggttgtgtactgtgattctgtttgcccctcccccagcccctgcttttttttttttaattaggtattttcctcgtttacattttcaatgctatcccaaaggtcccccatacccacccccccaatcccctacccacccactcccccttagggtttcgttattgtccctgtgtttgtttttgcagatctcttcacagacgctgctgagactgaaaaaatggccctgagcctggaagattctgaaggggtttactttgttccgtcgtttagtggattacaggtattcttttaagaagttaatagcatcagtgaacaatttctcctccagccgtgtcccaagttacatggctgtgactcttaccttggcggcagtatcacagtaggacttacaattgatcaggtttgtcatagagcttttaatatgacctaggcttgtgttataagacaggccaagttgttgagcagtgtgtaccagcaaatgggcatcctttgcttagggaaagtatactgttaagaactggaaaaaaggatgtcactggccatggctgtccatgcctttaatcctaacaccagcactttggaggcagaggcaggaagacctctgtagattcaaggcatcttaagactacatggagagaccctgtctcaaaaacaagcaaaccgcccccccccccccaaaaaaaaagagagagagaaagaaaaaataaagaaaagatgatgtaatgtcacacatacatagttaattatatattctgaagtgtatctgtaggtgtcattagctttttccaaaaattaactcttctttctaactactatgatagagttctgcttactttgatcagaagtaggtccggtaaatggcctgaccttgaaatactcaagttagtaatctttaattaatagagttgtgcttacctctgctctaacttagaatgctgtcacaaagacttaaggaaagttttggggcgtagaattaagaacaacattaatttgggggacagcgtctgctatcccttcagcctcacatagagagtggagtaaaggcgctgtggctaagagcctttgctgctcttccagaggactcaggtttgattgccagcagccatggtgggcaggtcacaatcacctaggacttcagctccaagggatagaatgccctcttttggcttctaaaaaagttaggtctggaagaatccagtctcatgctcccagaaataagactcagagtcaaaatatatttatttacaaatgccttgatcatatagctaggctcttctctgaccggctcataacttaaaataacccacctattctaatctacattctaccacatggctggttgcctgtgctcaggcaccatgcgtctgtctccgcacgtcttcctgggtacatctccccctggcactattccagaatcctttctgcctcccagatgttccacctcctatttcctgcctaagctataagccatcagatttttgttgacaggtgccacatctatacagacacaagaaattccctctacaggcttccgtggatacctctggatagacagacgacagacaggcagacagacagacacactcaatataagtaaaagtcatatctttaaaagactacttcttaaaaataaaaatatccatcttgtaaataaattttttcccaaggccgaggaagtagagtgtagctctattgagtgttggtctaggatgcattaagatctgaatttatctccagtatcacacattgtagggcacaaggtcatccttgactacatagagaattggaggccaacttgtgctatgtgggaccctgtctttaaaaaagaaaatattcaccaccaccaccactaccccatttgtcccatatttagataaaatctgaaattgtagagtttgctaatataacatagaaactagtgtgtgtgtgtgtgtgtgtgtgtgtatgtggggggatcaatagcatatcatattttcacatcaatgttttaaaatagccttattgttttaatatacatgttatatgacagagttttcaggggagatacaacacacacatacatattcacaacagaaagggaaccaaccaaaagtggacagcttaataacaacacagtacaaacttggtgaaccagtatgttttattggggttactaacggtagtacaggtgtctaacaagggcaaagataactcaaaaaaaaaaataaatagaaagagaagagaagagaagagaagagaagagaagagaagagaagagaagagaagagaagagaaaacgtggccctataaagcagccccgtcacccaaaaggtgactcctgaaagtctggacctctgcacagcctgcaggtctgggaaatcttagtaattgcccggagtctcctcccttaggagctgtttcctccttaaagacttgccaagttctactctccaggcaggtgacatttcctgagcccacagccctccctcctagaaggaatgtttcactttaaaggaaactgatatgcaacaatgtaccattctcctgtctgctgtatgatatggggcaggttcctgagggtcttctgagactgagttagcatatcaaggctgtaacaatcttggtccagcaacagctacaaaagtaggatttggttagctcactgctgatgctttctgaaaaagaaaaaaaaaaacaaacaaacaaaaaaacgtgctcggggattttatagtgacttttgacaccgctctttagcttcgcatcacctcacacacctccaaagtaatacaaagtatacaatttagtagaggagtcagcttgctgctcttccagaggtcccaagttcccttcccagttctcaatggtctgtattgtgaccttgtgggatgcttcaggggatctagcacccccttctgactttcacaggtacacagacacgaggcatacacctacaaaaccatgggctgcacataaaaattaaacaacatttaaaaaacgtcaacacgatggctgaagcctgaggtggaaaccgggtcaggggtttaagactggctttgcatacatagtgaattcgagaccaggtatgagaaccctatcaaaaaacaacggctgagtatgttggcacacatctttagtcctggctttggaagacagaaggcaggttaatttctgtaagtttgaggacagcctggtctatataatgagttctagaccagttgaggctacatgataagacctcgactcaaaaaaaaaaaaaaagttatcttttgccaggtgtcacatgcttttataatcccagcatgtgggaggtaggagggtcgtctcaagtttgaggacatctctttggactgtaatttaaattgtttaataagcattctgctatcaagcctgtagatgtcatttagaacataaatgatgttattttatctcttactttaggctccattaaatgacccctgtgcctgtgcctcttttatgggtttgaagcactccactaataaataccatcttgtccgagcaatattggagtcaatagctttcaggtaaagcccgtcaggactccctctgtcaccttcagactttgtcaattcctttatagatttgctgccaaactgaaattttctgttgggcaggattatcatgctgctgctgctgatgttagtggaagggttctatttaaattatgtatatgttcttaacttctgagccttctctctagctcttgagggattagtttggtttggtttggttttggttttgagcgagggtatcattgtgctctggctggcctgaaactcaactttgtagcccaggctggcttcagaatcctggtgaatctcttccttagcctcctagtactgaaattacaggtgtgaacgacttaatttgataaaatgaaagagaagcttctcttaattttattttaagatgtttattttattacttattatttgtatatgtgcgtgggtagggatgtttctgcaccaccgtgcacgtgtggagccaaaaggcaacgctgtgagctcagctcttcccttccactgttacgaggcttctagagacccagctgaggtccccaggcctggtgtcgagcataatcaaccttgctaaccctctgaattttaattaaacatatgccttccacttaataggcatgtacgtgttttaaatttttattttatttaaaaatgtagattttgttttatgtacatcatgtcttgcctgcgtctatgacatacgtccctggtgcctacaggagacagaagagggtgttgggtctcctggaaccagacttacagactgttctgagcgtctgtttgggtgctgagaattgaacccaggtctcttgaaagagtagcaagtgctcttaaccactgagccatctctccgatctgtatctatggagactggaaagctggctcagtggttaggagcacgggttactttgcagaggacccaggtttggttcccagcacccacatggcagctggcaaccatctctaactccagtcccaggggctctggtgtcctcttctggctctcacgggacttcagccatgttgtgcatatacacacaccaaaggcagaacacccacacacttagaataagtaaatcttcaaagataacttaattgcgatgtataaggagtgtgtattggcactttaatatttgtttgagtgtgtcatagtaaagggtactgattaaatagataataaccacttgaaatagactgacaataagttaagccctaattgtaaaatagatattacactatcgtgcaggaagatggaaaacacaaggccccagggttttgtagctgagcatagactaggtgctgtccacttggccagtgtttcttttgcatcttttattgagtcaagtcaatacaaatagttctacttttttttttaaacatcagactgaaatacagagttgtgaccagaatgggctctcagtcgttaccttgtctttcactaggaacaaacagttgtacgacatgctgcagagagaaatccagattcccgtcacgaacatccggtatgtaagctttgtttctgacaggtccagttaaggagctgcaggccaatcagcctgatgggttagctcagtggttggacatttccctgggtttgagccctacggccacaaaacggtcaagctagacactaaaagaaggggctgttatttcttttcatttttaacatgacttccaaagcttatgcctagctcttcggcaataacattgttggtcatagcaatttggagaggaaaatgctagctttagatttatgagaatatagcacaatgtgaaacctcaggggacctggtcaagtgtgtttgctatatatacaaatcattaacattgtatcattgtgtggtgaggcattcggctgttttaccttcctttatatacaaatgagctcttctggtggctttagtttatcttgtcataatcttgagcttagtgacaaaccaaatgacagatgccaatacagagacctgaataaagagcagaatttatctgggagaaggaagtcagggtcttctgttggatgccaactactgagcccaccagactccagcagagagcgcagagcccgggccacactagtggccctagttaaactcagtgggtcgcaaaacaggacgaatagacacaaacatgagaaaaaagatttgtagggagggatggataggcagagatggtggggaggtgggagatgaggaggggtggaaatagtatgaattatgtcgatgtgtgaaattctcaaagaacaaactaagaataaaaggaaaagtatttcaagattactcagtaagatcctataaccgagccatggtgcttactcgcagcacttgggaggcaggggcaggagacttggaacctcttcaactagggagtcctggacaacccgggcttcatgagatctttgtggttttgtttctgttgtaaagatctcatcctatgttcagcgccaagtgatatcattttgaaactaaaaatagaagcatagccgggttgaggtggcagctcagtggtcaaggcctgcttagcacccacaaagctctggctcaacgtccagcactctcccccaaaaagttagctttgtaaagtctagtttgtggctgtctaagagtaactcacttcgactcctgcttcccacagggcagatggaggcgtgtgtaacaacgctttcgtcatgcagatgacttcagacctgataaatgagaagatagacagacctgcccacttcgacatgtcctgcttgggggcagcctctctggctggcctcgctgttggtatgtatgtgtggattttatcaaaaggagcccttccttgtgagcttatccccagtcacaaaatggcagagagcctctggaaagtttgtctacatgggtgttcatacatagacttctgactcaccagtcaccctctgacctctgttagaagcctaacttccatcctaactttacaagaaagactgtgaagtagggacattttagtgacagctacttaagtctctagcaagggatgggtctgggatgaactttctcagtgtacgatatgacaggaaagaactgttatacagatggtggtcagggagaccactgaggaatggaagtctgcattgttaccccttggaatggatggcccaaggaagagtgagaatgtagaactagagagcaggctgaggaccaagagtgaaaagtgactaagaaatgttagtggtaagagcaaattctagccaacccagcccaacagggttctcactggatacaggccagggttatgggagagccattgcggatgaacctggagacctggaagttgaaccatagttgagaagagatcagatgcattggtgggtttgccactagacctggtttatttgtttttttagaaatcaacgaatttagaaaattgctggtcagggatggtgcacacctttagttctagcannnnnnnnnnnnnnnnnnnnagagagagagagagagaaaatcagccattcttctgcttgcatcagccattaagcacctacaagatactcggagctgggagttgtgtgatcaaacagatgcctgttgtatgtgaagctctctgttcaaccctaatataaagaaaaaagtgttataaatactattcaaaaataaaactaagagttaaaaagcaaaaaaaaaaaaaaaaaaaaaaaaaaagaaagctttttgagacagggtttctctgtgtagtcctggctgtcctggaactcaatctgtagaccaggctaacctggaactcacagaaatccacctgtctctgcctcctgagtgctgagattcaagatgttgaccaccaccactcagtgcaagatattttttgaaatcctagtgtatcgattccctgaggaatatttatttggtcatgtatatactttcaaagcagcaagtgtcccggactgcgttttaacatatgagttgctctccttgccgcaacagtcacacactgatggagacattttacgaacccgttctttgccttaaattttgagattttttttttcatctgtaggattttgggcggacaaggaagagctccagaagctgaggcaaagcgagatggttttcaagcctcagaagaagtggcaggaatacgaggtgaatatggaaaactgggtaaaagcggtgaagcgctccatgaattggtataacaagacgtagccccgaggagccaaggaaaacctgcaggccgggggacaggatgtgccggtgggggctgcacaggggtcaccgtgtgactgtggccgagaggaaaagattcgaaacaagccttgcaggctgaaagaagaagccaggctcttttaaacaaaacaaaacaaaacaaaacaacctcacatacaaaaaaaaatacttcttattttttaaattcaaatcatagtgaaatttttaggcagcaagacctcaaaattgagtcttctttcttctggcgatttccaaaggacactgtccacttctaactgcatttcagatacttgtgagtcctctttttttatacagggagaatggcacatacttcatagtcattgtttaccctaatggttccgggtcacattttgttaaaaatgatgaaatgttttcttaaatttgaaatcaagagggctctttgaaacccacatagctaaaacgaagaggtagttgagaggacgttttatatataaagccataattgtcaagtgtcatatcctcagataagctctgacgtcactcttcagtgacctccttagtcagcgcacgcgttcctttgtcatgcataaagacacggccttaattcttctgcacaacctgagctgtttcgttgttttcattgaggcacagtgtcaccacgtagcccaggctagcctgaaacatgaccttcttcctcatctctcagattctaagattataggcgggcaccatcgtgcctgggtgggcactcagcatacattgaggaacgcatctcagtggactgaaagggatgttgaggctgggcatggtggcaaatatggggactttcgaggctgcggccaggggagcttgagcttggagcctgtccagacgatgcagtgaagtccaggcaatctgggtgacacagtgaggccttgtctttgaaaatatctcatttgtttgagagaagatcctgtttagcccatgccagtttctaactcttgaacccccaactttagtctctagagttgtgtgtcacattctatttttataaaatgcaagcagttaatgtaaacctttcttcctggctctttatctttcttgacttgttgaaatgctcgcataaatgtcccctttttaaaaagtgcctacttcacagagtttaattattgttagttttgtttgtttgtttgtttgtttgttttggcaaccgagtctcattatgtagctcaggctagcctaaaactcccgaacctcttgacttagtctcctgaggtgccaggtttgttggcgcttactctgacatcacagtttatgttgaagcaccccagcttatcagtaacttaagaattgcctttctgggttacttgatgtgacttttggtatttgtcctgctcacctctgagggatagcagaggctggcagatcaggtgatggaatgtgtcttggtgacaatggctgtaaaccagtcagccactaagcagcagtcccctgttaggaaacttcgtggctggaagcaggtggaggagtcagtagagagaggcctcagactgggtataaaattgtcctggggtggttggcagtgctccagcctcttttactaaactctgttgcctctcacgtcatggagatttggattttcttgaggtacatgaacttgcccccatctggtccatatcccataaaagtgctactgttctagaactatctactacataattacctcactaaaggagcaactcttaagagggaatgttatatttctgtcatatgttcatttgggagtcagttattctagaataacaggtacattgtgtttttttgcaaattattttcttgggctcccagtgtcttcaattgttaaaaatgtttcttaatggcaacattatagcaaacatgtagcttcgtttattctattaacttttggagacaagccaacaagatgtctcagcaggtaaaagcacttgttacacaggcttaccagcctgagttaaatccccagaaggaacgtgtgtccaggtagaggaagaaaactgactccagagttttcttatgacttccacgtgtacatggtgctgtgcacacttcctccataataatactacaaagtctaaaaggcttggaaaggtctttgttagaggtgcatttgtttactgtagcaaaccagatcttaggtagaaaatatctttttctttctcttctgcagcatcgttgcaggtttcccataaatcttgtgagaactgctttatgtggaggtttttacaggttctgctgataggttcctaggatgtaactcggtccctttgtatcaggagagactaaactgtgatgttaactatgaacggtctctttgccgttccttccctacactcttcctaactgacagctgtgcagtcagggataaatgcccttcagatactgtgaaaaacacctaatgtgtcatctggattgaaacatcgactttctttcttcctccgtggctctggatgctactcttttccttttttcatttctggccatattttaatgacagggcttagtgatgcttgtaatcattaagtaaaatcagaaatgttatgtcatttgcttttgaggtcgcaggaacagttgttaatcaaaaacagttgaagaatattgtcccttcatctgcctcttgaaaataatttctaatatgctaatatttctcagcatattttctcttccttttgtaaatctaccaggcattttaagaggactccagcaaactcagaaaggacagtgttcctgtcttaacgtggcactaactgcattatctatgacttactgatcttcgagtctcttgtattcatcagtggtatggtttctcagtgtcagcattgatctttgttttgtttttatgacagggtctcaatgtgtagccctggctgtcctggaactcactgtgtagaccaggttgcctcctcattcacagaactccgcctgcctctgcctcctgagttctggggttaaaggtgtgcaccaccacaccttgcaacattgacattttgaactgcatctgactttgctttgggatgctatgctggacacagtgggatgcttggcagtatccctgacctccactgttcagcattcccctgggttttatggccccaaatgcctgccaacattggccatcctgggaggcaaaaatcattgtcatttgagaaccactgatgcaggctgttagaataaacatgaggatttggtgaatatagtcacattcccaatagtctatgcactgttttctcctgggaaatgaattcttaacagtgaaaaagtagagagtatcctaaagtgcggtttcggttttgctcggtaatgaagaaaaagtgttggttggttgtgtcccttacccatcacctctgaagatggatcaaacctacagccttgagcctgatagtcaactattccactactgagctacatcccatcccgtaagtctcttgtagtacttatgtacctcagctctgctcctgtgtgttcacaattagtggacatttggcctcacgatatgacggttatattctgtagaccatctgttcctacccctgcacttctgagacagggcccaggttggtctggaactcatggcagtattcctgcctcagcctcctgggtgctgagatcacaggcatgaatcaccatgcctggctttgcttcagttttatctctgaacaaggaaaggactaccactgtcccaaagcttcactcgatgcttcctgaagccaaagccacgtttgctccccacagaacttaacactgtgccttcctgtctgtgggtggatttttacttcacatttatctttgatcttacatttattggtagtatcttatacttgtctaaaaggaagatatctacagctaggggtgtgatgtttattgtttaaaaaaaaaaaggttacatgtctgtatatttcgagtatatttttgtagagatatacatccatagatacacatggtataagctggtctgggaattcaccccagagtctggtgcatgctaagcatgcccagctactttgaacttcttaaggtatacttgaaactttcatccacagttttatatgttagactgcagctaactagccttgtgttgtgcccaacactttggtgctatagaagaaacctcataagtagcctcttcattaagcaaacacctatctataccagggaccagtttctttgtgttgtgtgtgtgtgttcttttgttttgtcttttaaggttttttgtttgtttgttttattttttttgagagagtgtctcactatgtagctctgactatcctggaactagagatctgcctgcctctgcctcccaagtgctggtattaaaggtctcctcccggagctactgggcctggatttggggactggttatcaaggtaaactacagctcaagaggctggcaagactttttcagttcatagaaataattgctatgcctcagagtcctccaactttgagtctacggtcaccaaaactagtctaaagaaggctcggatcagctcgaaggagtctggatccctttgggaagcttcgattgtgctttttcgagtcagggcaagaagcttcaggcataccctgaacctttaagattctcctgattgggaatccaaagcctgaaagaggcttcacaattaggtaattctgaagtcctgttcttctattcttacagcctctttgccctttgcattttttccccacgtctagatagctatggggattgcttaggaaaaactgatgtaggagctcacatggttcatgggtggggtggcacggtgcttgtatagtgagcatagtgccctaggtttgtccccagaggtacaagtcagaaagaaacgatcaagaaccacactcagagtggctgttccattttatgtttctgccctccattcctgtgtgagtggtccagtctctccatgttctctcaccagcattcagtgatgttaaatactatttcatgtgctttctgccatctgcttgccctcatcttttacatctttgttcttgtctttgtcagtttgtcaattagattgtttactaaacgagccatatcttttagtaaagttttaaaaataatatctgacttcagaagtcaggaaataggacttttcaaatcatttaagtcagaattttaaagcatcttgaacattgtcttacagtgtgcccaacagaagggcatttacttctgggctcattacacagtgtgaggctcatgctgtgaaaagaacaaaaacaaggtttctacggcaactttacttaagatttcctgtagtgtgtccggagacatactttatatatagcaattatcatgtttctaactgtgcaatggtatgatttatgtaaagattcaaaatgattttgtggaaaattaattagcaaagatggataagtgtagatttgaattcttatgtatcagtaatttatgatcttatttctctgttattgtgaatgttggttttattaaagagttattgaaactgtcataaaccattttataggtctttaataaaattaaagatgaaatcagcaatagaaatacttttcatatgcatatttaaaaaaaaaacattcttttttgtgtgtttgttttgttggtttttttttttttttctttcaagataggatgtctctgtgtagccctggctgtcctggaacttgttctatagaccaggttggcctcgaactcaaaaagatccgcctgcctctgtctcctgagtgtcggaaccaaaggcatgcatcaccaccccatgacctgtttaagacattccattattattattattttaactttttattgactctgtgcgtttcacctcatgcaccccaggctggctcatctccccatccttcatatccaccctgcaccctggcagcctccccctcataagacacatacaaataacataaatcaaagcatgaaaaaactttctcgtggtggaagctgtagtgtgtcacagtctatccctctgtccacatgtcttcacttggaaatagtcattgcaatgagtcatcggtctgacccgagatctctggcttctgtgacaccatcaatatggtatcttcatggaaactcctcctggttatcctgttgctgccttcaaccatggagatcctgtagccttggatcggctggagtgccccttcacatgtacccactgttagcagatgatgcagatttgggggtgggtcaaatcacagccctgaatcaagatctgagtagcagcccagcctagtcaatgtgcaggctctcccttatctgcaccaccagggtgagctctccagcactgcctggctaggccacccagtgccaccatccgcaggatgcagggtcatctctccctgtctcatccccctggagcaggctcactagcacccatgcctgtttaaaacactaagtagcctagattaacctcagatctcctaagtacctgaggatgaccttgaactccctatcctgtctccatctccccgggcccaggattacaggcgtgtgtcatcacacctggctttttaaacttatccagagagtgaaagtcaggctctcaggcttgcatggcaagctctttacgaactgaactatctctccagaatattttttatctattttagtttatggatttggattctgttcattttgtttgctgttttgtttttgagactaggtctctttagcccaggctgacctcaaactcagtatgaagcccagcctggcactgatcctgtggtagtactgtttcattctcttcacattaggattacaggcatgagctgccatgcatggctttgtaaaaaaaaaaaatatatatatatatataattgaaatatatatatatatatatatatttcaattttattacattggtgatttgactgcattttgtctctgtgagtgtgtcaggtcccctagaacaagagttgcagatggttgtgagctgccatgtgggtgctgggaattgaaccagggtcctctggaagagctactagttctcttaaccactgagccacctttccaaccctgtagtttacattcttgcacaaaggacattaccagagaagatgatctgttctttgtgattggagatatcagttgttgtaaagctatactattgtaaaaatatttagaaagattatataaatagctgaaagaaaggtaatttgatatattagtcctacagattttacaatccctctgaaaattataatttaaaatgttttaggaaactaccatgaaacagtgaatgactgctctgtcaatgctggtatgttaaagccactttagttgggtgtatctcatttgttgctttgagtttgcatacatagaaacaactgagtggtggtagattcagccagattatctagtcaggttccctaaccagagtgacatctctactttctctgaacccattgtatcattctatagtgtagtggttctcaaccttcctaaagctgcaaccctttaacagagctcctcgtgttgcggtgacccccaaccataacattattttcattgctacttcataactgtaattttggttgttatgaaccacagtgtaaacatctgtattttctgatggtcggtcgagaccacaggttgagaagccctttgggacatttgggtaaatactgagatctttgaagaaaggaagggagtttgtattgtgttttcaaggagatagtctaataaggaggtgtggggaattgcagactcgtctccagttgagctgaggtctgaaccccgaaaatggtgataattcacctacatgacacggtaggcgttctctcatgttcctggaactctggctcctgcctaagttactggcccccacagcccccacaatagaagcatggctagaagccacgtaggcaatggcccaagcttctgaccttcaggctaaactccttccgttacctagcaacagtaagataagatagcatacattaaaaagggctgttcagccccacctcgatttcttacttctctcttacttcttacccctcactctcaccctttctgtcttctcctttcctctctccctcttactctctttctctctagcctttcctcttctctctctctctctctctctctctctctctctctctctctctctcccttctctctttccccctgcctttctataataaagttctaaaaccatagacagtctctgctcatcaaggctgcgctcactctcagtgttgggagcttcttccctcatccctctctcctacaaccctggtggcttgagcaaaatagttccggggtttccagataggactgcctcttgccactaccccccgaagtgggtcagagacttagatgcccacccggggatgagtggaaggtagatagcagccctcccacacctgacagaccagagaatagataaaactctggcaggggggctggtgaaatggctcagtggttaagagcgccgactgctcttccaaaggtcctgagttcaaatcccagcaaccacatggtggcttacaaccattcctaacgaaatctgatgccatcttctggagtgtctgaagacagctacagtgtacttacatataataaattaaaaaaaaaaaaaaaaaaacctctggcagggtgtgggttttcccttccctctcttcccccagagccccctttttagttcccaacaaggaggatggacagagccattatagagataagaagacattatctgggaccgacttatctagaattctatagattaggttggcttgtgagcttgccttaaagattttttttttttttttttggtttttcgagacatggtttctctgtatagccctggctgtcctggaactcactttgtagaccaggttggcctcgaactcagaaatttgcctgcctgtgcctccagagtgctgggattaaaggcctgtgccaccacgcccagcaaagatttatttttatttatgtatatgtgtatgctatatgtgttcaagtaaggtgtccttggaagccagaagagggcgttccagatcccctggaactgcactatgtgggtgttcggaacatagctcaggtcatcttcaagaacagaaagtattcccaaaccctgagctatctctactactccatcatcgactatgggtgtaatctcattagctgctgggtgtacctgctgccttcttttccccaaaatgatgctctgtaacctggaattgtgaacaaaataaaccctttctccctatagcacttttgtctagtgttctgtcaacaataggaattgaaactacaacatgttccatatagaatcacctcccatcaagatattcattattgatcatgcactttcctgtttgaataagtatgtataggctgggcatggtgggatacacctttaaccccaacattcaggagacagaggcagacagatctctctgagtttgaagccatcctggtctacatggcaatttccaggagagctagagctgtatctcaaaaaacaaaacaatacaaagtgtgtgtgtgtacctagtataagtgagttcttaggtttatcacaacacacacacggacacggacacacacacggacacagaaaatttaaaatagcatctcagatctcaagaatgaaattctatattttaataaacttccctggtgttatgttttgattgtttatttgtttgtttatttattatttatttatttatttaagacagagtccttatattaactattcaattcatgactttggaccccctgatctgcctcccaagtgctgggattaccgatgttctactgtgtagtaaaacgcttctatggcattgtaagacgagcttggcatgtgtgtctgaacccactctagcattttttaaagattttatttattatatataagtgcactgtagctgtcttcagacactttttcttctctctctggccctgctcactccagccccaagatttctttatttgttaagtacactgtagctgtcttcagacaccccagaagagggcatcatatcccattacagatggttgtgagccactttgtggttgctgggatttgaactcaggacctttggaagagcagtcagtgctcttagccgctgagccgtctctccagacccccaccctagcattttcacccaggccaaatatgaatgaagtagagggttgacatgttgggtaactgtaagaatggaactgggagccataaggagttcacgctccttaaacagtccccctgagatcaaggctcagtagcctccagcagtgactgtcttcatgacatccttggactgacttcgcctagctattcccccactcctgttctttgtagccatatccccaaataaaccaccagaatgtaaccatttatgacaagctgggccaggtggcatacacctgtaatcccagcacttggtatgtggaagctggcagatctttgagcagaagcaccctagctttgactattagcataaaggagtccaggacagccatagttacattgtgagactttgtctcaaaaaaacaaaaaacaaaacaaaacaaaaaaaaaccaaaagttgtttttgtagaggactggggagatgactcagtatggtaaagtgcttgctatgtaatcatgagacctacttgagttctatctctagtatccatgtgaaaaaccctgggtgaggctacagacaactatgtgtcaggaagtgggcccagacaggtggttcccagcgctgggctggcttgccagccaggcagcctagctcagtaagagagttgtcttaaaaagtacgatagaaaaatacatccagtgttgctctggcctgcacgggtctgtgtagaggaacatgcctgctcacaggtgcacacacatgcatataccacacacactaaataaagttctcttttaaaagattttttttgtcacaatgtttgcaacagacaaacttagatctgcactgctagttgttaaatattttgactctcactctccaatgatctaaactctgaaaacatttttacagatgcaagaaacgtgtacacagagattcagggcatccacataagagggggaagggtaaaacaacagaatgttcatcagcaagagcatttatacatatgttttctttatttgctttttgagacagggacccatgctagcccaggccagacttgaattctccaagtatctaagacagaaaagctggagggatgcagagttccaggccagcctgggctacagagtgagattttttttttaatggatattttattttttattagatattttcttcatttacatttcaaatgttatcccaaagtcccctataccctcccggccccactcccctacccactcactccctcttcttggccctggcattcccctgtactggggcatataaagtttgcaagaccaaggggcctctcttcccaatgatggccgactaggccatcttctgctacatatgcagcttgagacacgagctctgggggtactggttagttcatattgttgttccaccttatagggttgcagaccccttcagctccttgggtactttctctagctcctccattgggggccctgtgttccatccaatagatgactttgagcatccacttctgtaatttccaggcactggcatagcctcacaagagacagctatatcagggtcctttcagcaaaatcttgctgtcatatgcggtagtgtctgggtttggtggttgtttatgggatggatccccggatggggcagtctctggatggtccatcctttcgtctcagctccgaactttgtctctgtaactccttccctgggtattttattctctattctagggaagaatgaagtattcacgcgttggtcttccttcttgattttcttgtggtgagattctttttaagcagataaataaaaggactatgtgtgaaattaagaacttgctttcatgaagagtaactgaagggctggcgagatggctcagtggttaggagtgccgactgctcttccgaagatcccgagttcaaatcccagcaaccacatggtggctcacaaacatccgtaatgaaatctgatgccctcttctggagtgtctgaagacagctacagtgtacttacatataataaataaataaatctttaaaaaaaaagtaactgaaattggtctactgccctaatttccagttttcagaaatggacagggttggggggagaggctgtatttcacatttgaggcttccattccaccttactctgttacagtgattaatctgtacacactaggattatagctgccggacaacccttaggtggacattcccattaatgtgttttttctttcttcagtcattgaatggattgggcatagaagaggatgctttaaacaacaaaacaacaacaacaaaatcatgtttggaactgatctgacagcaaattttctaggtgatgaaaaaggtgtcataaatggctgtttctgctcacagtgtgtttggctgaggtgacaatggcatccctttgtgaggttgtaggaaatgtggaatctaggtcacaccttgtaatataaagtttaatgagaattccccaggtgattcctaggacattaaagtccgaggagaccaggaagccacacacagcaggagactcacatcatatgaaatcccttgactttaataggctgcagtttccatagccccctttccattgatgattctaaagcccacatacacacttaccaaaaaggttgactttcttcctcctcnnnnnnnnnnnnnnnnnnnnnnnnnnnnnnnnnnnnnnnnnnnnnnnnnnnnnnnnnnnnnnnnnnnnnnnnnnnnnnnnnnnnnnnntctagatagggtttctctgagtatccctggctgtcctgaaacttactcagtagttcaagggtggccttgaacttacagaaatccacctgcctctgcctcaggagtgccagaggggaggttgacttgtaaaagtttacctatttattattaccgtgtgtgcttatgtgtggacttgtatgtgctatgatgtacatggaggtcagaggacaagaattcttggcactttccttccaccgtgagtactgcggatttaactcttcagcaggccatctgatgtgtgtgtggcaagagcctccttacccattggcctggctagttttatgtcaacttgacacaagctagagtcatctgaaagggggagatctcaatggagggaaaacctccataagacccagctctaggacattttcttaattactgcttgataggggagtgtccagctcattttgggtggggtcatttgtgggatgatggccctgggttccgttaagaaagcaggctgagcaagccatgaggagaaagccagtaagcagcacttcctccatggcctctgcatcagctcaggtttcaggttcctgctctgtgagttcctgtcctgacttctttcaatgatagactacaatgtggagctgtaagtcaactaaaccctttcctacccaagttgctctccggtcatggtattttatcccagcagtagaaaccctaagacacccattcagcatctcactggccctgggtttagttttgagctgagctggccttgaactcacgaagtactagaggctggctttgaattcctgatttttccatctctgcttcactagtccaggcaggagccaccatgctgaccaacagtggctttatctgtatatgtccccatctgtcttatatgccacaggcaacgctctctcagtgaggaacatacagtttttgttctttttttttttttttaatatcagtttaaaacagagtttctaaacctctagggtttttaaattcactctgtaccccagttcaaggttagccttgaactttactttggggccttggaagatattgtggaatgtggacttttaagtgttaaggttagccttgaactcacaactctccagtcttagtcttctgtatacctagtataacaggtacgtactactaggccttgttcatactttgcttctctatccgaatatacttactggctagctgctgtatatttatcaataatggcactgaaaaggaattgctctgactctgaaggcacttagagccacccaggctacagatccaagtgaattattgcagctttcataaatgttagtaaggaagacaaaattttatggggaaagagctggaggtggtcagtcaagagagtcctttttggagtaagttaagtttagctgataagatatacaattaactgggtgagctgaggggttgttgtaagctcacgaaacaccatttaagagctcttgagacatttatgctcgtctttcccatctgtgcacagtaagtgcctaataagtgctgagtcaataaatataccacggaagttcagacctctattccctggcattggagatggtacagacttaatttcttttttcaaaggaaacagaatcccttaacgggggaatgagaagggagacagacagctcttggtgcacattgctaaactgaaactatgagtgggaatgaaaaattgatttacatgaattttcatccctggagcaagtcaatttattctgtaccagagaactttgagtatctggcttcaaagccaagctgttcttccatgttctgagtttttggcctgctgtgaaaccagtgtttgctctcgccttctgcagcacacggtcctgaggtcatggaaattcacagctagatcaaaccagggtatggaaaatttgaaaccttccactgtgtattttactttggggccttggaagatattgtggaatgtggacttttaagtgatctctttcaaaggcaatgctaaagagtgataactggcttacttactgaacactgtgtgcgctgcatatctcatgctaactctcacaagagcataccaagctatatagtaacttcatattgctcaccttagggtttagttcttcttttgttggtttttggtttattttgttttatcttggttgttttttctttgtgtttttgttttgttttgttttgttttgttttttgactttttgagacatgattccttatgtagcactgacttgcctattcaatatgtagaccaggctggcctgaacctcacagagatctacatgcctctgcctcccaagtgctgggactaaaggcatggaccactgtgactggttcaaatgaaattttgtcttcaagttttcattttagaaagaaattaagggaatatggtaagatgaatcagagggtaaagccgtttgtttccaaacctgaaaacattatgttaatcctcaagacccacacagtagaagacaagcatcaattcctgcaagttgtcctttgatctctacacttttatatccccacccccaccccattctagcatgggcatgtagtgtttagttgacaagtaatgagattttgggcattcctttctccacattaacccaaacatttaatgtgccagcctctcttgtggctacacatgttgaggggcttcataatttttcactactggattgaagtaaagacttatttctgtcat

SEQ ID NO: 548 - DNA, 7072 bp, Mus musculus
tatagctccgcgctggccggcccgtggcgactgcagtgttcggggtcgcgatgtcagggcagcaggagcgtgcagagcggcagcgagaggaactgagcgcgtcggcctcgccgccctcccgcttcgtgctggggctggacgtgggcagcacggtgatccgctgccacgtctatgaccagacggcgcgagtgcgaggctccagcgcgcagaaggtagaaaatgtttaccctcaacctggctgggttgaaatcgatcctgattctctctgggctcagtttgttgccgtaataaaagatgctgtcaaagctgcaggggtgcagatgaatcaaattgtcggtcttggcatatcaacacagagagccactttcattacatggaacaagaaaacaggccatcattttcacaacttcattagctggcaagacctaagggcagctgaacttgtaaagtcctggaataattctctcataatgaagctattgcatggggccacccgagtccttcatttcttcagtagaagtaaagtaatgctaacggtcagccgcttcaatttcagcacccagcatgccaccttaagattgacctggattttacaaaacctatctgaggtgaaaagggcagttgaagaagacaattgttgctttgggacgattgatacctggctgttatacaagctcacgaaaggtaaagtcgacatcacagacctctataattttggatcagtggatgagaagatatttggcgtgcctataccagttgttgccttggttggtgaccagcagtcggccatgtttggagagtgctgcttcgagacgggagatgtgaagctaaccatgggaactggaacatttttggatatcaatactggaaaaaaccttcagcatgttaatggaggcttttatccactaattggatggaagattgggcaagaacttgtatgtttagctgaaggcaatgcaggagacacgggcaccgccataatgtgggctcaaaaattagatctcttcacagacgctgctgagactgaaaaaatggccctgagcctggaagattctgaaggggtttactttgttccgtcgtttagtggattacaggctccattaaatgacccctgtgcctgtgcctcttttatgggtttgaagcactccactaataaataccatcttgtccgagcaatattggagtcaatagctttcaggaacaaacagttgtacgacatgctgcagagagaaatccagattcccgtcacgaacatccgggcagatggaggcgtgtgtaacaacgctttcgtcatgcagatgacttcagacctgataaatgagaagatagacagacctgcccacttcgacatgtcctgcttgggggcagcctctctggctggcctcgctgttggattttgggcggacaaggaagagctccagaagctgaggcaaagcgagatggttttcaagcctcagaagaagtggcaggaatacgaggtgaatatggaaaactgggtaaaagcggtgaagcgctccatgaattggtataacaagacgtagccccgaggagccaaggaaaacctgcaggccgggggacaggatgtgccggtgggggctgcacaggggtcaccgtgtgactgtggccgagaggaaaagattcgaaacaagccttgcaggctgaaagaagaagccaggctcttttaaacaaaacaaaacaaaacaaaacaacctcacatacaaaaaaaaatacttcttattttttaaattcaaatcatagtgaaatttttaggcagcaagacctcaaaattgagtcttctttcttctggcgatttccaaaggacactgtccacttctaactgcatttcagatacttgtgagtcctctttttttatacagggagaatggcacatacttcatagtcattgtttaccctaatggttccgggtcacattttgttaaaaatgatgaaatgttttcttaaatttgaaatcaagagggctctttgaaacccacatagctaaaacgaagaggtagttgagaggacgttttatatataaagccataattgtcaagtgtcatatcctcagataagctctgacgtcactcttcagtgacctccttagtcagcgcacgcgttcctttgtcatgcataaagacacggccttaattcttctgcacaacctgagctgtttcgttgttttcattgaggcacagtgtcaccacgtagcccaggctagcctgaaacatgaccttcttcctcatctctcagattctaagattataggcgggcaccatcgtgcctgggtgggcactcagcatacattgaggaacgcatctcagtggactgaaagggatgttgaggctgggcatggtggcaaatatggggactttcgaggctgcggccaggggagcttgagcttggagcctgtccagacgatgcagtgaagtccaggcaatctgggtgacacagtgaggccttgtctttgaaaatatctcatttgtttgagagaagatcctgtttagcccatgccagtttctaactcttgaacccccaactttagtctctagagttgtgtgtcacattctatttttataaaatgcaagcagttaatgtaaacctttcttcctggctctttatctttcttgacttgttgaaatgctcgcataaatgtcccctttttaaaaagtgcctacttcacagagtttaattattgttagttttgtttgtttgtttgtttgtttgttttggcaaccgagtctcattatgtagctcaggctagcctaaaactcccgaacctcttgacttagtctcctgaggtgccaggtttgttggcgcttactctgacatcacagtttatgttgaagcaccccagcttatcagtaacttaagaattgcctttctgggttacttgatgtgacttttggtatttgtcctgctcacctctgagggatagcagaggctggcagatcaggtgatggaatgtgtcttggtgacaatggctgtaaaccagtcagccactaagcagcagtcccctgttaggaaacttcgtggctggaagcaggtggaggagtcagtagagagaggcctcagactgggtataaaattgtcctggggtggttggcagtgctccagcctcttttactaaactctgttgcctctcacgtcatggagatttggattttcttgaggtacatgaacttgcccccatctggtccatatcccataaaagtgctactgttctagaactatctactacataattacctcactaaaggagcaactcttaagagggaatgttatatttctgtcatatgttcatttgggagtcagttattctagaataacaggtacattgtgtttttttgcaaattattttcttgggctcccagtgtcttcaattgttaaaaatgtttcttaatggcaacattatagcaaacatgtagcttcgtttattctattaacttttggagacaagccaacaagatgtctcagcaggtaaaagcacttgttacacaggcttaccagcctgagttaaatccccagaaggaacgtgtgtccaggtagaggaagaaaactgactccagagttttcttatgacttccacgtgtacatggtgctgtgcacacttcctccataataatactacaaagtctaaaaggcttggaaaggtctttgttagaggtgcatttgtttactgtagcaaaccagatcttaggtagaaaatatctttttctttctcttctgcagcatcgttgcaggtttcccataaatcttgtgagaactgctttatgtggaggtttttacaggttctgctgataggttcctaggatgtaactcggtccctttgtatcaggagagactaaactgtgatgttaactatgaacggtctctttgccgttccttccctacactcttcctaactgacagctgtgcagtcagggataaatgcccttcagatactgtgaaaaacacctaatgtgtcatctggattgaaacatcgactttctttcttcctccgtggctctggatgctactcttttccttttttcatttctggccatattttaatgacagggcttagtgatgcttgtaatcattaagtaaaatcagaaatgttatgtcatttgcttttgaggtcgcaggaacagttgttaatcaaaaacagttgaagaatattgtcccttcatctgcctcttgaaaataatttctaatatgctaatatttctcagcatattttctcttccttttgtaaatctaccaggcattttaagaggactccagcaaactcagaaaggacagtgttcctgtcttaacgtggcactaactgcattatctatgacttactgatcttcgagtctcttgtattcatcagtggtatggtttctcagtgtcagcattgatctttgttttgtttttatgacagggtctcaatgtgtagccctggctgtcctggaactcactgtgtagaccaggttgcctcctcattcacagaactccgcctgcctctgcctcctgagttctggggttaaaggtgtgcaccaccacaccttgcaacattgacattttgaactgcatctgactttgctttgggatgctatgctggacacagtgggatgcttggcagtatccctgacctccactgttcagcattcccctgggttttatggccccaaatgcctgccaacattggccatcctgggaggcaaaaatcattgtcatttgagaaccactgatgcaggctgttagaataaacatgaggatttggtgaatatagtcacattcccaatagtctatgcactgttttctcctgggaaatgaattcttaacagtgaaaaagtagagagtatcctaaagtgcggtttcggttttgctcggtaatgaagaaaaagtgttggttggttgtgtcccttacccatcacctctgaagatggatcaaacctacagccttgagcctgatagtcaactattccactactgagctacatcccatcccgtaagtctcttgtagtacttatgtacctcagctctgctcctgtgtgttcacaattagtggacatttggcctcacgatatgacggttatattctgtagaccatctgttcctacccctgcacttctgagacagggcccaggttggtctggaactcatggcagtattcctgcctcagcctcctgggtgctgagatcacaggcatgaatcaccatgcctggctttgcttcagttttatctctgaacaaggaaaggactaccactgtcccaaagcttcactcgatgcttcctgaagccaaagccacgtttgctccccacagaacttaacactgtgccttcctgtctgtgggtggatttttacttcacatttatctttgatcttacatttattggtagtatcttatacttgtctaaaaggaagatatctacagctaggggtgtgatgtttattgtttaaaaaaaaaaaggttacatgtctgtatatttcgagtatatttttgtagagatatacatccatagatacacatggtataagctggtctgggaattcaccccagagtctggtgcatgctaagcatgcccagctactttgaacttcttaaggtatacttgaaactttcatccacagttttatatgttagactgcagctaactagccttgtgttgtgcccaacactttggtgctatagaagaaacctcataagtagcctcttcattaagcaaacacctatctataccagggaccagtttctttgtgttgtgtgtgtgtgttcttttgttttgtcttttaaggttttttgtttgtttgttttattttttttgagagagtgtctcactatgtagctctgactatcctggaactagagatctgcctgcctctgcctcccaagtgctggtattaaaggtctcctcccggagctactgggcctggatttggggactggttatcaaggtaaactacagctcaagaggctggcaagactttttcagttcatagaaataattgctatgcctcagagtcctccaactttgagtctacggtcaccaaaactagtctaaagaaggctcggatcagctcgaaggagtctggatccctttgggaagcttcgattgtgctttttcgagtcagggcaagaagcttcaggcataccctgaacctttaagattctcctgattgggaatccaaagcctgaaagaggcttcacaattaggtaattctgaagtcctgttcttctattcttacagcctctttgccctttgcattttttccccacgtctagatagctatggggattgcttaggaaaaactgatgtaggagctcacatggttcatgggtggggtggcacggtgcttgtatagtgagcatagtgccctaggtttgtccccagaggtacaagtcagaaagaaacgatcaagaaccacactcagagtggctgttccattttatgtttctgccctccattcctgtgtgagtggtccagtctctccatgttctctcaccagcattcagtgatgttaaatactatttcatgtgctttctgccatctgcttgccctcatcttttacatctttgttcttgtctttgtcagtttgtcaattagattgtttactaaacgagccatatcttttagtaaagttttaaaaataatatctgacttcagaagtcaggaaataggacttttcaaatcatttaagtcagaattttaaagcatcttgaacattgtcttacagtgtgcccaacagaagggcatttacttctgggctcattacacagtgtgaggctcatgctgtgaaaagaacaaaaacaaggtttctacggcaactttacttaagatttcctgtagtgtgtccggagacatactttatatatagcaattatcatgtttctaactgtgcaatggtatgatttatgtaaagattcaaaatgattttgtggaaaattaattagcaaagatggataagtgtagatttgaattcttatgtatcagtaatttatgatcttatttctctgttattgtgaatgttggttttattaaagagttattgaaactgtcataaaccattttataggtctttaataaaattaaagatgaaatcagc

SEQ ID NO: 549 - protein, 490 aa, Mus musculus
MSGQQERAERQREELSASDPSRFVLGLDVGSTVIRCHVYDQTARVRGSSAQKVENVYPQPGWVEIDPDSLWAQFVAVIKDAVKAAGVQMNQIVGLGISTQRATFITWNKKTGHHFHNFISWQDLRAAELVKSWNNSLIMKLLHGATRVLHFFSRSKVMLTVSRFNFSTQHATLRLTWILQNLSEVKRAVEEDNCCFGTIDTWLLYKLTKGKVDITDLYNFGSVDEKIFGVPIPVVVGDQQSAMFGECCFETGDVKLTMGTGTFLDINTGKNLQHVNGGFYPLIGWKIGQELVCLAEGNAGDTGTAIMWAQKLDLFTDAAETEKMALSLEDSEGVYFVPSFSGLQAPLNDPCACASFMGLKHSTNKYHLVRAISIAFRNKQLYDMLQREIQIPVTNIRADGGVCNNAFVMQMTSDLINEKIDRPAHFDMSCLGAASLAGLAVGFWADKEELQKLRQSEMVFKPQKKWQEYEVNMENWVKAVKRSMNWYNKT

SEQ ID NO: 550 - DNA, 74166 bp, Homo sapiens
  misc_feature (1)...(74166): n = A,T,C or G
ggtgggtggatcatttgaggtcaggagatcgagaccatccttgctaacacggtgaaaccccgtctctactaaaaaaaaagtacaaaaaattagctgggcatggtggcatgcaccgctggtcccagctactcaagtggctgaggcaggagaataacttgaacccaggaggcggaggttgcagtgagccaagatcgtaccactgcactgcatgccagcctgggtgacagagtgagactctgtctcaaaaaaaaaaaaaaaaaaaaaaaaaaaaatatatatatatatatatatatacatacatacatacatacatacacaccttgagcctgagcaatatagggagacactgtctctacaaaaaaagaaaaatattagctgggcacagtagtgcaaatgtgtagaccagctatttggggggctgaggtgggagaattacttaagctcaggaggttgaggttgcagtgaactatgactgtactactgcattccagtctgggtaacagagcaagaccctgtctcaaaaagaaaaaaaaaaaaaagatgttcaaatatatcttcaatctagtaacttcccttattttttgcattttcttctgtataatccttcttttttttctttctttcttttttttcttttttgagatggagtttcactcttgttgcccaggatggagtgcaatgacgtgatcttggtgtggtgatcttggctcatcacaacttccgcctcccgggttcaagcgattctcctgcctcagcctcccgagtagttgggattacaggcatgcgccaccgtgcccggctaattttgtatttttggtagagacaatgtttctccatgttggtcaggctggtctcaaactcctgacctcaggtgatctgcctgccttggcctcccaaagtgctgggattacaggtgagccactgcgcctggccttgtataatctttctttaccttggattttaattgccttatacaaacattttcctcaaaaaataaagttttatctgtatccatgtattcacaaatgttttcagccaaactctaatgtggtttaactcttaatccacagaactcactcacttgagatgttacaatgtccctagttaaggaaaagacatctgaccataagtaaaacatagcgactgagatgagacgacagatgctcttcttaggcagtggcctctctttagaactttccaggccttggctgttcataaacataaaaagtgagtccacaaaacctgtgccccaagtggctccttcctgcccacgacctgtacagatcggtaagtgaatgaatgaaaagaattcctgtcactcaatacacttcaggaggggagaatttaagagagggaggaagaagcctgctcatgtttctgacactggatgcctcttaagggcatggagatgggcagataattggccaggtgtggctttgtgactctggtttccctggattaaacggtaaccctttccaagtctccctgcagcttagccatggggaagccatcacttcccccagacccgcttaagatttaggcaggcaagtcgctactcagctctctctgggaaggctggaaaaagccagccttggacacagtggcatctatgctgtcaagtttgcacaaacatatctgggtggcagggtaagtcctcattgtttacctctggaaacactggatgtttcagcccctctgaagaactactgtataggggaaaagatcctgctttcatcatgtactgtctgtgcagccttgaggggttattccctactgtaacaacatagtgaccgttattgagttctggagcgaattaagtaagagaacatacaggattgtacgtgtaaggacaaacgcagtattcggcacagcagtcactcacctcacatgacttctttctctctgatagaaaattcatactccctttcatgctttggtttctaggaagcatgaggaactcagtgtttattcgtttgatttatgaagtaatttcctttagtctaggttttctggtgttgttattctacttttcaatttccaattctccccttgattttggtctaactcaaagtcctcttttatcttcagatcttgatggacattggtcctgagaatttgaagtttctgggtctcattccttctggttcgactgcttcaggaagtgaatgggcttaacagcaaggcaggctaggacttcatcgaagaagggtgttcaaggccagccttcaaggctaggactgttaagtggtgaggaataggcctgggttgagtctttagggaattagcctgctgaaagaggtggtgccaaggaaggaagccagtgttttttttttgttgttgttgtttgtttgttttgcgacagagtctcgctgtgtcactgtgtcacccaggctgtaatgcaatggcaccatcttggctcactgtaacctccgcctcttgggttcaagcgattctgctgcctcagcctcccaagtagctgggactacaggcgcacaccaccacacccggccaatttttgtatttttagtagagacggggtttcactatgtttgccaggctggtcttaaactcctgacctcgtgatccaccttccttggcctcccaaagtgctgggattacaggcgtgagccaccgcacccggcccggaagccagtgtttacaactgtaatactcaagagttgttgtggaaagtaaaaagttcctcttcaaagtttcccttcttgttagaggataataataataatacatgttagaaataatagtttctcttaaagactaactttcttcaaaacctatttacaaaagtttttaagctgttagccaatcgggttcagtttagattgtgaggtttggctccaaccaacagagatcagacacagcagtaaggacccaatgtgtaaggaataaatatgcctgcctttcctttgttcattgtgctctcatggcaggattgctaaggggcagcaccctttctgcagaaagtaaaattactttgctgaggaaactttttgtctaaatgttgatttttccttgcggtactgaaaaacgaacattttgcatgtaacagttgtcaagggaggacagacagtcttagcaggtatcacactccaggggcttcagaatggtgagtggggagttctggtactcaagagtgggtacatggcagccttccagaccacaacatggggatccaggagagggagtccaggccttagaaaaggatgaatttctgaggagtatataagtggggggaaaaattaaggttttacaggacctgaagcttgtaaaacctggggaaccccctttaaggaaacaaataaacaaacaaaaatatttcacttttcaaatgctttaaagcatagactgtgaacagtttgctagggctcttctcagggtcttggcaggggcccatgccagggaggggcctgaagcttaagcttcattaactccacagctcatctacctctgtcctgcagagagaggggtctgggctccagacagtcaaatcaggaaactgagacagctgtccactccaaaagaggcagggctcataaaacaagggttaagaaaaaggaggtggcttaatgttcatgtggttattcagggaagctagctcaaccccaggcctgttcaggttggatgatctgcattggtggtcacattacaatgtgcccagcatagtgcagagattaggaggggcccagtgccctctatgtcttgtggccaagtcaggcagaagatgaggtctggtagggacttgtacatatttgtttgtttattcagtcattgaatacttttccttccttccttccttccccttccttttcttttcttcctttctttctctctccttcctctctcttctcttctcctttctttcttccttccttcccttcttttctccttccttccttccttccctgcttcctttcttcctctctctctctttctctctttctttctttctgacagtctcgctctattgcccaggctggagtgcagtggtgcgatcttggctcactgcaacctctgcctcccgggttcaagtgattctcatgcctcagcctcccacgtagctgggattataggcatgggccaccatgcccagctaatttttgtatatttagtagagatggggtcttgccatgttgggcaggctggtcttgaactcctggcctcaagtgatccacctgccttggcctcccaaactgctgggattacaggggtgagccaccacgctcggccaagtcattgaatacttcctgtgccttgaggaaaaaagactaaggccccatccctgctctgaaggagttcactgtctaaaaccagcaactgacaccaaaacatgatgtagccagagtccccaaaggaagttacttgcagaacccaagagcctctaggaagactagtgaagaggaggttgggatgatgattaggccctaaaacattggtaggagcacttggagcttctgaaaggagtaggatgaccaactgttccagcttgccctaccaactcctgattttaacaaagtcctgtgttccaagagattcctcagtcaagggaaaactgggattgttggtcaccctaggaggaagggacactgactagtttctttggaggaaggagggcattgaggtcactgggatcagtcctgaggcaccattcatttccctttggggtgtgacagggaatgatgacctttacacgatttctgatcgagccctgaggagctgcaatcaaatttcttgagagtgtgggaggctggtacaaggatttgtaatcctgggcctgcttaagagggtaacgtgtaagaagtggcagtggtggagaagcagcctgggagagcagtccagcccagaatctaagatgtagcagctgggtcagatgaaagataaggccaccaggtaatgcagcacacagcagcagtggcctctgaatcaataacaatggactaccccaaagaatggaaatcagtacatcgaagagctatctgcattcccatgtttattgcagcactattcacaataaccaacatttggaagcaacctaagtgtccatcaacagatgaaatggataaagaaaatatggtattacacataatggagtactattcagccattaaaaaaatgagatcttgtcatttacaccaacttggatggaaatggaggtcattatgttaggtgaaataagccaggcacagaaagacaaacttcacatgttctcagttatttgtgggagctacaaattaaaataattgaactcatggagatagagagtagaaggatggttaccaggggctgggaagggtagtggacaggggtgaggggtagggccgggggaagtggggatagctaataggtataaaaaatggaaggagtaataagatctagtatttgatagcacgacagggtgtctatagttaaaaatcacatttttttatttcaatagcttttggggtacaagtggttttgggttacatggatgaattatatagtggtgaattctgacattttagtgtaccagtcacctgagtagtgtacattgtacccaataggtagcttcttatcacacacccccgtcccaccctcccatttctgggtctccaaagtccgttatatgactttgtgtacctttgtgtacttagctcctacttctttggttttccattcctgggttaattcacttagaataatggcctccagctccatccaagttgctgtaggacattatttcattcctttttatggttgagtagtattccatagtgtgtatatatatatatacaccacattttctttattcacccattagttgatgggcacttaggttggttccatatctttgcaattgtgaattgtgccataataaatatatttgtgtaggtgtatttttcatataatgacttattttcttttgggtagatacccagtaatgggaatcctggatcaaatggtagatctacttttagctcttttaaggaatctccacactgtttttcatagaggctgtactaatttacattcccaacagcagtctgtgttcccctttcaccacattcacaccaacatcgactattttttgatacagtcaatttagttgtacattaaaaataagagtataatttgattgtttgcaacgcaaaggataaatgcttgacataaaggataccctatttaccttgatgtgattatcatgcctgtatcaaaatatctcgtgtaacccaaaaatatatacacctactatgtatccataaaattttttaaaaattaagaaaaaagaatgactgaccagctatcaaaggccttagaagcctctgagccctgtgccttgttgcccatatactcctttcccttagagaagagcagggttagaggtgctgacagagaacaaagcaagtgggagaaacaggtatctctttgttctcccaggcctctcctactcaacagtgaaataagatcttgatttttatctgagatctttatgtttgctttacccaacacccagcacctgaagttatgtgcaaaattttgtgtgtataagcatcttcttgggaagatagtgttcattatggcctcaaagttgttcaagatctgaaaacaatttgagaaacactagattaagtggtttctaaggcccctgttttcaaattctatgatttgataatactcaatataatttatttgaatttataaaaaggatcattaaggaagtgtcaggtttcaagaagccaagaaatatcactttgagaaatatactaactattaacatcaggtaatacaaagccgttttctctgttgtgaatggggaactgatatggttactattatgtgtgaacttggctaggctagttagacacactgtatgcccagctgttcggtcaaacaccagtctaggtgttgttgtgaaggtatttcttagaaataattaacatttaaattagtagactttgagtaaagcagatcacccttcataacctgggtgagtctcatacaattggttttaagctttaagaacaaagacaggtttcccaaagaaggaagtctcctcaaaactgcaacatggaaactcttcttgagtttccagcctgctagcctgccccacaaatatccaggacttgccagccctcacaatcacatgaagcaattcctgaaaataataaacctctctttctctttctctctatcctattgtttctatttctctgtagaaccctgacaagtactggacccattagtcatttatttcgaattacaataattcacacacacacacgaccaaaatggccagcactggtgaaggcagtcagtccttgaggccacttggaacaaatcagtactgttgaacagggtacaaagaaaaaaaacatactcttccaggtgtatgttccaagcttcacgttgtatggccaaagagccaattttgtcaaattgtctgaaagcaagttgattaacacgacaatttggtcaaaagaatgacttggccctgtgcagtggctcacgcttgtaatcccagcactttgggaggccgtggcgggcggatcacgaggtcaggagatccagaccatcctggctaacatggtgaaaccccgtctctactaaaaatacaaaaattagctgggcatggtggagagggcctgtagtcccagcaacttgggagactgaggcaggagaatcgcttgaatccgggaggcggaggttgcagtgagccgagatcgcagcactgcactccagcctgggcaaacaagggcaaaactccgtctcaaaaaagaaaaaaaaaaaaaaagaatgatttggctgggcacaatggctcacacccataatcccagcactttgggagacaaaggtgggaggatcacttgaggccaggagctcaagaccagcctggccaatatggcgaaacagagtctctacaaaaaaatgcaaaaattaggcgggcgtggtggttgtagtcccagctacatgggaggctaaggcagttggatcgcctgagcccgggaggtcgaggctgcagtgagctgagatggcaccacagcactccagcctgggcgacagagcaagaccctgtctaaaaaaagttttgattcaaaatgagtatgtatgtatgtatgtatgtatgtatgtatgtatgtatgtatgtattttgaggnnnnnnnnnnnnnnnnnnnnnnnnnnnnnnnnnnnnnnnnnnnnnnnnnnnnnnnnnnnnnnnnnnnnnnnnnnnnnnnnnnnnnnnnnnnnnnnnnnnnnnnnnnnnnnnnnnnnnnnnnnnnnnnnnnnnnnnnnnnnnnnnnnnnnnnnnnnnnnnnnnnnnnnnnnnnnnnnnnnnnnnnnnnnnnnnnnnnnnnnnnnnnnnnnnnnnnnnnnnnnnnnnnnnnnnnnnnnnnnnnnnnnnnnnnnnnnnnnnnnnnnnnnnnnnnnnnnnnnnnnnnnnnnnnnnnnnnnnnnnnnnnnnnnnnnnnnnnnnnnnnnnnnnnnnnnnnnnnnnnnnnnnnnnnnnnnnnnnnnnnnnnnnnnnnnnnnnnnnnnnnnnnnnnnnnnnnnnnnnnnnnnnnnnnnnnnnnnnnnnnnnnnnnnnnnnnnnnnnnnnnnnnnnnnnnnnnnnnnnnnnnnnnnnnnnnnnnnnnnnnnnnnnnnnnnnnnnnnnnnnnnntacttgcagatcaggaccctccccgggaaagctccaggcccaggaacctaagccgcaagaatctcgaaatttccacaggacaccttgttccttttggccaagtgtctggatgagcccatccccttgggcagcaacaaaaggtaaagggtctctgtgaggctttcagattccaaaaaaaagcaaccgctggagtggagtgtgatggtcaaagcagccaccttaagctttctcctttctttcccactagagggctgagaaaagtcttcttccttgcgttgtatttcatttggcaaatatttaccgctattgtgtgcaaactttaccaggttttctgggaagagaagtcgtggggagctctcagtttgttaataaatattaatacttttggccaaattttgaattttttatgtcacttgttttatttcatttttgaaaaacagcactttatttcatttaactctagcatattcaatggctgtgcatttaataatactgaaataaagtcgcacccaaaatgttagcaaaaaaatggaaactatatatggtagtgacctctacaaatgttttaagcttgaaaaattctgcacgaacgcagacacaggttagtctgccaaagttactcagataaaaatttctccaaccctcaagtcataatcatagttgagaaatgaataaatgtgccttatggcacctccaaactttttgagatttttatataaactagcctatacttctctccttacgattagcatatggggtagctatttttctttaacagagattcttcaaatgtagctagggttaagagaaacgctggcgctgcctctcaggaagctggagaagcaaaagaaaaaattaagagttaagggccgccgggctcggtggctcacgcctgcaatcgcagcaatttgggaagccgaggcgagcggatcacgagatcaggagatcgagaccagcctgatcaacatggtgaaaccccttctctactaaaaatacaaaaatgagccgggcgtggtggagcgcgcctgtaatcccagctactcgggaggctgaggcaagagaatcgcttgaacccgggaggcggaggttgcagtgagccgagatcgcgccaccgcactccagccggggcgacagagtgagactccgtctcaaaaagaaaaaaaacaagagttaagggccaagtcaatccaaccgcggccggcgactggaggctgagcatggctggcgatctggggctgcagatcacggcgcaaacccgctcacctccacccctcccgcgcggccgccggcgcgcgcccgtggcgtcacggcgtcggggtggagccggcggcaggggccaggcctctctaggctctccggctgagccgggttggggcccgggttgggccgcccggggactctggagcattgggatttgtagcgcgccctctgggtaggcggctgtagcggagaggcgtgcgggatcgggatgtcggggctgctcacggacccggagcagagagcgcaggagccgcggtaccccggcttcgtgctggggctggatgtgggcagttctgtgatccgctgccacgtctatgaccgggcggcgcgggtctgcggctccagcgtgcagaaggtgacttgggggcgggcgtggggcgcgggtctgactgggtttcgctgagtcccggggtccggcctcgggaggcgagcgggcaggccccacctaccgccctggacgcggccacctgcagcacccgcgggccctggggccagaacggcgcgcccagaccggctgagtcttcgcgttccctccctcgtctgggctgaatcccgcgcgcccttcctgtccaggctgagggtgccaggggcccggtgtatgacctgggccgctcgcttgcctcttgccacctggggagccacctgtccggccttacctggatgggactgaggtgactcgccggacgggactgggcaggctgtgcannnnnnnnnnnnnnnnnnnngcaactttttgctgacatgcaggttttctgctataggatcccctactatagcctttggacttgtgcctcaataacttttcatatctttgtagaatttaagtttattctctattcccacttgtcatctttattaactactactccacaaaatgctggttccttacgtgagcaactgattgccgtggatattagaggtattgggcaagttttgaaggctgtgtggtcatcagttttctattttccatctttgagaattcataaaattctttatttcccctcgtttgagagacctgccaaatcattggttggttgttagtaaagccttgaattgttgataatattggtcagcaaccaacaaattgatatccttctgttctcatattaatgaagtgttgatttatacacaattgtcaatgcaccaaaaataatatttatttgttatggtgttcttattgttgttcctttttttcttttgagacagggtctcactttgtcacccaggctggagtgcagtgctgtgatctcggctcactgcagctttgacctcctgggctcaagtgatccttccacctcagccccccaagtagctgggactacaggcaaggggccaccatgcctggctaaatttgtttgtattttttaatagagatgggattttgccatgttgcccaggctggtctggaaattcctgggctcaaataattcacccgcctcggcctccctaagtgccaagattacaggcgtgagccactgcagccagcctgttatggtgttcttattttctcttcccagtaccaacatctttttatgttagaaatttgagggagggccggagccatcagttacctaaccattcccagcagcactgtattccccctttttctcagtgtcccgttcttcttcccaccaccttagaggtgtttttctttgtagcacttgcccaggagcaaggtccagctagagtgccagtgagtagtgactgctttgagcatttgttctggggaaacatcagacttccttccattaagtttttcttttttttcttttgagacggagtctcgctctgtcacccaggctggagtgcaatggcatgatctcggctcactgcaacctctgcctcctaggttcaagcaagtctcctgcctcagcctcctgagtagctgggattgcaggcacccgccatcatgcctggctaatttttgtatttttgtagagacagggtttcgccatgttggccaggctggtcttgaactcttgacctcaggtgaaccgcctgcctcagcctcccagagcactgggattataggcgtgtgccactgtgcccggcctccattcaggtttcaggaccaagacagtggaactgggattgtagcagctccctggtcccttctctggctagctgtgtgggaacactgcccacccacccacacactatccctatcccagcctgaaaagaaaaatgaaaggcagacaccacccttcagtgactgggtactcattacctttctaagagtatttatcacaaacacgatactttttaaagtctcccttataattctagacacaaagtacttttaagcactgtttttttgtttgtttttgtttttcttttaaggaattgaaatatttggaaccaaagggagaaatgaattactagaaaatgcaaagtttcacagttaatatataatttggggcagatcattagtttttttaggaatgaagtgaggaatctcaaagatggatcaagattgctgtgagtggcaggaggccaggaagatttgcacagactctaaactgtggaaaatgtgtctggataaaagaaagatatgagtaaataaaaatacaaaaaaaatgcctgctcttcccagataaagcacagtcgtagattaagaaatgtgcagcaatgcctctctgtgtggtaggagtttatagcagtactgcttaaagtgtagttacggggctgctgggattgagataataaaagaaaactaagcatttagaaacttgtgtagcaacttagcagaataattttatgtctattgactctagtaatgaaacgtttgggattttattttgtatgccttttttttctggaaactttataaaaattattgttatttttagagacagattctaactctgtcccccaggtggcctgatcacagttcactgcaaccttgaactcctgggctcaagcaatcctcctgcctcagcttcctaaagctctgggattacaggcacgagttactgcactaggactagaaacttaattgtatcttaaaaattgctggtccacaatgaatataattttttttttttttgagatggagtctcgctctgtcgcccaggctggagtgcagtgactgatctcgattcactgcaagctccgcctcccggcttcatgctattctcctgcctcagcctcctgagtagctgggactacaggcgcccgccaccaagcctggctaattttttgtatttttcatagacatggggtttcaccgtgttagccagggtggtctcgatatcctgacctggtgatccacccgcctcggcctcccaaagtgctgggattacaggcatgagccactgcgcctggccaatgaatagaaatttttaaaaaaaacaattagcaactggtcctttactgcagataatttgagttttttgggaacaaggatcttgttggtctacattgctgcttagtacctggtttattacctcattgttacagaataaataattgaattgcagttaaaatgttaggaattcatggggctctatgacttagacacagaacttgattgtgtttattctgtcaagtgaaaattacacctcttgtaatattccaatggaaagaatgtataatagaaacctaaaacctcttagtgtatgatttgattatactgggaaagaaatttttaaaaaagaaaaaataaagagattcccctttgtagacaagaacaaaataggctgtgagaagacgtcaatcttacttcttgtggcctttattttttaaatgtttaacagtagagatacatttttagcttttttctgtaatttgtatttttaaaaaatctttcttagggactcttaaatatacaaattaactactagaagaatattttgtgttggaaactccacatatgaacatttgatattttggtttgaaaaatggagaatatttatcatgttccccagtggaacatcatgccattatgagaaactataaaaaatgataatgtcttggttggaagaacaggacagaaaggtcactccaaagagtaatactgtgtactctatgtacatgcttgaaaaacagactaggtggttgttgtcttttgtttttaataaaaaaaaattaacttttattatatacttgatctaattttggtttggttctcctgtaaaagaacagatttcactactgcaacttgtttggggatggtatgtgacatcctgattggtaaagtggggggaagtgaccctgagtcaagtctgaaggtttatagccttgaaataatgatatccacattgagttttctggggtaagaaagtgtttcttgtagttaaactattacagtctgtagtcataaaagccttgcctagaaagggcagaagtattaattgacagaaggagaatagattgtgttaaatctgtttttttgatgagctcactggggaataagagattctttttccacatcaccttgtgtaacacttatactccccatattgtcactgtatcctcagagttccttttttctttattttggccttttcatactacatgttagaaattttccttaactagtgatcttgattggttatctgcatttttttggtaccatgccttgccctggcacttaggtatatctgtcatttgcaagtacagaactctggttcaacccctccagaaataaatctcttacgttctctttctgccaggttagggaggggcagtgatctggctggaggaaaggaattggggctccttataaagactttgaaccagtcctacgtacaaccccatctggcatcccagctttcagaggaacctctaatttccagagttccaccctagaatctctgccctttgcttacgggcatcactctcatagttcactcatatgttcattcatatactcactttatatttatggaatatctaagaaaccataggcacttctagatgctggggataaaatgaactaaggagacacattccctgccctctaggaactcacattctgaggagaagggtagaggtgacctgactctggtcttataggccattataaggaataatggttttactctgagtgaaatgggagccaaggtgagtagaggtgcagtgtaatctgagcaggcagtgaggtattggcatttcctcctctgtcctaagccatgtaccatctgcccactcactgttcgtattaaaaacatttgttgccagacgcggtggctgacgcctgtaatcctagcactttgggaggctgaggcgggcggatcacgagattaagagatcaagaccatcctggctaacacagtgaaaccccgtctctactaaaaatacaaaaaattagccaggcgtggtggcgggtgcctgtagtcccagctattcaggaggctgaggcaggagaagtgtgaacccgggaggtggagcttgcagtgagctgacattgcgccactgctctccagcctgggcaacacagcgagactccgtctcaaaaaaaaaaatttgttaaaatctggtctgatcctatttgctcttctctttgtccttgtgcatttaaaccttgttaatgttttccttttaatagactgggaggaattggagatacatgcatatgtttaagccatcattttgacttgaagccatagatttttatgaaatttgtttattgattgattgattgagacagtctccctctgtctcccaggctgcagtgcagtggcgtggccacagttcactgtatcctctacttgctggactcaagtgatcctcccacttcagactcctgagtagctggaactacaggtgtgggccactacaccctttttgtatttttgtagagatggggttttgccatgttgctcaggctgatcttgaactcctgggctcaagcaattctcctacctcggcctcccaaagtactggattacaggccactgcatccagcatacaaaatttattttattttttaagttaaagtaaaatcgacttttggtgtgtagttatgtgaactttaggacatgtgtagaagtaatccccaagctcccttgtgttactttattgtagtcacatctccccactcacctaacctctagtaaccactgatctgttttccgtaacacagtcttgtctttttgagaatgtcatataaatggaatcatacagcaagtagccttttgagactggatttttttcagcataatgcctttgagatttgtccatattgttatgtatatcacttgtttattcttttttatttctgagtagtatctatcatatggatgtactacattcattcacctgttgaagtacatttaggtgatttctggtttctggtgatcattaatagagctgctataaacattagtgtacagattttaaggggaatattaaaaagctttgaaccagtcctgtgtacaaccttatagggtaaatttctctagggtaaatacctaggagtgggattgctaggttatatggtaagtgaatgtttatcttagcaagaaattcagagtggccataccattttgcattctcatcaacaatgtatcagagttccagttgttccacatcctcatcaatacttggtatcattagtttttaaaacttatttgatttgacttgcatttctctaatggctaatgatgctgaatatctaacttcatgtacatatttgtaatccacatgttttctttagtggagtgcttgaagtcttttgcccattttcaaattgagttctttgttttcttactgtcgagttttgaaattttttatatattctggatattagtcatgtgctggatatgtgatttgtacatattttctaccagtctgtacttttgtctttttattttcttaacagtatcttttgcagaacaaatgtttttaactttgatgaagtccaatttatcaattttttgttatatgaattatacttttggtgttctaaggactctttgcctaaccccaagtcacaagaattttctcttgcattttcttctaaacattttatagttttacattttacatttagatcttgatccattttgagttaatttctgtaagttgcaaagtttgggttgaggttgatttttttttttttttttttgagatggagccttgctctgtcgcccaggctggagtgcagtggtttgatctcggctcgctgaacctctgccttccgggttcaagcaattctcctgcctcagcctcacgagtagctgggactacaggtaccactgccacacccagctattttttttttttttttttgtattttagtagagacggagtttcaccgcgttgcccaagctggttgtgaactcctgagctcagacaatatgcccgcctcagcctcccaaagtgctgggattacaggcgtgagccaccatgactggcctgattttttttttttttttttgcatatggatgtccaattgttacaccaccatttgttgaaaaaactatcttttctccatggaattgcccctgtacttttgttgaaaatcagctagtcatatttgtgtgagtctatttctggactctgtattctgttccattgatctatgtgtcagtttttatgccaatagcatactattttgattactgtagctttatagtaagtcttgaaattgggtagtgtgcctctaactttattcttttttttcctctctgactttattctttttcaacgttgttttggctattttagtttttttgccttgcataaattttagaatctacaaaaaatactattgggattttgttatagaaatctgggatggcagttcttttagcacactgtaaatgttgagccacttatttctggctttcatggttctgatgagaaatccacggtcatttaaatttttgttctgtatatgtgaaatgtctggtttcaaactttttgcttttagttttcagcattttaattatgatatctgggtgtgtaatgctttgggttcattctggtaaagttttcctgagcctcttgaatatataggtttcactgaacttgggcagcttttagcactgttacttccctcaagtgattttttttcctgttctgaaccctttcttttcttctttggagacccctgattaaacaaatattagaccttttgctatgtcctggggctttgttcttctttttcctccaatcttttttctttctgttgtgcagataatttctattggtctatcttcaagtttattaattttcttctatctcccttctgctattgagcccatccagtaagttttaaattttgatcagtacatttttcaattctaaaacttttcttttttatgtcttttatgactttcttttttctttctttttaaaatgggatatatttaagccattcttcatgatgtcctgatatactgaccttgatatacacatacgtagttaaatgattactgcagttaccgttgctgagactgtctttccatttgttgcaagtgtattcactcctcttggagtattttcataatagctgctttagactgtttatcagatatctgtgtcatcttggcattgacatttcttgattatcttttccaatgtgagttaagatttttctggttcttcatataccttgtagttttggattgtatccaagaaattttgaatattatgttaaaagaccctggggtttttataaatcctatgaggatttttgttgtttttcttttagcaggtatttattgcatttgggttcaggctacaaattcagtcttctgactgcagtttcaatgtcagatttgttttcaaaatcttggcagtactatttggatctgccctgtgtgtgtgcaacctagtagtcagtctgggacctgggcagtgatctatcctttagttctgttcttagtatttttggtatagtgtttaggattacatccatgcaagtgcagctttggggtgagcctaagagttcatacacaactttctgtggtatcttttccaagttcctccctctctgagatggttctggtactttttgattccctgaacctcccctggtggtccccggccaaaaagctggggcttttattactccactcggctgggtatgtctggggttaggcagcagaaacacacagagaaaaaagccataggggttgaccacaccctcttgggatcaccgctcatctgattggagaggaagttttaccttcctcaggattttaggtacctgttgagacgcaccgataccattattaactgctgctgccactgctgcaggattttgtgggtataaaagtatggagacaagggaaaaaagaaaaatgggagatctgccccatttcctctgagtgttaggagttccctttctcattctttgagccaaaacagtagagcttatcctggcacttcctctgtgccctagctcccagttctggttttcaggatgtcttgagtctaagccaggggatttcagaagaaaaatgggaaactcaccaccagttccatggtacctgaattcttatctacttccccagtccacctgctgccatatactttttaagagtccacaatggctgctccatgcattctgtccaggtgttatatttgtatttagcggaagagacagggtggagtgtgcttactctatcgtggtctgaactggaattcactttttttaaaatttatttttaattttttaaaagccttttttcttattttaaaaacacaccttcttgtagaaaacttagaaaataaaagtagagataaacaaagctaaagtcttctgtgaactcatgagttactgctatttggtgttggcatatagtccttttttatctcataaatgtgtctttttcaattttaacaataaaaattaattagataataaaatcatgttaattattttaaccagtagttttgagacccaaagacccatactattgacttgatctaatgctgtttttactaaatcttcttttccttaataggtagaaaatctttatcctcaaattggctgggtagaaattgatcctgatgttctttggattcaatttgttgccgtaataaaagaagcagtcaaaggtaattggatttataaaaataacaataatctttatggttttttttttgtaatagttttcctcaggcttctgtagttgtggttttcctaagttatacatatatatagtattttattgggattacagtttcccagtatttttcaacggaaatttgtaattcacagtgagctcctttgtcagggaaaggtaacatctgctgtgtcctctggtttgtctcttttcgactgtaatataaatgctcgccatttcctcattccaggttatagctagtgctgttttgatttcctgtttggcacaaaataccagaggattataaacagaagttacagtgtatagcttctactctcatgggtttacaactgagttatttctattgtaaaatgagtttttatttgtttttttctggccatttgacataaagtgctttcctggccaaagctatggtctaagtcttagttctttaagaatgttagaaacattcttaaacattgacaacatctcaaaacattgaaatggccaccttgcttgagaacatggcaaagattacttgtaaattctgaaagatcttttacttcatttttctggctgaactgcttcttctcatctttttggtttgaaatatttcagtctatgcaaaagttgcaagaatagtacaataaactcttgtatatctttctcatagattcaaacatattttgtaatatttaccattttctgcaaactgtttttttctttctgaaccataggaaaggagtattttctcctataaccacaatgcaattataacactcaggaagtataacattaacacagcactgttttctaatactctgtcttcagtatttgctcttgtcttagtgaaaacaaaaaacaaaaaaacttcttttttcaatctagaacccagccaaagaggaggcattgcatttagctgtcagtcggcttaggctcctttcatctagagcacattcttatgacattggcaattttcaaaagtacaagccagtttagtagagtgtccctcattttgaggttttctgattgtttcctcccagttagattcaggttgaataactttggaatactatatgggagttgatgtgtttttctcaatgctcaaattgaagttgtcccagattttcctggtgggataaatagatttttaaagaatatcacaaaaaatactcgagttgctatattttaagaaatttggaccaaaaagtcaatatttttgtttgcatcctggcatcagtttgtgttgaaaataaggtctcagcttcaataattagactactttccttgagagttttcctttattgtcattaaccagcttctattatgattgatcattgcttaaattaagatccaatcttattattaccaagaaaaaataaatctgacatactttgaatagtatttgtttttttcccagcacctaaaacaaaaaaagctactttgttattcagaaacaacctttaaggccgggcacagtggctcacacctgtaatcccagcactttgggaggccaaggtgggcggatcacccgaggtcaggagtttgagaccaggctggccaacatggtaaaaccctgtctctactaaaaatacaaaaaattagccaggcagggtggtgcacacctataatcccagctatttgggaggctgaggcaggagaattgcttgaacccgggaggcagagattgcagtgagccaagattgtgccactgcactgcagcctgggcaacagagtgacactttgtctcaaaacaaaaaacacaaaaacaaaaaacaagaaacaacctttgttttcttcaagtaaaaaaaaattgctgcagaatcatcttagtaatgctttatttgttaattccagttgttttgttagaatgctaaaccctggtatttttcttaaagattatattggatttctttttctatattgtaatattataaagaaaaatatcactggctttaaaacatgtgttttatccatctttacttttagctgcaggaatacagatgaatcaaattgttggtcttggcatttcaacacagagagcaacttttattacgtggaacaagtaagtacattttgtgataagcaccctactgctgggttcatgccacagtgagtacacggttatgaaatctctttggggagttttaactttctgaattgagaatagtttcgtttggttaagagggatgaaatgtgcctgctttctggcttgtatgctcactgcatgtcatttgggcttgacttatattatataataccacaaaaagacttaactgtcattaaaattatccatttctttctttcgggtaagttagcttttcaaacaagcatagatcaaagatctaaaaaattatacctaaaaagagtcagaggaaactcacaaatttcagaaacacagtactgtactatggtttatattttcagtctactctaaatttaatatttgtctatagcggccaggagcggtggctcacgcctgtaatcccagcactttgggaggccgaggtgggcggatcacgaggtcaggagatcgagaccatcctggctaacacggtgaaaccccgtctctactaaaaatacaaaaaattagccgggcgaggtggcgagcgcctgtagtcccagctactcgggaggctgaggcaggagaatggcgtgaaccccagggggcggagcctgcagtgagccgagattgcgccactgcactccagcctgggcgacagcgagactccgtctcaaaaaaaaaaagaaaaaaaaaagaaaaaaaaaaagaaaatatttgtctatagcatatgaggcatatatacactaaacacagttataatattgtaatagctactgtatagtaaacatctgtgacagtcccaagttccattatccttacaacaaacctataatttaggcatcatatctgtttttacagagaaataagttgttcagggttgctcagggagcaaatagagccaagattctaaattgtctttttgactcagaagcgtatgttctttatactatccccatattgccttcaacatgtttctttctttttctttttcttttttcttgagacagggtcttactctgttacccaggctggagtgtagtggcatgattacagctcactgcagcctcaacttcccaggctcaggtaatcctcccgccttagcctcctgagtagctgggactacaggtgcactccaatatgcctggctaatttttttgtattttttgtagagacggggtttcaccatattgccaagctggtctcgaattccttggctcaagcaattcttccacctcagccacctcccccagctagcatgtgtttctctgtgtcttggtttaaacacacacccacattccctcccccaaaatccccccgcccacgtacccacacacaccactgtaaaatgtgtttttgttaaagcattaggctccaaaggacatcttgagcttgggcagtgggaaagaaaagtgagcagagggggaaaagatgaatctgaaaaatataattagggtgaattcacaaggacttggcttctaattcagtattgggcaggaagaagaaatttgaatttaccaatactgctggccttgatgtttgggctgtatgatagaaatcatagagaatgtaaggaggaatgggctgggtagtagtgagagtaggtagaaggaaaaatgataaaatgtttggttttggacgtgtgaatgtggagatatctcagaggtgactagaacattggtttaacttggactgaggcatagcacatctccatcagataggatctttttattttcatttttgggggatgaggtcttcactttgctacctaggctggagtgcagtggcacgatcatagctcactgcagcctcgaactcgtgggctcaagggatcctcccacatcagcctcccaagtagctaggactataggtgtgtaccacactatggctggctaatttttaaaatttttatagagatggagtctcaccatgttgcctagactggtcttgaactctgagcctcaagtgatctgcctgccttggcgtcccaaagcgctgggattacaggcgtgagccaccatgctcggcccagtactcttttttttcaggacatgctgcatctcagattgatgcctacatctgcagttcctctgtgcttactccactccccagcactggccttggttatggcaaatcttaaataaatcttatacagtagtatattgtcagatgaaggggtgaatgaattaaacttacctgtacagataaggtatctaatcttagtgaccctgttgacattttgagctgaataattcgttgtcatggggaccgtcctgtggtgttgcagctgttcagcagcatccctggcctctacccactagatgtcagtagcaccccagcccacctcaccaccatttgtaccaaccataaatgtgtcaaaacattgctgaacgtcccctggggacatccccaatttggaaccattggtgtagatgaagtctcaaaaaataggtgtgttctctggtagagattatgtggagaaaagaaaagcaagctaaggatttggactgcgggtccctgctcccaccaaatttaaagtgagtcagggaagaaaaagccagcaaagcaggaccaacgctaatctgggaagtggatggatgaaagtggagggaggagtattctcagggaaagaactgattggatgtgtcatattcacttggccattggccccagtgattgctttcatcaggacctggctaccatatcactcatgacagtaaggtcggaatattaggaagcagagtttttgtctgatgctaggactatacatcaccattagaaggaatagaagagttagatttcaagacagttcactttccttactggtggtggtggtgttgtagagggataagacttcttcctaaagcaattcattgtgagttttttatcttggctgtccttttttcttttttgaaatgtttgtattctttcatgagttttgggaacattctttgcttgtagaaactgaaatagtggatattttttgaagaaagactgaaagcctttgtgcttcttttacattaaaataatggagcggagcctattctgctcattgggccccagggagccaatgtggtgtatgatgctgacagattccacaagagccctagcaaacagccgggacacaacacagatgggcacagcacagggccagccagaagcactaattgttcatttgtgagagaaaaggagagacagactagatcctgtggaaaaacctattgttcgttccagtcctggccagcagctcctcctcccagcttgttgtttttttcctcctgcatccatggtgcatttctgtcctcatggccatagaaacattattttcctcacagttgctgtcaggaggtctaaaactttgaactttctttttgtttttctccctatctctcccccatccccctgttagggaccaggaaacttacgaacttttttcagtctttgagctttcttcatgttcttcaggttaagctttttttccaatatattcaaaaagtggtgtgtttagcctgctttctaaaataactctaactgataacacttccattttggttcttttaaattccttttgttctaaaaaaaaaaaaatcacgagctgttttgtttctttagtcaatgtctcttgggagatttctgccagctaacttcagatcagggtgtgtgccaattagcaacacaaactgtgagtcatgggagcctggattcactcataactgtttgagggctcacagggagtaatgcaccgtgctgggggctgcactgcgtatacagatgaataagaataccagccctaatttacaatctcattatataggtacacaaattactctatattcccattgcacaaaatagatttttattgtagtatttgatacttacattaatgagtcttaccaaatacttatgacttaaaatatattaagagccacagaatgatgtaaagtgttagaagggtttaagacaattaatttacaacattgccatttacacttttccttcatttttccctttttttgttgatagagataaaataaacccaggtcagtgctgagtgaatattggaatgtatgctattacttgaaaaatcagtattctagattgtcttgttctatgttataaattaatgatgccactttcatcttgtgattttgtctctccccctcactgcttttcagccacactagccattcagttcctctaagacacgctttatcttgctctaggacatttgaacatatagcacattttgttgggaatgttcatacttctgattccttcttatccttcagagctgagatccattgccatttctgaagccttcactgaccaccacacaggggccatctgttaaatactctcatggcacctctatttatccatttttttttttttgaggcggagtctcactcttttgcccaggctggagtgcagtggtgctatctcggctcactgcaagctctgcctcccgagttcacgccattctcctgcctcagcctcccgaggagctgggactacaggtgcccgccaccgcgctcggctaattttttgtatttttagtagagacggggtttcaccatgttagccaggatggtctcgatttcctgacctcgtgatccgccttcctcggcctcctaaagtgctgggattacaggcgtgagccaccacgcccggcctctatttatcctttatagggcgtattccagctgtaagtgagcaactgagtaattgattatttgtttacattccctggtagaaagtacagtcatcagggcaaaagtgctgtgtgtctctgttcatagctgtgtacccaactcctggtacaaattggcttataaatttttgctgaaaccagtgattgaacatcagatttaagtgtataagtatgtgcagttgtagaatggctctgaagaattatatatcaatagattttatctttatcaaacacaatctgatctttgacaaaggtgctaagaccagccagcagaacaagaatagttttttcaacagatggtgctgggaaaactgaacattcacatgcaaaagaattaaattggacccttacctaataccatatacaaaaatgaatcccaaaatgcatcaaagacctacatttaaaagcttaaactataaactaaaaactcttagaagaaaacaggagaaaatcatcatgactttggatttggcagtgattccttaaatgacatcaaaagcagttaacaaaataaaaaatagataaattggactttatatatcaaaggacatttattttttcatttgtttatgatgactaatttttcaattttcttaactattggaactctccaaagtagaaaaattaccctaaatttaattataaataataagtaagctatgttaaaattaatttgacataatgtgcaatttgcatttaaaaaatgtctgaaaaaatttagtcattgatatctaatatgcagttaggcttcagaaaaccacctgcagcatgtaacgtggaaggtgtgcatcttggtaggtttgatttgtaatttcatccaagattgaggactaaaacaataggaaatcactcctctgatttgtactcatgataatggtgaccatttggatctctaaagggaaaagaagtaacatgctcatgatctgtaaatgttgcgatttccattaataaaggtgaaaaacaggaccctatcaacagnnnnnnnnnnnnnnnnnnnnnnnnnnnnnnnnnnnnnnnnnnnnnnnnnnnnnnnnnnnnnnnnnnnnnnnnnnnnnnnnnnnnnnnnnnnnnnnnnnnnnnnnnnnnnnnnnnnnnnnnnnnnnnnnnnnnnnnnnnnnnnnnnnnnnnnnnnnnnnnnnnnnnnnnnnnnnnnnnnnnnnnnnnnnnnnnnnnnnnnnnnnnnnnnnnnnnnnnnnnnnnnnnnnnnnnnnnnnnnnnnnnnnnnnnnnnnnnnnnnnnnnnnnnnnnnnnnnnnnnnnnnnnnnnnnnnnnnnnnnnnnnnnnnnnnnnnnnnnnnnnnnnnnnnnnnnnnnnnnnnnnnnnnnnnnnnnnnnnnnnnnnnnnnnnnnnnnnnnnnnnnnnnnnnnnnnnnnnnnnnnnnnnnnnnnnnnnnnnnnnnnnnnnnnnnnnnnnnnnnnnnnnnnnnnnnnnnnnnnnnnnnnnnnnnnnnnnnnnnnnnnnnnnnnnnnnnnnnnnnnnnnnnnnnnnnnnnnnnnnnnnnnnnnnnnnnnnnnnnnnnnnnnnnnnnnnnnnnnnnnnnnnnnnnnnnnnnnnnnnnnnnnnnnnnnnnnnnnnnnnnnnnnnnnnnnnnnnnncctgactgcatgtccattcataggctttctgcagggggaagcacatcacccgctgttggctcattctggcagtccaacctggcattgtctttacacagtcctgcatgcaattttgtatttacaataatcaggagcatttcatcttttattctgtagccatagtttcagggggtctccctacatctcccccttttctctgatttaaatgaaccgtagcaatcataggttggtgctgatcacgattggattgaagaataatttttccaattttacacgtgaacaataaaccaatagcacaaattatacacagaacaaaattaacgatagtggatcctcccaaagattttacccattgaatagggttgagattagataatccctcagagatactgtctaaaacaactcatggaatgggagaaaatatttgcaaattgtaacctcgaagcatgtaacatattaatccctaatccctagtaaggggttaatatctagaacatgtaaagaattcctacaattcaacaacaagaaagcaacaacgcagttcataaatggacaaaggacttgagtaatacacagatggtcaataagcacacacaaagatgctcaatgtcattagtaatcagggaattgcaaattaaaaccataatgagataccacttcacacccactagaatggtgagaattttaaaaaaaggaagataacaagtgttggtgaggatttggaaaaattggaaccctcatacattactggtagaaatgtaaaatggtgcaacgactgcggaaaacagtttgccagttcctcaaaaagttaaacatagaattactatatgacccagcagttccacttctaggtatatacctaaaaaaattgaaaacaaagactcaaacagatacttcacaacaatattaaagcagcagtaatcacgatagccaaagagtacaaacaacccaagtgtgtaccaacagatgaattgataaatggtatgtagtatataaatacgttgaaatattgttcagccataaaacagaatacatttctgatacatgctacaacatggatcaatctagaaagctaagttatattatactacgtgaagtaagccaaatataaaagaacaaatattgtataattctacttatatatgatatacctggaataggcaaatgtatagacactgaaaacagaataggggctataagggatggggtgaggaaggaatggggaatgatttcctaattgttatagagcttctgtttggggtgatgagagttttaaaaacagtggtgatggtcgcacaacgttgtgaatgtacttactgccactgaattgtacacgtaaaataggtaaaatggtaaacctcatattatgtatattttgccacaatttttttttacagttaagtattagagagtgcaatggcaagctattaaagtaatagaccatgagatatgggaaagtagccaaagttaggagtggttggtcggaagaaaagggaatgtttgagggattaaaggttgcagtgagttggaaggccaggtatttaaggagtaagattgagaaaactgaaaacttttcttcctatgtgctgactaatattggagcattagactttgagtggtagaccatgtaaaggtgaggatatgaccatgggtgtggaatgcttaagtagagaatgaatcttagcaattgaacatggttcaggtctcacaggaggaggcctggagttggggtagaaagcaaacttgacttggatgttgattagtagatgccagaggttgatttgcgggagccgcaaaggaaaaaggatttttttttttacttctatatttcttagctctgtacttttattgtagtattgacccaagagttgttgaatttctatttattggagagattttggtaagcatgttaggttgccaatggctaagccaatcctaaagttaacagatgtagaactaggctcaggcaatatttcagctcttctgtaggtcaggaggtttttgttggattacgtgtatcaggacaagtgcagtaaaggggaaaagcattggcttttaaaaaatctgcttttaaagtgtgtagagcaggtcttcaaaggccttttccttagttagttttggttttggaagtatatacatttcatactatatgtcacataattgttgtgcagtgtgttcaacttataaaatcaagaagaaatcattcagaaaggcacatgtaactaaattatactttgcaattacagtatggcctctaattttgttttctcttatggcacatctttaacatagtctctgatttatgctgggtctcaaaatactgttttattctttctaggaaaacaggaaatcattttcacaactttataagttggcaagacttaagagctgttgaacttgtaaaatcttggaataattctcttcttatgaaggtaatctttttcttgtgtgatttggatattattggttttttttttctgtaaatgtcccttaattgtattatttcctacctattttgttttaggacattaagaagacatacgcacacactccccattccagtgaagtttaataatagccaatcaaaggcgtatgtggtagacttcagtacttgtacctcaggaagttctaaggaggtttgtggtggaccagagtttcacatgttagtgagaatttgtgtttctgtccttgagaaatggaaaagatacagactagatgaatgaaatgcccaaatttcatcttttataaaagctcaggatggatattgagatattatagataactagcagactgttagaagctcttatcattacaggcatgatggctcgcgcctgtaatctcaacactttggaaggctgaggcaggnnnnnnnnnnnnnnnnnnnnnnnnnnnnnnnnnnnnnnnnnnnnnnnnnnnnnnnnnnnnnnnnnnnnnnnnnnnnnnnnnnnnnnnnnnnnnnnnnnnnnnnnnnnnnnnnnnnnnnnnnnnnnnnnnnnnnnnnnnnnnnnnnnnnnnnnnnnnnnnnnnnnnnnnnnnnnnnnnnnnnnnnnnnnnnnnnnnnnnnnnnnnnnnnnnnnnnnnnnnnnnnnnnnnnnnnnnnnnnnnnnnnnnnnnnnnnnnnnnnnnnnnnnnnnnnnnnnnnnnnnnnnnnnnnnnnnnnnnnnnnnnnnnnnnnnnnnnnnnnnnnnnnnnnnnnnnnnnnnnnnnnnnnnnnnnnnnnnnnnnnnnnnnnnnnnnnnnnnnnnnnnnnnnnnnnnnnnnnnnnnnnnnnnnnnnnnnnnnnnnnnnnnnnnnnnnnnnnnnnnnnnnnnnnnnnnnnnnnnnnnnnnnnnnnnnnnnnnnnnnnnnnnnnnnnnnnnnnnnnnnnnnnnnnnnnnnnnnnnnnnnnnnnnnnnnnnnnnnnnnnnnnnnnnnnnnnnnnnnnnnnnnnnnnnnnnnnnnnnnnnnnnnnnnnnnnnnnnnnnnnnnnnnnnnnnnnnnnnnnnnnnncactgcaacctctgcctcctgggttcacgtgattctcctgcctcagcctcccaagtagctgggactacaagcatatgccaccacgcccagctaattttttctatttttaacagagacggggtttcaccgtgttagtcaggatggtctcgatctcctgacctgatgatccgcctgccttggcctcccaaagtgcggggattacaggcgtcagtcatcgcgcctggcccatattaattattttaatacttataatgcctcacagttaaatgccttctctgctagtgtactggtatcagatggcgcccaggggactgtctacagcatcagttttacttgataagtatttgatgatattaatttaatatggaaacaaatgtgaatatattatggaatataacagcaatgcatgagtgaaacaattttgccataatctcacctgaattgattttcctttttgatagtttaatatagaaaaatgtaccttgctgcaataacttgtgagaggtgctgttaataagaaggacacagtaattgagggagtaaaagtggttataaggaaatgtcatgaaccctcaattgtataattttaaattatgtaatttataatctataattttataccttaatatataattttagtttttaatagttcatcaaacattctttaatttggtcattgaggtgtttaacacttttattgctttgaaaaaaattgtgatttgaaaagaaaaattgtgatttgaaaacatttacttctgtaatatgtctcatatttcaaatcttttttgtttgtttgttttgagatggagtctccctttgtcacaacctccacctcccgagttcaagcaattctccttcctcagcctcctgggtagctgggattacaggcacatgccgccatgcctggctaatttttgtgtttttagtagagacagggtttcatcatgttggtcaggttggtcttgaactcctagcctcacgtgatccgcccacctcagcctcccaaaatgctggtattacaggtatgaaccaccatgcctaagcctcaaatttccaatcataatgcagaactgtgacctcaagcacaaaattgagcatttaaagcacttttgtctacttgatattgaacatgcacatgatcaaagttttggttctcttagcaaaaaaatttatacaaacacaggctttcacagtttagcacacataattctagggcctgtcctggcagtgaaggagccccactttgcaatcatccctttccagttgctaatggtttgattgtggcctttggaaatgtttagagtgtttttgccagaactggcaccaatgtcattagtttggccaaggctagtctgaagcaaaatggtgaagtaattgaggtgtgtttgcaatctcttgccactgttgctttcctccagtctccccagatgcccggtcttccgcttacttttttgttcttattcttgcctgatgatggctaaggctttcttctctttgcttttagcataaaatcccaactccttaccaaggtttggctctttctacacttctgaccacctcctagacctctttctccctgaggttgctaaagattagcaactgcatctttttcagcctgtttttgttcttgtagcactcaagccctttcttaccttaaggccattgtacatgcacggggtctctctgccatcgtggctggatccttctcatctttttagggtcgagctcatgtagcacatctgggaacccttccctgccaccctacttaaaggaacccccttgccctcaatctcttatgttgccctttgtttccttcattgtacttactaaatttcaaagattcttagatacacattttttaaactgaaaattaaatggaaataattatagattcacatgcagttgtaagaaacagtacagagatcccttagactctttgcactttctcccaatggtaaaattttgaaaaactatagtataacatcacaaccaggacattgacattaatacaatccataaattttattaggatttccccagttttactttatatttgtctgtgtttgtgtgtgtgtatgtgtatgtatataagttctatacaattttttcctatctgtaggttcatgcatccaggagcatatgcaagatactgaacagttccgtcactacaaagatctcttgtgttgttcttctgtaactatatctaccactctcctatacacctccctaccctctctcattcctagctcctggcaaccactaatctgtcctccatttaaaaaatgttctaatttgaaaaatgttatatacataggattatacttttaaatatataaccttttgggatttgcttttttcacttagtataattccctggagattcattcaagttgttgcctgtatcagtagtttattcctttctgttgctgagttgtattcaatagtacagctgtatcacagtttatttaaccattcacttgttgaaggacatctgtgctgattccagtttttggctattacaaataaagcttttatgaacgttctttgtatagaattttctgtgaatgtaatttttcatttctctgggataaaaacctcaaggtcatatggtaattgcatgttttcttttgtaaggatctgccaaactgttttcaagagtgactataccatttactttcccatcagcaatgtataagttatattttaacatctctgaaatcaggatgcatttcttagtagcatgttaaataatgattcattttacagtctgtcttcttaaatcatcttatttattgacttgattgcttatttgtcttctcactaaaatgtaaatgttaaaaagacaaggattctgcccatattgttcaatttgtttttacaaggcctagcaacagtccttggtatgctataagttactcagtaaatactcattagatatatgaatgaagatgctaattgtttatatgttgtctaaaagtgcagttattagagcttgtaatatttttgtatgacctcaccacccatcctgagttatctacattttaacagaagatctcagaagtgtcctaaatctaattttttatgagaatagtgtagggtgtataaagaggaattgcccattttagtttaaattatttcttataacaaatcagaagaaggcttatgggtggtcactttaaatacttttaaaaagtcttatgttttaataaataatgtgaaaaatctatatgccatgtaaaatataaagaaatgacagggtgcagtggttcacgcctgtaatcccagcactttgggaggccaaggtgggcggatcacctgaagtcaggagttcgagaccagcctggccaacatggtgaaaccccatctctactaaaagtacaaaaattacccaggcgtggtgatccacacctgtaatcccagctacttggaggctaagggaggagaattgcttgaacctgggaggcagaggttgcattgcgctgagattgcgccattgcactccagcactctaagcaaaaaaatgtaagcctggggaacagagtgagactctgtctcaaaaaaaaccaaaaaccatatgtatgtgtgtgtgtatgtgtttgtgtgtgtgtgtgtgtgtgtgtatatatatatagaaataaagaaggtgtgagcactgaataagatgagaaggaagttaaaaggactagactgaaagaactgagtctacaaattttattaattgatgtgttatcaattaaaaatgaaagaaaaaaatttatattactatttttcacaaataaaccaacatctttaaatttattttagggagtgaggtaggattaacaaaagtgggtaagttcaacaagaagtgggcaatacttcttaagtgttttgtaaaacatcagttttacaagttgaagtgtccatctacatccctgtagtgtgtggcaggatagggtttttttttttttcctagtatgtcttaaagaccttaaaactcaaagcttgttttctgtatacctaaggctttttgtaaattaaagattttgcttatgtcttatctttgatcattagataagtataggtagtattaaataaaatcatacaaccagattttaagtacttaatgtatagggaaatttctgtctgtgttagtgcaaacttaatttctaataggaaagaaaaaagctaataagagctcatccttcgttgtctagtattaagagttctcaggtctttgattcatagaggcagattgaagctaagatataagattatgattaatgtgaaaatatttggactatgagccttcaaaatcaaagattagctgataactttatatagatgttattactattggaatagtagtgaattaatgctattctactaaatagtatagatttatctgggaggcctgcaataaacttaaagtgtacatatcccactgaaataagaatactacaaatatagcctccttcctagattctctcctttaactatcatagttaaaaataggtagagaggtaaaaatatagttgtttttttttaaaaaagtttataataagtacctgagcatctggtatttgctaaaataattcaaagtagatatgttgcatttcatatgttagaatacaaactgcccatttaggataatattgctgttttttattttcttaattgcagaaaacactattataagtagttaaatgacttgttattgggtttgtttgcatgtatatagaattgatgtggaaattttaaacactactaaatgcattttcctaaaatatgttttttaaaatatagatatttcacagttcttgccgagtgcttcactttttcactagaagtaaacgactttttacagccagtttgttcactttcacaacccagcagacttctttgagattggtctggattttacagaacttgactgaggtaagaaaatactgtgtgtatgtggaaaatatgtgtgtatgtggaaaccatataaagactatggggaagaaaaaattaaaggaataaagatagtaatttgattatttgagggaaaattaagtgtctaccacatattggaatggaagacaaagtggcatcttattttgtttgttttgcttttctttttgagacagagttttgctcttgttgctcaggctgatgtgcaatggcgtgatctcggctcactgcaatctccagctcccaggttcaagtgattctcctgccacagcctcccaagtagctgggactacaggcgcgtgccaccacgcccggctaattttttgtatttttagtagagatgaggtttcaccatgttggccaggctggtcacacactcctgacctcaggtgatccatctgcctcagcctcccaaagtgctgggattacaagcgtgagccaccactccccgccatatctttgatttatatcagtggaattcttttgtgtcagactccttttgctcaatattatgtttttgacatatagcaatgttgtgtgtaaattactttgcttatattttcattgctatttgctgttcaatgtatgattttaccatagtttattgtctattctattcatgtacatttgggttatttcctgtttttagctgttatgaataatgcatctcttggtgtacatgtaattgctatgtctatacataggaatggaatttttagggcatgaatgtgtatatatatcttcacctttttttttttttttgagacagagtctcaccctgtcacccaggctggagtgcaatgtgcgatctcagctcactgtaaactctgcctcccaggttcaagcgattctcctgcctcagcctcctgagtagctgggattacaggcgcatgccaccatgcccagctagtttttgtatttttagtagagatggggtttcaccatgttgtccaggctggtcttgaactcctgacctcgtgatctgcctgcctcagcctcccaaagtgctgggattacaagcatgaatcaccatgcccagccatgtatctttacctttaaaggataatgtcaaaacacttttgcaaagtgataataacaatttacacagtatcagtatgtgatcagaggactttttatttcatttactgtcataattgacattattagtctatattttagccatcctagttggtaagtaatatctgagtgtgattttagactggataaaaaaacaagatctaactatatgttgtctataagggacacacttaagatttaaaaaatataaagaggttaaaagtaagtgagtggaaaagatatatcatgtaaacagtcactgtaagaagctggagtggttatattaacatcaggtagtatagactttaaaacaaaaacatgttactagagataaaaagggaattttataatgataagatggtgaattcatcataaatatataacagttataaacacctaataacagaggtccacaatacatgaagcaaaaatggacagaattgaagggaaaaatagaaagttgagcagtgatagttggagacttcagtaccccactttcttttttttttctcttttttttgagacggagtctcactctgtcacccaggctggagtgcagtggcgtgctctcggctcactgcgagctccagctcccagattcacatcattctcctgcctcagcctcccgagtagctgggactacaggcacccgcccccgcacctggctaattttttgtatgtttagtagagatggggtttcactgtattggccaggatggtcttgatctcctgacctcgtgatccacctgcctcggcctcccaaagtgctgggattacaggcgagagccaccgcgcttgaccctcactttcaataatggatagaataactagacagaagattaacaaggaagtagaaaatttgattaacagtaacaactaactagacctaacagacatttatagaaaactctacccaagaacagaatatacactctcttgaagtgtacatggaattttctccaggatagatcataggctaggccatactacaagcctcaataaatttaaaggggttgaaattatacgaagtctgttgtctgaccataaaggcttcgaattaaaagtaacagaaaaaacttgggaaattcaaaaatatatgaagattaaacaacacacttaaaaataaccaaagggtccaaggagaaatcataagagaaattaagaaatactttgagatgaatgaaaataagatacaacataccaaaacttattagatgcagataaagtacttagaaggaaatttatagcaaaatgatattacatgtagaagagtatatttaaaaagaagcaaaatatcacgtcaatagtctaccattctaccttacgacatggaaaaagatgagcaaactaaattcaaaacaagcagaaggaaagaaataatggaattagaacaaaattaatataatagagaatagaaaaacagtgaagaaaatcaataaaaccgaaagttgcttctttgaaaagattagctaaactgacaaagacgagagaaaacccaaataactaaaattatgaattattatgaaattatggatattaatactgacctcacagaaataaaaaggattaataggcaataccatgaacaagtgcatgccaacaaattagataacaagataaaatgaaaaatttcctagaaatacacaaactactggaaataactcgaggagaaataaataatctgaataaatctataacaagtaaagagattgaagtaataaataataaattctcacctagaaaagcccagagccagatggctttactannnnnnnnnnnnnnnnnnnncccagagccagatggctttactagtgattctaccaaaagttaaagaagaattaacacgatcctttcacaaattcttccaaaaaatagaaggggaaaatagacaattgaatagtaatagttggagactttaataccccactatacttccattattggagtggattatacttccattattggagtgagagatacttcccagctctttcttttaggccagtattccctgataaccagatcaaagacatcaagagaaaagaaactgatagaccaatattccttatgaatacaaatgcaaaaatcctcaacaaggctgggtgtggtggctcatgcctgtaatcccagcactttgggagtctaaggcaagagtattgcttgagcccaggagttcaagaccagcctgggcaatatagcaagacaccatctctccaaaaaaattaaaaattaaaaaattagctgggtatagtagtacacacctgtagtcccagctacttgggagactggggtgggaggattgcttgagcccaggagtttgagacagcaatgatccaggatcacaccaccactgcactccagcctggatgacagagcaagaccctgtctctggaaagaaaccacacacacacacaaaacttcaacaaaatattagcaagtcaaatccagcaacatataaaaaggattatatatcatgactaagtgggatttatcccaagaatacaggattggtttaccattcaaaaaatcaattaatatggatcttttataaaaactggtaaatgtaaaaaaatagaaaattaatatacaccatattaatagaataaaggacaaaaaaacacatgatcatgtcagtagatatagaaaaaagcatttgacaatatctagcccctcttcatgataaaatgctcaacgtactaggaatagaaggaaactccttcaacctgatctttgaaaaacccacagccgacaccatacttaatagttgaaaactgaatgtttttctcctaagttcgggaacaagacaaagatttccactctcaccacttgtaattaacattgtatgggaggttctaagccagggcagttgagcatgacaatgtaataaaaggcaactagattggaaaggaaggagtaaaactatctctatgatgcagatgacatgatcttgtatattgaaaatcctaaggaatttcctaaaaaaattagcactaatattataaatgagtttagtaaggtgggagggtataagatcaatatacaaaaaaaaaaattttcttttttgacacagagtctgtcacccaggcttgagtacagtggcatgatcgcagctcactgtagtctcaacctccaggctcaagagatcctcttacttcagccgccagagtagctgggactacaggcgcacaccaccatgcccagttaattttttttttttttttcgagatggagtcttactctgtcatccagtagggagtgcagtggcatgatcttggtttactgtaacctctgcgtcccaggctcaagtgattctcctgcctcagcctcccaagtagttgggactacaggcgtgcgccacaacgcccagctaacttttgtatttttagtagagacggggtttcgccatgttggccaggctggtctcgaactcctgacattaagtgatctgcccgcctcgaccttccaaagtgctgggattacaggtgtgagtcaccgtgcctggccccagttaatttttaaattttttgtagaaacaaggtctcactattttgtcctagctgctcttgaactcctgggctcaagtaatcttcccaccccagccttccaaagtgctgggattacaggtgtgacccgccgcacacagctaaaaatcgtgtttctatatactagcaatgaacactagaaagtgaaattaagaaaacaattttggctggcgccagtggctcatgcctgtaatcccagcactttgggaggccgaggggggtggatcacctgagatcaggatttcgagaccagcctggccaacatggtgaaaccccgtctctactaaaaatacaaaaattagccagacatagtggtggactcctgtaatcccagctatgtgggaggctgaggcaggagaatcacttgaactggggaggcagaggttgcagtgagctgagatcacaccattgcactccagcctgggcaacagagcgagatgctgtctacccacacacaaaaaagaaagaaaacagtttcatttacaaaaacatcaaaaagaataaaatacgtatgaataagcttaactacaaaatatatactttgaaaagtacaaaacattgttgaatacagttaatgaaggcctaaataaatggaaagacatcttatatacatggattggaatatttaatactgttaagattatagtattcttcgaatttatctacaggtacaacacaatttctaccaaaatttctgcttttttttttgtttttttttttttgtagcagacaagctgatcctaaaattcacatagaaatttgaggaacccagattagcaaaagaatcttgaaaaaggaacagtatgggaaaactcacacttctcaatttcattgtggctttaatttgcattactctatttcctaacaaaattgatatcttttcacatacttaccatttgtatatccttttgtgaagtacctcagtcctttgttttctaaaaaattaatacactttaattttagagtagttttaggtttacagaaacattcagcagtaaatatagtttccatatgcccttactccccaacagtttctgctgttattagcatcttgtattacggtggtacatctgttacaattaatgaaccaatatggaaacattattattaatgtaatgtatctaccattgcagtactattatacactgtagtttcactgtcctgaaaaatcccctgtccttcacctactcacatctctttctgaaccctgggtaacactgatatttttattgtctctagctttgtattttccagaatatcatatagttggaatcatatagtatatagactttacagactggcttctttcacttagcaatatgcatttaaggtttctccatgtatttttgtgccttgttagctcatttctttttatcacctaataatattccattgtctgaatgtggcacagtttatccaatcacatttttttttttttttttgagacagagtctcactctgtcgcccaggctggagtgcagtggcatgatctcagctcactgcaacctctacctcccaggtccaagcaattctcctgcttcagcctcccaagtagctgagattacaggtgcctgccaccatgcccagttaatttttgtatttttagtagagacgggatttcatcatgttggccaggctgctctcgacctcccgaccttaagtgatccacctgccttggcctcccaaactgctggaattacaagcatgagccaccgtgcctggcctatccagttacctattgaaaaacatcttggttacttccagtttttggcaattatgaataaaactgctatacacttttgggtgcaggtttttatttggacataaatcttcaactcatttgagtaaataggtgtatgattgttggatcatatggtaagactgcatttagttttgtaaggaactatcaagctatcctccaaagtagctgtgtcattttgtattcccaccaacagttggagagttcctcttgctccgtatccttgccaacatttgctgttgtcagtgctttggattttagctattttaataggtgtgtagtagtatcttattgtttcaataggtgtgtagtaatattcattgtttgcagttccctaatgccttgtgatacagagcatattttcatgtgcttatttaccatcagtatatcttgggtgaggtgtctgttcagatcttttgccattaaaaaaatttttgtttgtttgttttgagacagattcttgctctgtcacccaggctggggtgcagtggcatgatcgtggctcattatagcctcaaaactcatgggctcaagtgagcttcctgccccagcctcctgagtaactgggactacaggcgtgtgccaccatgcccggctaatgttttcactatttatttatttatttagagacagagtctcactctgtcacccaggttgagtgcattggcatcatctcggctcactgcaacctctacttcctgggttcaagtgattctcctgcctcagccttccaagtagctgggattataggaggctaatttttgtatttttagtagagatggggtttcaccatattggccagactggtcttgaacttctaacttcaagtgatccacctgcctcggcctcccaaagtactgggattacaggcaagagacacagcgcccagccaaattttttcacttttaatagagatagagtgtcgctgtttcccaggctgtcctcaaactcttgagctcaagtgatcctgccaccttggcctcccaaagtgctgggctacaggtnnnnnnnnnnnnnnnnnnnnnnnnnnnnnnnnnnnnnnnnnnnnnnnnnnnnnnnnnnnnnggcacagtggctcatgcctgtaatcccagcactttgggaggccgaggtgggcggatcacgaggtcaggagttcaagaccagtctggccaatatggtgaaaccctgtctctactaaaaatacaaaaaattaccacgcacctgtagtcccagctacttgggaggctgaggcagaagaatcttttgaaccggggaggtggaggttgcagagagctgagactgcaccactgtactccagcctgggtgacatggccagactctgtctcaaaaaaaaaaaattatttatacttctttttggctggtctttagaaatatagttactttttgtgaattgacctttaatccagtaatgttactgaattcacttagttattctagtaacttatctaatagctttttttgcaaaggatgtttctgtgtatacagttatgtcttttgcaaatgactagattttttttctgctggtttaacactttttttctttttcattggcaaggacctccaggatatgttgattagaaggagggatcattaattctttttcttgtttctgatcttggaccaaaggctttcaacatttctttacttagtatgaatttggctttggggtgctatcctttgtactttatcaaattaaggaagttccctttctttgctaagtttgctgacactttttattatgaatggttattgaatttatcaaacatattttctgtgcttattatctaggtttagtgtgttttatgcaagctacttggggtttgtagggctttttgaatttgttgcttgaggtcttcgttgattttgaaaaatgctcaggtgttatctcttcaaatgtaatttctgctccattctccttatctttttttctgaaagcccaaatatgggccattgccctaggacctcaattctctatggatctaaggagagttgttgattttcagtttgctcaactttttttttgtgaggatgtaagtaatgacttccaagctctttacctatcagacgggaaattggagtcccctcttgtacatttttaagtttagaccttctcactgaatcccctgtatatctaaccctatcttacatattttccatccttttgtctctctgtgcttcattctacccagtctattccaacctgtcttccaatctattattcactcttcaattgtttctaatgtgctattaaaacccatcaagttcttaatattttagttctataatttttattttttcccatataattagcatgtttattttaaagtccacgactgtgaattccatcatctgtagctcccatggactgtggactgtctttttttcctgtttttgtttttcttccatgttattgtttcttcatatgcctggttacttatttgtatatatgtgtatatatgtgaccttgatattatatttgtaaaattctgtgtagaatttgagagccttaacataatgctgtcttgctctagataagatttatgtttgtttcttccattcttccagttaacaggattatctcaatccaacttaataattgagatgattcaaatctgacttgtagttcctatgagagccggtcctagtttactcctactcttagggtagagccatttgcagtccttagccaacgtgaggggggttgacctaggtcctcctaccttaggaagccctgatgtctactctgtgtcaccctagcctcctaagggcctagcacctatcagaggccctgactcataaatatttttttaatagatggatgaatttaccacctgtcaggcattgtgctactcactgaaatacaggttaacttttggctattaaaaaaagttgtatctggaacaaattttagaataaaaatttctaaatttaacaagagtttgaaatataagaatacttgaaggcgctccatatttaagtggcataactcttgaatggaatcttaaagtacttgtattataaataacctacaaatgacctcgtttttggaactcatgtcatttgttttcattttactgatcctttctactattaaagtataatttatctttaaatgtttccatttgcttttctttttatttcagttatttacttacttaagtattttttggaacatctgctatttgctgggaacctccctaggtgttggggatatgaatataaatgcaatcttgtccctgcccttaaagagctaagggtctagtagagaggcagtaatggtgtgagataatggctaaatggaagctatctatagaatgctacagactgagttagaaggagtgtgggagtggggcaggcttggacaaagccaggaaatgctggtcttgaaggacaaataagagttatagaggtgataaactttgtttcaagaaattgtttttcagtatgttaataacaccctaacaggcatttcagtttctctgctagctattatagtttacagaggtgttgacaacttctgtttctcttggcatgctttatgccaagaatcggcctgttaataatattttaggctttgggggtataagctttttgtcacaaccactctgccatgaaagcagccgtaggcaacaaatgagcatagctgtgttccaataagactttacttatggacactgaaatttgagtttcatataattttcatgtgtcacaaaatattctccttttgtctttttaaccattaaaaattatgaaaaccatttttaatttgctgtacaaaaacagagagtaggctggatttggcctgtgggccatagtatgccatcccagctttgggcttttttttgttttgttttgtttttgagacggagtctcgctctgccacccaggctggagtgcagtctcggctcactgcaagctccacctcccagcttcacgccattctcctgcctcagcctcccaagtagcgggactacaggtgcccgccaccatgcccagctaatttttttttgtatattttagtagagacagggtttcaccatgttagccagaatggtctcaatctcctgacctcatgatccgcccgcctcggcctcccaaagtgctgggattacaggtgtgagccaccgtgcctggccattttttgcatttttagtagagatggggtttcaccatgttggctaggctggtcttgaactcctgaccttaggtgatccacctgctttggcctcccaaagtactgggattacaggcgtgagccaacgcacccagccgactagtgtatgtttaaactaaaaatgtatatactttgttttttttaaaaaaaaaacaacaaaaaacacaaaagtaactaacgcatgcttggtatacaactaaaacctttcagaaatattatacagaaaatgaaaatcttccctctctcccctggctagatctcatgccctatataataatcacttagaaccatttggaatatattctagaaatgtttttgtgtacatattaatttttataaaaatgggtttatattgtatcactgatctgcatttaatcatgcacttagtaatttagcctttttgaatcgattttgtgctgttgtgttttcaaggtgcaaaaggcagttgaagaagaaaattgctgctttgggactattgatacctggttgttatataagctcacaaaaggtaaagatgacctgaaagatctattttaaataaccgaaatttgatcaagagaaatgatttgcctaaaaaaagtagaagttactttttttttttttttttgagctagggtctcgctctgtcaaccaggcgggagtgcaatggtgtaatcatggctcactgcagcctcagcttcctgggctcaagcgatcctcccgcttcagccccctgagtggctgggactattggtatgtgccaccatgtctggctaattttttgtatttttagtagagacagggttttgccatgttgcccacgctggtcttgaactcctggactcaagcaatccatctgcctcagcctcccaaagtgctgggattacaggcgtaagccactgcacctggtcagaagtttttttttttttcccccttcctgtactccagacatactgctctttggtaccctattaacaacatgttctagtaaagctagacttattctagatttattataagaggaggacaatttttaaataaattgtgatgaaacttcaatataagactggggaacagtcttaattnnnnnnnnnnnnnnnnnnnnnttcagtaacaaatctgccattttgctagtgggtataactatgggtgacattaacatctttgagcctctttgtcatctttaaactgggggatcgtaaagtgacaacatgtatgtaagtacttttgcacaactataaaagttcataaatattaagtgggaaattgcttttggagacttcacattgaaaatacacattttgggccaggtgcggtggtttacgtctgtaatcccagtactttgggaggctgaggcgggcggatcacttgaggttgggagttcgagaccagcctgaccaacatggagaaaccccgtctctactaaaaaatatcaaattagctgggtgtggtggcacatgcctctaatcccagctactcgggaggctgaggcaggagaatcacttgaacccgggaggcagaggttgcggtgagccaagatcgtgccattgcactctagcctgggcaacgagtgaaactccgtctcaaaaaaaaaaaaaaaaaaagaaaatacacattttggaatgaatttgagggtagacaaaggtctatattatatactatcgataggtgttgatttatactatctgataataaatgtattatttcctatttaaatttaggttctgtatatgccacagatttttcaaatgctagtacaactggactttttgacccatataaggtaaaaatttttttttcttctttttgaatcacacatttttgtgtaatatagatagatttaaatttttaaaattagtttatttttaattgacaaatatatcatgtacaacatgatgttttgatatatgtttagaggtttgatatatgtaaatatgtatattctgatgatacgtttttatgctcagatgtgttggagtgggatgattacctctctaatttcgataccactttctctcctacctcctgtgagggacacaaggtaataataaacatcagacatagtaaccagcacaatggttcttgaattcattttgttttgtggggaaaagcattttattacatgtttgaaggacttgtatgttcattatgtaactttttggcttatgcaaaaaaacaatttgctgagttttaaaactaatatttctagagctgtaactaactttttaatgaattttatttgaagccacaattttggatcagtggatgaagagatatttggtgtgcctataccaatagttgccttggtaagtaggaaacttgagggattccctttgtatagtataaactaaagtaatatgtattaataattgagactagctttaagagaaacagaaggtctttggcagagtaagattaaagtatttttttttctttttaagttaaaggtccctggatatgaccagaatatctgctatatttttgggaaggggaccattgagccagtattctatcatggaagtactttataaccttttctgacttgcttgtatattgtttatcagaaaacttaaattaaaaaaaattttttttaattctgagtggtatttagtttacatttggtactctgagacaaaacacagtgatggggcgaatatttatgttctgtttgataatgtgtaaccacaaacagtgttagggcaacttaaactagcagagaaagttgtatgtacatttaataaagtccttagccatcatctaccagtaaataagtttgtagaataatgaaatatttgccatttttgatttttttttttttttttgagacagggtctcactctgtcactcaggctggagtgcagtggtataatcatgcctcactgcagcctcggcttcctgggctcaggtgattcttccaccccagcctcccaagtagccaagaccacaggtgtgtgccacgacacctggctaattttttgtatttttggtagacataggattttgctgtgttcccctggctgatctcgaactcctagactggggccttctgccacctttgcctcccaaagtgctgggactacaggcatgagtcactgtgccaagcctgtttttgatttttaagagtcctttcacattgcctttgatttcctgtggcagcttaagcaggaggtagagaccacctgttgcaagatgtgcagtctccacagtagctgggggagcagctgagggaaagggaatttaatttccaagttacaaaatcattatcatttagagaggatcggtcttattcaatctaggcataggtgcagggttagattaaggtatggctggaagagttaccaattagtgacagagggttctttaaatgagttgttgttgttgttgttgtttttgagatggagtttcactcttgtctcccagactggagtgcaatggcatgatctcaccgatggctcactgtgacctccgcctctcgggttcaagtgactcttctgcctcagcctcctgagtagctaggactataggtgtgcaccaccatgcttgactaatttttgtatttttcctagagatggggtttcacgatgttggccaggctggtcttgaacttctgacctcaggtctcccaaagtgctggaattataggcatgagccagcaggcccagcctttagatgagttttgatccttaaaatgttgctgtttgtatatctacatttgactatattaacaaaatgttacaatttttattttaacaaaaatgtatggttgggaaatagatggtttttacttacatctatttatatcaaaacatttacctatgttttatattgtttaataaaataaataaatttgtgagggttggttattttgactaatgaatgaaacaaatgttagttgaaaatgaaaaaaatcttagtttttttttggttatcatttttattcttattttcttttttttttttttttttttttttttgagacagagtctcactctgtcgcccaggctagagtgcagtggtgcgatctcggctcactgcaagctccgccttccaggctcatgccattctcctgcctcagcctcccgagtagctgggactacaggcacctgccaccacgcctggctaattttttgtattttttttagtagagatggggtttcaccgtgttagccaggatggtcttgatctcctgacctcgtgatttgcccacctcggcctcccaaagtgttgggattacaggcgtgagtcaccgcgcctggcctcttaccttcatttctaagattattcatagataattaaaagtcgtgaagtaggttacccattaaaaattcctaaggcaggccgggnnnnnnnnnnnnnnnnnnnnttctctagagatccccctcaggcaggccgggcatggtggttcatgcttgtaatcccaacattctgggagaccaatgtgagaggatcgctttaggccaggagtttgagactagcctgggtaatagagtgaaaccccatctctacaaaaaaatttttaaagaaatggccaggtgcagtggctcacacctgcaatcccagcactttgggaggccggggcaggtggatcaagagatcgagaccacctggctaacatggtgaaactccatgtctactaaaaatacaaaaattagcttggcgtggtggcgcgcatctgtagtcccagttacttgggaggctgaggcaggagaatggcatgaacccaggaggtggaggttgcagtgagcccagatcacgccactgcactccagcctggcgacagagtaagactccgtctcaatgaaaaagaattagctggatgtggtggtgtgcgcctgtagtcctagctgccttgtagtcctagctacttgggaggctgaggtgggaggatcacttgagtccagaagtttgaggctgcagtgagctgtgatcttactgcactctagcctgggtgacagagcaagaccctgtctctaaaaaacaaaacaaaacaacaacaaaccaaaataaaaacaattcctgaggcatgtcagttatctgcagagtattagtcctagggagactcctatcctatggttgttgctccctattctctttgggatttttttttttaattttaaggaaaaggaaaaagaaacgaagatgtttaatcatgagagtacaataagtgagacaatgctctataataaaattggccactgttaagggcaatgggtttacatttgaacatttttggtaggttgctgaccagcaatcagccatgtttggagagtgctgcttccagacaggtgatgtgaaattaaccatgggaactgggacatttttggatattaacactggaaatagccttcaacagactactggaggtaagtagttaggatttatcctatttattaataaaatatcacttctgttcatatttaacttctgtgatacttatactattttcccattttgtgatattctctaacatattttattattcttaaagacagttaattatcatttccctttcttttccctttaagtgaaaagcataaaaaacaagaatgatattgttgaaaaattcaggatatatggtcagctttctgggtatttttctataacacatgttgtatttgttcaaaactccttactaggggccgggcatggtggctcatgcctgtaatcccagcactttgggaggctgaggtgggcagatcaccctaggtcaggagttcgagaccagcctggccaacatggtgaaaccccgtctctactaaaaatacaaaaaaattagctgggggcatggtgtccggcacctgtaatcccagctacttgggaggctgaagcaggagaatcacttgaaccggggaggcagaggttgcagtgagccaagatcgcgccactgcactccagcctgggtgatgcagtgagactctgtctccaaaaaaaaaaatcttcttactagggttctaaattttttttttctatttgttagaaaattattttgtgaatttctttgagtggtagtcctcagctagtgaccaatgcaatggataatgacaattgctaagaatttgctctttttaatagaacaaatcctgggatttacagaccaagaaatctagattatagaactatactagtttgggctctgtttccataacatggttactaagaggtggcttaaaaaacctttttcctaccttttatccctcctcaagctcttctttttcccctaactaggaagatggaattagaaaatgttgataattctattagattgtttctatttaggagccttgtttgaaaaccacagataaatacaatagcatagttctctagcaaaccaatctcatagtacccttttatttctcaagtaaaatatttattgccatatttctagagatgtagacatgcctatagctaatacaaattagtatttattgttcatattatgtgccaggcactgtgctaagttctttttatgtgttaattcagtttgttcatttcgtagctctctgaggtaggccgttttgtagttaaggaaactgaggctaaaaggttagaaacttgcaagactacagctagtaaatgtaagtgggctagagtttgaacgtccacagtctgacttcagaggcactttgcagttttttgagataaccaaatcattacattgtagaagtctctataatgaattatgcatatatttgacttaacattcgttgtttgttttgcaaggcttttatccattaattgggtggaagattgggcaagaagtcgtatgcttagctgaaagcaatgcaggagacactggtactgccataaaatgggctcagcagttaggtaagttgtcttttaaatggatttcacaagccagacctaaagaattcaagaatgccacaggattgcagattagtaggaagcaaatggattgttcaaatgaaacactaaaataaaatgacatctattaaaagaaaatataaagtatttttatgatatcgaaatggtaaaaggctaggtcttaaagacaggaaccataaagaaaaagaataataagtttaactatgtaaaatattagtgggtaaggagagatatgccataagcaaaataaaagacaaattggtaaaaacaatttgtagcatatgtcagaaaaattaataacatgacaaaaatgggcaaaggaccgaagtacaggtattttacgatcaaatgactataatgaaatgctgttcacgtacgataattaaagaaatgcacattttgggctgtggttccagtgtcagttcagttttcagtgcttttgcagtgctatttggatccgcccctcatttgtgccacccagtggtcagtctggggggtggtttgcctggagattagttctcaaagccttaagcttgttgtttagggtcatatcttcacatgtgctgctcaagagtgagactaggagttcataaaaacctttataaggtaatttttcctgagctcctttctctcagtaatctccctggtaccttttgactcttgggatccccatattggtgttctggctagaaagctggtgctttagtttctctactgaacagctgctactacttctacctccctagcttagtggcaagagggatgagagaaggagaaaaggggggtcagagagagagagaaggaaagaagggaaagaaaggaaacaaagaaagagaaagaaggctgggcgcggtggctcacgcctgtaatcccagcactttgcggggctgaggcacgtggattacctgaggttgggagttcgagatcagcctgaccaacatggagaaaccctgtctttactaaaaatacaaaattagccgggcatggtggtgtgcgcctgtaatcccagctactctggaggctgaggcaggagaatcacttgaacccaggaggtggaggttgtggcgagccgagatcacgccattgcactccagcctgggcaacaagagcaaaactccgtctcaaaaaaaaaaaagaaaaaagaaagagggaaagcaaaagggattttcttaacgtctcatctttgagttttggttgcctctgctgctctgtctgctgtcactgcagccacaggattgccaggggcaggcaagaccaaggggagtgggcgcacgggaagaagcaagcaacagggatttccccccatactcttagcttgcagttttatgtgcctgtgctactgggctgccattgccgctaccataggattgcctgggagaatgaaaaaaatctaaagaaaacaaaaaatgagaatctctccactctgtcctgtagagacccttgtctcctactgctcagaccagaaaggagcttctattgaagctctttcatgtctgcactcagtgtacagatctgagtccttgggtttcaggctacctctgagtctaggccaggaatatcagagaaaatataaaaacagggagtccccagacggcttttccatttattcctccaagattcttagttacattcagtgggggagagagaatggagtgtgcttactctgaaagactttttatcaattagcttatttgacaacagattaagtggaagattatttagagaaattcttcaagcaaggaatgaaacaaacagtgaggaatgtgaataagataatctctctttgttttctgtttctttatctgttaccaacaattttcctcaaaccaactgtctagtatgttttcctacatcttatcttgtaaaaattgaacatttggacaagattcattaaaaagtatagattttaaaaccaatttttttaaagagataggagtctcgctatgttgcccaggctggattcaaactcctgggttcaagtgatcctcctgcctttgccttctgagtagctgggattacaggcacgccaccatacttggcttaaaaccagtgtttttaacattagtttttgaagtggtagagatattttgatgtattatctggacattttgaacaaatggatgaaacttacggatttgataactgtcattttgagtaaaatttgtagttattattgagtgatcctcattaacttgagttttaatgtaagtgctccttaaatgtctttagtgaatttaagtatattaatttagttatataacaaatcataaaatgatataaagtcaacttaattaaggctctctaaagccagcaatatttattacgactgagtcttttcttctgatctttgctgttcagtcctacatactcattcagaagtcactttacaaacaaggatatccaaatggccagtgaaaaggtatttaactttattagtcagcagggaaatccaaaatcaaaccaccatgtaatactaccaaaatagctaaattgaaaaacatagacaatatcaattattggcaggaagataggtgacgaactctcgtgcctgccgctggcaggagccttaaattggtagagccactttgaaaaactatttggcagttatctgttaaagctggttctaaatgtgaagaccttagaactggccattccattcctttgtgttaataaacagaaatgtatacatatgtccaccaaaaataatgtacatgaatgttcattgggatctgtttctattagccaaacactaggaactacccagatgtatatcactaatagaataaattgataaattgtctatagtcacataatagaatactatatagaggtgagaatgaatggagtacaactacatgtaacagtgtgaatgaatctcacgagtacgatgtttaacaaaagaaatttgtatcttgacctgggtgtcagttacttggatgtattcacactgtgaaaactcatctagctatatacacttaggatttgtgcatttttctggtctgtatatcatatacttcagttaaagtttactaaattaattgtcttggtttttttgtttgcttgttttttaaaaattgacttttaatatatctgttactggccccttatttaacttattagatggagtatttcagttaattttcttgggtattatattacaggtagatgatactttcatcagaaacctaggatggctcttatctttcagaggataattttttaatgccaaaaatcctacatagaattgattttttaaacagcccaaatatctttaaaggaaaaagcagccaggtgtggcggctaacacctgtattcccagcactttgggaggctgaggcgggcgaatcacctgaggtcaggagttcaagaccagcctgaccaacatggagaaaccccatctctactaaaaatacaaaattagctgggcgtggtggcacatgcttgtaatcctagctacttgggaggctgaggcaggagaatcgtttgaacctgggaggtggaggttgcggtgagccgagattgcgccactgcactccagcctgggcaacaagagtgaaactccgtctcaaaaaaaaaaaaaaaaaagaaaaaaaacgtaaggcctgctgcatacagagcctatctaagagggccttctacctcctgtctcccttctatgggcctggaaacctatgcagtgtgagaattcagatagtaccagaacagaatggtctttgtgctgacccttttaagtgagcaatcttttacattatgttcataataaatgttgatgcaggtaaatactatcatgtaacataattctgtttgtgcctctctaacctcttcattttgttttagggttttttgttgtttgtttgtttttgcagaccttttcacagatgctgctgagactgaaaaaatggccaaaagtttggaggattctgaaggagtttgttttgttccatcttttagtggattacaggtatgtattttttaaagttaatggcaatcacaaatatttttctcctcctgccacatccaaacttatatatctaccattctgttaccttaaaatttgagcactgaacagaactaagatgaaaggtagattttagggctgagaagttatgctctgaccaagcatgaattccatgaggaagcagagcatcctgaatgtggccctgctggcttggcttgtgctggtagaattcagctgacttctgcttagaactgtgtggaacctaagagttggcaggtttatcatagaacttttacataagacttagcattactttatcatgaccaaaaatagccatttcacagtggggggaatgtatcagtaaatttgcattctttacttagaggaaataagccattgagaattaagataaataatgtcaaggtacatacatcacacacatatgcacacacatgtatatgtatgtgtatattttgcacttgtacatttgtaagttttaaactttttttaaaaatcaaaatcttggctgggcgcggtggctcacgcctataatcccagcactttgggaggccgaggcgggtggatcacaaggtcaggagatcgagaccatcttggctaacaaggtgaaaccccatctctactaaaaatgcaaaaaattagccatgcatagtggcacgtgcctgtagtccaagctactcaggaggctgaagcaggagaattgcttgaacctgggaggtggaggttgcagtgagccgagatcatgccactgcactccagcctgggtgacagagcgagagtccgtctcaaaaaaaaaaaaaaaaaaaaaaaatcaaaatctcctttcattaattgttgtggtggagtattgattactttgcttaatcaaaaaatgaacctaggagaagtcttgattttgtaacatttaactttgtatttaattgaaagatctctgatactacctttaattttagaatattattacaaatacttttaaaacaacttttcaagtatattattatgaaagttatatgtctatcatatacttcagttaaagtttactaaacttttttttgggaaagctcatactatttttaatcctcctccaaatattttttcctttcaaaaaatacaactttctctttcttcttgcttatgtcatattcaggcaattagttacaaaagtccaaaatttgagtttgggtttataatatagaagctggtagaaaaaaaaattaggtcagggtgttttaaatctttaaaaatatcatacttccaaaactagattttaaaatgagcattatttcaatacctgtaatatttttgtgtactttatcctaaaggaccgagagcttgtgaattgattccattgcatcctcttcaggatgatgtgagggaacctctaaatagcacctatcatagtccagaaagtgaaaattttttatctaattgagatttcaggaaaaaggttagatgaataattgtcctcagcaaggtaaggtttggttaggcaactactggttcttttcttctctctgaaaaatgtgctacaggacttagtagtcaccttgtcttagcaagtctgtctttgacttctctatcacctcacatacctgtaatataatataataattatatatattatataataataataatataaagtatatttttttaagttttaaacccaaaagatttagacaaaactatctcaggtttgatttttaatttcctcttgatagcaaaatgtccctgtcctgccatgattgcaacctgcccatatactggcagtagagggcagttgggagaggtggtaggttgaccgtaggtcatgtatttccctgtgtaaaatgaaactttaactggaaattgaaagttaaaccaaacagcaataatgtgttagtactaaactgtttggaaaataggagggaagatcacctataatctgcctatgtgaacaactagagaaaatgagggatggggcatgaaaggaaggaaggtttatgtatctgtgaaactgcctttagttttagaatatttttacagctttagataattgggatctggatgttgaaggcccctaatagtctcattttctcaaaggaatctactgagaaaggggtactgggtgagctttgaggaaaatgggaaagtctaggacagccacttcagggaatggcagaaagggtgggagccatacactgggggtggcatcagttagtgcaaccattatggctttcctctagcagggctcgtggtttggggagtgggatactgaaataggtattagaggcaagaaacagtggtcatttacctggacgttagagttactgtgatgatggcagtaataggatagacagagaagctgtttgtccacatactcttgaggactggtattggaaagcagtcagcaactgacagcagttcttagcgtctttgggttcctgcttctctctgttctgcttttctcttttcattaccagctttgctctgtgtcctttcttcctccatagcttctgcttaattgtcatcatttttcttacactttttgcttcttcacaacttagaaatatcacatacaaccttcctctaccttatgcatccttttagcttcagttcccccattgatgaggtctttttcttcgggtttcctggttttggttttcagggcagagaatctgattggaccaccttgtccttttgcgtttcagtcagacactgagtcagctgtactcaccctctgcagttgtggtgatggcattaggactagagcatgaaacatggcagctttagttaacagggcctgtggattcaagcagtttccttagaaggggatgaagccagcaagtcctgtgattgccatctctagttttgtgagtgactaggatgtctgaatggtgcagtctgtgttctggggcaggagactactagttttgcccagggcaccaaacagatttcaggccagttaaagcagtattttctgtgatatcctggaagaagtcatatttatgcaggaaaaaaacatagcatattgctagggactaattgaactggccaaatctgactaatcttagttttatgatactataccatctgatataaaccagatttactatatacgtttttactaattaaaatcaccagaaggtgttaatagatttgaaaaattaaaataaaatctcagtaggagggaaatcatagctatagcaaagataagatgtaatatagaatttcttaagtcattaagaaaaatattgtttgttcatttattcaccaaatgtgtattgttctcccatggggagccagatatagtgctaggcacaagagacacactgggagtacatcggacaaggttccaccctgtggtacttatagtgtattgaggaaggtggggtttcaacaaaccatcaagcagaatatgtgattataaactgtggtgcatggtatgatgggaagttacagggttccataaaaacagagacctcatctagtctctggggtccagagttttccctgaggaagccaaaccaagatttggaagggagtaagaattaattaggagaaagggtggtagaaggtgtttcaggtaaagggatgatgtgtcaaaaccctgaagctagaaggtgctttttctgaggatcataatttcctgacagcgctggatgtccttgaaatgaccattttgatgtgttagcgctcttgtgagactcttgtctgtttccttgtgagactgtgagactgcaagctccagcagggatctttgtttttcatgttttttgtttttgtttttgtttttgtttttgtttttgttttgagacggagtcttgctctgttgcccaggctagagtgcagtggcgccatctccgctcgctgcaagctccgcctcccgggttcacgccattctcctgcctcagcctcccgagcagctgggactacaggcgcccgccaccatgtctggctaattttttgtatttttagtagagacggggtttcaccatgttggccaggctggtttcgaactcctgactcaagtggtccacctttgtcggcctcccaaagtgctaggattacaggtgtgagccaccctgcctggcctgtttttcatctttgtgtcccagaattgccttacatttctggagatacaaagatgaatagaaacctcatctgattaatacatacttccagctcaacattttggctcttttgagaacatgttaggctggattatttctgatattaggcagtaaggctattaagctaagagagaagagtgtagtggtgttttttttttttttttagaccctgtctcactctgtcacctaggctggagtgcagtaacgcgatcacggctcattgcagcctcaaacccctgggcacaagcaatccttccacctcagcctcccaagtagctgtaactacaggtgtgtatcacacccagctaatatttaaagttttttgtaaaggtggtatcttgctttgttgcccaggatagtgttgaattcctgggctgaagcaatcctccctccttggcctcccagagtgctaggattacaggtgtgagccactgcacctggccagagtatagttttaatgtctgacaacatatttgatttaagttatgacactaaaaagtacatttttgtagaaagctattctacatagtaaaaagtagaaagctattctacatattaaacaattttagtgtaaaaactttatagctggagaagggggattgctgtgattgctcttcattttccacatttataaagctaagcatttaataatttgttactatatgcttcagttcctctttctgacataaatgcaaacagaagctaagtacagtaactatgactcaatatcgcttaaatgctgttaaaaagttatcccaatatttaccataatcttttattttaaaattatttaaccatagcattattttcttctaacgtggctatgttgttgttgtatagtatttcctcaagtccgtagatgtaatttagaataataataatatattcttgttatctcttactgtaggctccattaaatgacccctgggcatgtgcctcttttatgggtttgaagccttctaccagtaaataccatcttgtacgagcaatattggagtcaatagctttcaggtatgaaaacctgccctaaacttccccttccccatagaatattgccatgtctttcattaatttgctactaaatggaaaatttcttaattttaattaaattctttgtatttttggcttatttgatactatatattatgtaatatgttcttcttgctaatttccatggtatctttcttattttttcttatatttaatgtaccaacaccactcagacttgatatctgaaaattgaaggatttttttaaaaaattcaatttcttaagcatgcaagattcaaaatttggattttcaaaggtttagtatccttattcatgaaagataattccaagtaataatgcttctgttgtaccccaaaattgagtcatcagaattattcttctgcatatttccctgtaatctttttgttatgagacaggtgttaattattaaaattaagaatgatgctgtcatgaatatgggatgtttgtaacatttaaaataaaattttctgtgattacaaagtaattgtttttatatttgatgaattctattagattttacttatggtttgtcatcttaatagctatctattaaatagatgcttgttttaaatttttctttgtagaatggtaatagataaaatttagttgtaaaatataaattatgccttcttacatgaaggcaaaaaaaacacaaggacctgcgcttcttgcttatttgagtatctgttatacagtttccatttagcacaatttatttctttaatattttgttttgtacattttataaatatcaaataaataaaactatagtttgtatttttcaagatcagaataaagtagtgaattattatgatatgaatttcttataaatagttatcttgttttttaactagaaacaaacagttatatgagatgatgaagaaagagattcatattcctgtaagaaaaatccggtatgtaaagtttatttctaatagacttaattagaaattagaagtaagtggtagctgctatgagctaccactcatttcttttttagatcctgaataattcatctttatgattattgaggatttcaaaaataatttctgcttagctccttcacaacaaaattcttttttttttaatttgtatttttatcgagacagagtcttgctgtgtcactcaggctggagtgcagtggcatgatctcggctcactgcaacctctactgcctgggttcaagtgattctcatgcctcactatcccgagtagttgtgactacagacatgcaccaccacgcccagctaatttttttgtatttttagtaatgatggggtttcgccatgttggccagggtggtattgaactcctgacctcaggtgatccgccctcttcagcctcccacagtgctgggattacaggtgtgagccaacgcgcccagctacaacaaaattcttggtcataggaattcagagaggaaaggagagctaattgtggatttatggagaatataatacaatatcaaatttgggtgcatcttggcacccatatgtgtagtatatcaatttttaaaatctcttttttgggtgtatatcctttgggcatgtaagcatcaaacttctcgactttcttttctgtaatatctaagtgaatttttatgttgccttagtttattatacctggcttgttttgaactagtcctaagacaaacaaggacaggtgagaaaattggtggcagaaataaggaaaatgtttaaagattacccagtaaggttctctgtcattaggttaatgctaagtgatttaattttagaattaaaaagtaaaacttataaaataaaatcaaggatttcaggaaaaaaatgtggcccactgaaaaagaatgatacttttgttgtagtaattcatcttacatattttgttccccacagggcagatggaggagtttgtaagannnnnnnnnnnnnnnnnnnnnnnnnnnnnnnnnnnnnnnnnnnnnnnnnnnnnnnacattgacatgtcatgcctgggtgcagcttctctagctggccttgctgttggtatgtgtgaaatttataagaatgagagttttcttgcaaactcttccttacagatagcatttctcctctcaaattacaaaattctagagagtctggaaagccttggcgtccattaaactccatacacatatgcatattactcacaaaatatcctgtgccctcctctgttggtgagtctggttgcacctcttctatcctcacctcaccccttcagtcagaagtatgagacaagaacagttaattctcagctgcgtcagtctctagcaacagacagtctctgggtaaactttctggatagatagtgttaaagaaaaaaattattcagtgacacttattaaagaacaataaggtgagccaggtgcagtggctcatgcctgtaatcccagcactttgggaggctgaagcgggtggatcacctgaggtcaagagttcaagaccagcttggctaacatggcaaaaccctttctggactaaaagttcaaaaattagctgagcatggtggcacatgcctgtaatcccaactacttgggaggctgagacaggagaattgcttgaacctgggaaggcgaaggttgcagtgagccgagatggtgccactgcattccatcctgggtgacagagcaagactctttcctcaaaaaaaaaaaaaaaaaaaagaacagtaaggtgggctttattctggaggactatcaagaataggtatagggactacttcagtgggatcttatggtgggagagagaatttaggctcaactttgaatacaataaggaaaagtgagaaattatagccaaagagcagagtgagagtcagtggatggaaaactactaagaggaaacattgaggtaaggggaaattcttgctaaccaacctaataacattctcaggaaggcaggccagggtgatcagatatcatctggaggatactggaggatgagatatcgaggttgatcagaaattgaggatgggctacactaatttagcagtattcttgctcaaattagataatgcagagatgaccatggaagtccaaaagttgaggccttgaggcctagttggaaaagagcttggaggagcctgagtggagtttggtcaaggaggaaactttgtcagtaggtttgcctatggcattagaaaccactccattcttttatttattgaacaacgtttgtggagcacctgctacatgacaatcactgctggcaataaagggattaaaagccatagtctctgattcctggtgggaggagacaggtaagtcaagtgattattaagtttgtctgataaagccagtgaacagtgacagtgttaataagcaagtggtctaggcttcccagaggagatcacatatggttcaattttgaaggggctagcagagagtcaggtgaggagagggtaagagatggttggctcaatatccctattgcaacttgtgcaaaggcattcatcaatgatgggaagtactgttatggtgagagcaagaagggagtgggagaggtacatagaggtgtagttgtggtgactcctcataaagaggagttcggacctgatcctgaaggcactggagagccactaaagaattttaaccgggggtgggggggtggggaccatagaaagatctgcatttgaacagatcgctttgacaattagtgaaaagatcagtgaggaggaataagaatgaaagtaggcatgtcaatttaaagggccccctagaaagcaggatgatgccttaggatactcagagtattttaatgtgtttctttctgggggatgcttggtacaaaataagatattttacatttaaaagttttaggctaatagtacattaaagttacaaaaagcctaaaatcttggtaaattcggcttaaacttgattctactaaaaatctggtaattttgaataaaattgaaagttactttcatttgttcattgattaacgtttgattgaagttgaagaaaataaactttcccttaatcaatcccatttgcaaatttgaactccttcatattccaactcctgtaaatttagtatgtttgattttcctcttattactttcacgtgcctgattgagcaaacttagaactgtaacaaggtaaatcacgaatacttaaacaacaaacaaattgaataaattaagctataattatagtatatcaaggtctcataagcatttttatacttatgttaatcaaattcttctacacttttcaccttataagactaaataagtcagattctcttgaacatttaaaatgctttaagtaacaaacacatgcagggtttttgttttgttttgttttgttttgttttgtttgagatggagtctccctctgttgcctaggctggagtgcaatggcgcaatctcagctcactgaaacctcctcctcccaggttcaagcgattcacctgcctcagcctcccaagtagctgggattgcaggcacccgccaccatgcccagctaatttttgtatttttagtagagatggggtttcgccatgttggccaggctagtgtcaaactcctgacctcaggtgatccactcgctttggcatcccaaagtgctgggatcacaggcgtgagcctctgcgcccagccccacatgcaggttatttttatacataacacagtgacttgagttttatctacatcattatatttaatttcagatatttgcttctgtctcagaaatgtgagactatgtatatcctctgtattttataaatttacccagaaattggatttgctctatacatacttaataaaatgtcttaaaatatatatgtcttaaaatgtaaacaataaattctggaaatgaggattttaagaaacacatttattttcctgactagatttatctaactatagtatactgatgaaaactatgtttttcttttaaaaacttgtctacattaatacctttatttatttttaattaaaaattttttttttttgagatggagtctcactctgtagcccaagctggagtgcagtggtgcgatctcgggtcattgcaacctccgcctcctgggctcaagtgattctcgtgctcagcctcctaagtagctgagactataggcgcgtgccaccacgcccagctaattttttatattttagtagagacagggtttcaccatattgcccaaggtgatctcaaactcctgacctcagatgatctgcccgnnnnnnnnnnnnnnnnnnnnnnnnnnnnnnnnnnnnnnnnnnnnnnnnnnnnnnnnnnnnnnnnnnnnnnnnnnnnnnnnnnnnnnnnnnnnnnnnnnnnnnnnnnnnnnnnnnnnnnnnnnnnnnnnnnnnnnnnnnnnnnnnnnnnnnnnnnnnnnnnnnnnnnnnnnnnnnnnnnnnnnnnnnnnnnnnnnnnnnnnnnnnnnnnnnnnnnnnnnnnnnnnnnnnnnnnnnnnnnnnnnnnnnnnnnnnnnnnnnnnnnnnnnnnnnnnnnnnnnnnnnnnnnnnnnnnnnnnnnnnnnnnnnnnnnnnnnnnnnnnnnnnnnnnnnnnnnnnnnnnnnnnnnnnnnnnnnnnnnnnnnnngctcacgcctgtaatcccaacactttgcggggctgaggagggcggatcatttgaggccaggagtttgagaccagcctggccaacatggcgaaaccacgtctctactaaaagtacaaaaaattagccgggcgtggtggcacgtgcctatggtccgagctactcgagaggcccagggcaggataattgcttgaacccgggaggtggaggttgcagtgagctgagatcgcaccactctactccagcctgggtgacagaaagagactctgtctcaaaaaaaaaaagttctcttgctttttattatatatcatatgatccttccttcaaagagcagtctatgctagaactacaaaattatcttaaactggaatttaaataaattatataaaaggctatagtttgaaagagaaactattacattaatctccaactttgaattttatgcatattccagaaagttgacatttaccttaagctgtaagacaaaaatcttaatttgtcttcatttattgtaattgcataaaaaagaaaatatcctatttctttctctttttttttcttctgtttttctatttttagagacagggtctttctctgttactcaggctggagtgcagtgatataatcatagctcactgcagccttgaattcctaagcaagtggtctcccctcctcagtctcccaaagcactgggattgcaggcatgaaccactgtgcctggccagaaaatatactgtttttcacttgggattgttttaataatagcaagttatgaaattaaatgatggcatagggtagctgctttagaagtgatgtggtgtcccaccacacagaaactgagctgaaagttagaaaccaaaagacttgaaaatactggtataattattttcaggaatgatcgatctaacaaaattcaaaagtaacaaagtattttggattgttttaaaaatagtttttgtttacctttctaccagcaactcgtataggtttttggataaactttattggactcatgatttgccttaaaatttgaggataatttttttatctatagggttttggactgacaaggaggaactaaagaaactgagacaaagtgaagtggttttcaagccacagaagaaatgtcaagaatatgaaatgagtctggaaaactgggccaaagcagtgaaacgctccatgaattggtataacaagacataacactaaatgaaatgatcaaaaccataggtagctggtttatgtgacgtgcagatgagatgaagctcagggataacccatatgacaatgactaagaggagaaaattttaaataagcttcataacttaagaagcattgcttttaaaaaaacaaaacggaacaaaaaactcttatttttttcccctaaaccatggtaaggcagcaatacctcaaaactttatatcttctattttgtagcaaattccaaaggacattagtcatttccaaccacattttgacagttatgggtcctcttcctttttatactgggtcagtggtacataggaacataatgatttaccatccaagctaatagttctgggtcaagtaccatgcacatattgttccaaaattatgtgaaacgtatttctttaattctttaagtgggctatttgaagtacatatagctaaaaagaaagaataactgagaaaatgtggaattttgaaacattaatattttatgtttaaagccataatttcctaatattatatccaaatatgagcttaatatgtccctctcagataagcttatgagatagttaatgctttcctttactggtcttaaagacactgccttaatttttccttgttcaaccaaaatctgagcattctttctatgttgaaaacactgaaaaactaattttagttaatgaactagaaagaatattgatttttaagaaacagaaaaatactacttattttccttctcaaataacgtttctttcaaaaacttctggctgaagtataacatgctggtagttaacataaatcttgtctttctcttgttctttatctttctttgttatttagatgcttgtataaatgtcttttgtttttattaagtgcctaattgacagagcttaatttgaagaagtgccctaatttattgaccacttaagaattgcctttattggggtattttatttgttcctgcgtctttttgatgtttgttcagtctactcatccctgtgagtatgtgtgggggacagctgatagaagggaggagagtgtgtctatgctcaggattgccctttagccactcagccagagatccacagggagcaacaaggacagtttcacatgcttagactttcttggaagaaacagtgaggaggagtaagtcgtgagtagtgtcaagctggatgtagaattgtcctaaggcagttgaccccaccttccaacatgttttcactttatttgcccctccctacatttgggttaggttccatttggatttgcagcaataatgactttatttctctcttggtcaggatttggcacataaaatccttttattatagaactagctattttagttacatagtaatgtaactaatggagagatttatagagaattttgtttttgctgtcatatatgtccattttggagacagatatgatagaactagaaattaagttgcatttctgcaagtgccatttgaatgaacttcaagtatcttcttaattattaaattttctgatgaaggcattgtaacaaatatatagtattattaaatctaattaatatttggaaatattaataaataggtattttatttactgtaaaaagtcaaacttcattatgtagataaatcttattcttttcattctttcccctgtttacatcctttttacaaagcttagtcaccaattaaagctttcctatcaaaatcacatggaagctgctctgttgttttactgttacacattctgtttctcagtgggtgtaatttttttttctttttctttttttgtagagacagggtcttgctatgttgcccagggtagtctttaattcctggcctcaagtgatcctcccaccttggcctcccaaagtgctgggattgcagccgtgaaccactgcacccagccaatgggtgtaatttcataggaaataattctttttgtcagaatgtactgaattgtaatattaatacctgaaaatttgttagttcacttcttttccacgttcttctttcccaacatataaccacaaaataaaggataaatactttgggctgtgtgcagtggctcatgcctgtaatcccagcactttggcaggctgaagtgggcggatcatttgaggtcaggagtccaacctggtcaaacacggtgaaaccctgtctccactaaaaatacaaaaattagctggatgtggtggtgcaagcctgtaatcccagctactcgggaggctgaggcaggagaattgcttgaatctggggggtggaagttgcagtgagccaagatcatgccactgcactgtagcctgggcaacagagcgacactgcgtctcaaaaaaaaaaaaaaaggatcaatacttttcagataatgttggaaagtaactttgaatgtccctcatcggaattgagcatctcctcaagtgtcagtggctatttttttcttctgtgaatctaaaaactaatattttatttttaatatttgtggccatttttagtgataagactttaataaatatttttggacttaactaaaatcagaaannnnnnnnnnnnnnnnnnnnctggagtgcagtggcatgatctcggctcactgcaacctccccctcctgggctcaagcagtcctcctgcctcagcctcccaagtagctgggatttcaggtatacgtcactacgcccagctgatttttgtatttttagtagagacagggttttaccatgttggccaggctggtctcaaactcctgaccttgtgacccacccacctcggcctcccaaagtgctaggattacaggcgtgagccaccatgcctggcttgtcctttctgtcttccaagtttgtttttcatttgtatgctaatatttgaagtttagaaaaatttgtgctacttctcagcatgttttattttcccattatagatctatcagatatttttagaaggtctgcaactgtctgataaaggaagagaatgttcctgttcaatctatcttaaagtgctactaattgcttttatactatagacgtactgattttttcatcttttttatccaaccatggcatggtttcctaatctcagcattgacattttggactggataaatctttattttgggatgctatgctgtactttataggatgtttagcaatatccctgacctctgccctctagctacaagtaccatccccctagttgttatggccaaaaatgtcttcaaacattgccattctgagaggcaaaattgcccccagttgagagccactgatacaggctgttagaagaaaatcgaagactcagtgaatatagtgtcatactccttttctttctgcctcattttaccttaggaaatggttgttagcaaaaaaattagttaatcgtatcttgaaataaatagggtatctattttgctgattaataaagaaaaaataaatctcagctgggcacagtggctcacacctgtaatcctagcactttgggaggccaaggcaggcggatcacttcagctcaggagtttgagaccagcctgggcaacctggcgaatccctatctctacaaaaaatacacaaattagctgggtgtggtgacacacacatatagtcccagctaattagggggctgaggtgggaagatcacttgagctccaggaggtggaggctgcagtgagccaagttggtgtcactgtactctagcctgggtggcaaagtgagaccctgtctcaatcaatcaatcaatcaatcaatcaatatctcatgctgtaattgtcttctgatgttttcatccacccagccccacctctgcagccttaattactggagtaggtccatgatttcagtgtagggttaatgtattctgcagatcatctttgatttgacctgcttttttgcttcctttttatctctgaacaaaggagatcatcattctctttaatctgccttctgtgtaaatctctaccagactggaagctccctgaaagcagaaactgtctgcttccccagaacttagcactgtgctttcatgtatgtgggataaatttttactttgttagtgcaactttgtttgtacacgttatccttgatattacatacatttgttgatgggggcaatttatatttgttgtgagtaaaatacttttttgttggattaagaagaactatactcttcccagcactttgggaggccaaggaggacggattacctgaggttagtagc

SEQ ID NO: 551 - DNA, 1762 bp, Homo sapiens
gctctccggctgagccgggttggggcccgggttgggccgcccggggactctggagcattgggatttgtagcgcgccctctgggtaggcggctgtagcggagaggcgtgcgggatcgggatgtcggggctgctcacggacccggagcagagagcgcaggagccgcggtaccccggcttcgtgctggggctggatgtgggcagttctgtgatccgctgccacgtctatgaccgggcggcgcgggtctgcggctccagcgtgcagaaggtagaaaatctttatcctcaaattggctgggtagaaattgatcctgatgttctttggattcaatttgttgccgtaataaaagaagcagtcaaagctgcaggaatacagatgaatcaaattgttggtcttggcatttcaacacagagagcaacttttattacgtggaacaagaaaacaggaaatcattttcacaactttataagttggcaagacttaagagctgttgaacttgtaaaatcttggaataattctcttcttatgaaggacattaagaagacatacgcacacactccccattccagtgaagtttaataatagccaatcaaaggcgtatgtggtagacttcagtacttgtacctcaggaagttctaaggaggtttgtggtggaccagagtttcacatgttagtgagaatttgtgtttctgtccttgagaaatggaaaagatacagactagatgaatgaaatgcccaaatttcatcttttataaaagctcaggatggatattgagatattatagataactagcagactgttagaagctcttatcattacaggcatgatggctcatatttcacagttcttgccgagtgcttcactttttcactagaagtaaacgactttttacagccagtttgttcactttcacaacccagcagacttctttgagattggtctggattttacagaacttgactgaggtgcaaaaggcagttgaagaagaaaattgctgctttgggactattgatacctggttgttatataagctcacaaaaggttctgtatatgccacagatttttcaaatgctagtacaactggactttttgacccatataagatgtgttggagtgggatgattacctctctaatttcgataccactttctctcctacctcctgtgagggacacaagccacaattttggatcagtggatgaagagatatttggtgtgcctataccaatagttgccttggttgctgaccagcaatcagccatgtttggagagtgctgcttccagacaggtgatgtgaaattaaccatgggaactgggacatttttggatattaacactggaaatagccttcaacagactactggaggcttttatccattaattgggtggaagattgggcaagaagtcgtatgcttagctgaaagcaatgcaggagacactggtactgccataaaatgggctcagcagttagaccttttcacagatgctgctgagactgaaaaaatggccaaaagtttggaggattctgaaggagtttgttttgttccatcttttagtggattacaggctccattaaatgacccctgggcatgtgcctcttttatgggtttgaagccttctaccagtaaataccatcttgtacgagcaatattggagtcaatagctttcagaaacaaacagttatatgagatgatgaagaaagagattcatattcctgtaagaaaaatccggtatgtaaagtttatttctaatagacttaattag

SEQ ID NO: 552 - protein, 215 aa, Homo sapiens
MCWSGMITSLISIPLSLLPPVRDTSHNFGSVDEEIFGVPIPIVVADQQSAMFGECCFQTGDVKLTMGTGTFLDINTGNSLQQTTGGFYPLIGWKIGQEVVCLAESNAGDTGTAIKWAQQLDLFTDAAETEKMAKSLEDSEGVCFVPSFSGLQAPLNDPWACASFMGLKPSTSKYHLVRAISIAFRNKQLYEMMKKEIHIPVRKIRYVKFISNRLN

SEQ ID NO: 553 - DNA, 113590 bp, Mus musculus
  misc_feature (1)...(113590): n = A,T,C or G
ccttgggtttcactgcaggaatatttccaatcagcttgagtttcccttgctggtaccacagagcccccttcagggtcccttcccaggtgattgtacttggtgtcaagtctacagtcaaaataaccatcacacttggttactagctgctgttactgggacacagtggaacctttagaaggagggggtctagtccgaagaaggtaggaccctactgccttaatcctttgctccctggctaccctagacgaatggcctctctcacatccgtgttacctgtctcgaactgcaccacatcaggctcagagccacagcgccaagagatggtggacagaaccagaacaaacctttgtttttataaattgactaactcaggtatttagtcacaacgacgggaagctgactaatacaaccagaaaatacccactgaaagagaagctcataggaaacccatttgtaggcaaggcagacatcggcccttcagcaagtacttaagtaccttctctatcctaggcattgcagatgcaaatggcatgaggtatcaaaccgaagacaaagagagctgccgaatgccaggggtgcctttagtaaatagtgagtatgtggatgaataaagaatgagctattatgatggagggtgtgtgcagaaaggcatctcgctaggaatgggggcagagcaggggaagtgaatgctctcttccttatatcaacctggaagcataaagttcactgcttgcttgtgccttcctgcattctgtcacctgtcacaatggcagagggcagcaagcctgtgtgtgcataagcatgtgtgtttaggtaaatgtttttctgtgagggcacatgtgtgtgtgcatacatgcctgtgtacatgtacacacagaggccaaagtggacccttgggttggctggaacagagctgctatcagccagcacccaagaatggacacagggctatgtgaggcctcacaggtctgggatctgggattccaccagctcatgggtgtgactttctgtctttctctctccatggtttgcacccggcagtttctttccactcaacacatcggttccaggttctcttgtctctccgtattgcctttgttcactcttggcctttcccctagagccctctctcactcaggcctcatgggccccagtgttcctcactgggtctccatggcaaggattctgaagttccattagaagaatccaactctacttctggtgttttcatgccaaggtaccagccagcctggggatggcattcttgttcaccacagcctagccaatcatggctcagaatggtgcagtagtacagagcatctccatgcagggagcctggcccacacgtactcttggcagagcttgtgggctgcccactggcgtctttgatggagctatatgcgcctggatatgtgcataactgtctggggcttgtaacgtgttggcgtttctgacgagagaacagagaggaatggctagacaggctcacaggtcacctccttcgacctgtgctgtccatctggaggtaagacagtgtcagccaagctgggtgtggtggcacacgcctttaatcccagcacttgggaggcagaggcaggcagatttctgaattcgaggccagcctggtctaccaagtgagttccaggatagccagggctacacagagaaacactgtctcgaaaaacaaaaacaaaaacaaaaacaaaaacaaaaacaaaaacaaaaaaaaaagacagtatcagcctgagaacagaagtccttgagagccttgctgtacctgaggcaggctttatgctagcattaactcttggatcttttttagaacttggggctagcagttgaaggtctactctttaagaaaacataacgtctggagtatttaacacacactgtttcatagatcttcataagaatgctcagaagttgggctggagagatggcttagaggttaagagcaccggctgctcttccagaggtactgagttcagttcccagcaaccacaatggtggctcacaaccatctttaatgggatctgatgccctaaaataaataaataagtaagtaagtaaataaataaataaataaatctctgagagagagaaagagagagagagagagagagagagagagagagagagaatgctcgggagcaggattataactcgtgccgttttgacagaccttaaagctgagttctggtttcttgccagggatacacaactagaccaaggagatggtatcctctgtgggagctctgcccctttctacctgctcagcactgactgaaaagtgggcctggtatgttctggatgtgctgggcccccattagtctggagggcagaggctgtattctctgtatggacccatgggcctgacacacagttcgcacgcaacagtggatcacccaaatgaatgctttcttgctgtctccagatcaagaggggaagtgactagggacaggactgagagaaaggacagagcaaagctgctctgatgcttctggcccagacctgggagtccatggggtgacctccctcagggacagagcttggccttagtcatgccttgggcccatgaggttttgaaaagcaaggtctgtggagcaagggaaaggcagaggagacctttgccctagccatgcatggttgtggaacatgcttcctgctcccagcagctggcaagccagtgatttccctggtgtgcttgatccttggttcttctgcaccgccactgatggcttgattaggttttgtttctcaacataacaagcatgtatagacctagtcagtgtggagctaaaagtctaagagtggagaggtaattaaactagggtcctagcctttgaaaaaccctggtagaggacaaagatagaggcatcaactgttatatgtagtgtcacaaataacagacttacatatgaagtgaaatactgacgtggtgttagtccagggaatacagtaaaaatatcaacaaatgactcaacagtcgtgatggctaatctcggttgtcaacttggcacactgagaagaaaaaactttcctttattagactggcctgtgggcatgtgtgtgaggcattttcttgattgctaatggagggaggcgggcccagcccactatgggcattaccatcccctagagagatgagcgtaaaaagtaataattcttttttcccctcctagcccatgctcctggaatgatgactctgagactaattatttataaataaatgccaaggccataagctttgactcattctccagccagctcagacaattctgcgtcttccacacagttagttacctctccacagcttcatgcctccaagtccagggaccagtctcctctttattctatactgagttcagctgcttggtttatgtctgtttcctcagcgttccagggtgaatctcctcgattctaacctgaattcatcaacttgctggttagttacctctccttcagtcccggcctcctctgtctcaacactctcctagccgtctgatttctttcagtcagcttagatgtttaaagctttctgcatgttgtgatggtcaagagtccacagttctccctcatgagcagtgttccagggtacaagcaacagccagccagctcatacccattcgcttctatatagataatacatttttttctcaattcaaataaagctgctatgcatatttttgcatatgtattttatgtatgtatgtgtgtgtatgtatgtatgtatgtatgtatgttggtacgtatttattttaccagtcctggagagtgagcccagagcctttcacctgctaggcaagcgctactacactgaattgtgttccttggacacttttcttgttttcagtaacacttaaaggtcattgttcttctgtgtgtatgctctttgttttgtttatggcagtgactcaccacgtagcccaggctggccttgaattccctctgccttctgctctctgagattataactgtgtaccacatgcccacttctgtgtgaacacagcccgagttcaggtctgcagcacctgcatacatagccaggagtactggcttgaacctttaattctagcattggaggtgggagctatggaaggtggatcagtgaaactcactgaccagtcaggctagccataccagggtagtgagagaccttgtctgaaaaaaaaataagaaaggaagaaagaaaggtctctattgacgcttgacctccaaacgcacatgtgtacatctatccatccataactacatactacacacacacacacacacacacacacacacacacacacacacacacacacatgcacgcacacagaaagagagattgtttacccaaaatctcagggacttttctgcttttctttttgagacaagatctcatgtataagaggctggccttgaacttgctatgtagtagagtgtgagcttgaatttctgaccctgctacctccacctccagtgtagtgcattgcagctgcaaaccaccacctctagtttatgtggctccagagttcaaacccagcttgtgactgctaggcactttaccagccgagccaatctcctgtgtgttcttgtgaaagtttcatgtttttacatttaaggatcttttttttttccattttattatatgtgtatgagtgttttgcttgagtgcacgtgtgttcacacatgtgcagtgcctgtggaggtcagagaggggtttggattctgtgggactggacttacagacggttgtgagtcaccatgtggtactggtcattgaacccaggtcctctggaagagcagccagtgctcctaacagctgagccatctctccagccctgggttttaaagtaactcttgacaacaggtgatgttagtttttctattttcttctttgtcaaagctattttgtctcttctaaattcttgtgtttccctatgacgcttatgaaataaaaatacaaaacaaaaaactactgggatattttgcttacattgcatctgttagtaaatttgagaggaactggcatcaagaatactgagttgaggagaagagatggttcagctaactactggctgagcaccgactgctcttccagaggtcatgagttcaaatcccagcaaccacatggtggctcacaaccatctgtaatgggatctgatgccctcttctggtgtgtctgaagacagcaacagtacactcatatacataaaataaataaatcttcaaaaaagagagagagagaaagaatattgagtcctctaatctatgaacatggtccatctttcagttttttcaggtctttttttttttttttttcttagcactgttctgtgttttttgcctccaggtcgtatgcatgcgtcttcatgtgtacccctaagtatttaacagcgttcatcgctcttacttctctcagcctcactgctgtggtgtggtcacatggtcaagtcctaacttcagtacctcagaatgagattacaagagaaaggtggatcttttaaacagtaattagggttaaagtaggtatggtggtttgaatatgcttggcccacgcagtggggccaatagatgtggccttgccaaagtaggtgtgtcactctgggcgtggcctttgagaccctcatcctagccacctggaagccagtcttcttgagctgtagaactctcagctccttaatctcacacttctaccctcaagaactatgcgaaaataaatctctgtcgtttcaactagccaggctatggctctttcttagtaacaatagaaatataacacatttcctaaatttagttatatttctggtggtttttttataaattccactagatttctttctctgccgacacacatcttgtgttcaaacaatagttttacttctttcaccctaaaggtcttttatttctttttcttgtgtgacaacactgaccaggacatcaagggtgtcacatagttcaaactggctttgcatttgcagtgtatttgaaatgggactgttgggattataggcacatggtgcctcactgagccttccaagtacaacgttgaacaagagtgataatcagggacgcctaacccattacagtagagtacatctgcccatccttcattgttagaggatgatgtcagctaaagattttacaccaccactctttatacatattaattttatagcatcaatcccatcccaaaagcgagcaaattggggagggtcccagaaaagttagggagtaactagttgtaaagaactggcataaggagagtagcaacaagcatagagcctgtgagtgatccacacagcactgatcaagctttgccagctgtggtaccagggtgcacgtgttgatcaaatgccacgcctctttggatttttttttcttttttggagccttctttacctccccatatgccctcccttccccaacaccgcattaaaaccaaggagaggtgggtgcagcgaactttattgatggtattcaagagagtaggaagggctccctaggctcatcctgttactatgagggtctggggtggaaattgtgagggagatgctcaatgttggggccaagttgggatagggactcctcaccaactgaaggcctctctcttgctctcagtgtccttgctcgggtgggttatccagggtttcttactccttggaggccatgtaggccatgaggtccaccaccctgttgctgtagccatattcattgtcataccaggaaatgagcttgacaaagttgtcattgagagcaatgccagccccggcatcgaaggtggaagagtgggagttgctgttgaagtcacaggaggcaacctggtcctcagtgtagcccaggatgcccttctgtgggccctcagatgcctgcttcaccaccttcttgatgtcatcatacttggcaggtttctccaggcggcatgtcagatccacgatggacacattggggttaggaacacggaaggccatgccagtgagcttcccgttcagctctgggatgactttgcccacagccttggcagcaccagtggatgcagggatgatgttctgggtagccccacgaccatcacgccacagctttccagaggggccatccacagtcttctgggtggcagtgatggcatggactgtggtcatgagcccttctacaatgccaaagttgtcatggatgaccttggccaggggggctaagcaattggtggtgcaggatgcattgctgacaatcttgagtgagttgtcatatttctcgtggttcacacccatcacaaacatgggagcatcggcagaacggacggagatgatgacccttttggctccacccttcaagtgggcccccgccttctccatggtggtgaagacaccagtagactccacgacatactcagcactggcctcatcccatttgatgttggggggagggcagtctcgctcctggaagatggtgatgggcttcccgttgatgacaagcttcccattttcagccttgactgtgccgttgaatttactgtgggtggagtcatactggaacatgtagaccatgtagtcgaggtcaatgaaggggtcgttgatggcaacaatctccactttgccatgtagagagcagatggcaaccctcgtgaccaggcgcccaatatggccaaatccgttcacaccggccttcaccattttgtctacgggacgaggctggcactgcacaagaagatgcactgtctctggaacagggaggagcagagagctgcctctttgaattttaatttctagtgtaaatgaagcctgtaacaacgcctacctgacagtgttgttataaggttgacaatatgcaaattgtttttctcttgtgtgtgtgtgtgtgtgtgtgtgtgtgtgtgtgtgtgtgtgtgtgtgtgcgtgtgttagaggtaaggagggattgctgagacaggatctcagatagcctaagatgctttcaaactcttgatgtagctaatagtgactttgaacttctcatcctcctgcctccaccactacagtgctggattacaggttcgtgtcactaggccaacaagcctggcttgtgcggtgctgaggaccaatcacagggcatggtgcatgttaggaaggcattctgttacccatactatgtccttagtcctgtatacatattcaaaatgtgcctaaaccagtgtctggaaatagcaaacactacgtcgaagtgttaacttttgctttacgttgtgggagccagctagattctatggtaggatataaagcctgctgtgctgacttccaatctggggacttaaaccctgccaaaccctctcagtgtcatggttaggactatcgtcttgtctcccttacatccaagccagaagttccatctccatgtcctgtctgacagcagctgactggccaaggattactcagagactaagggcatgttccagcagccttcatttctcactagggaaggttgactgactcacctacaagagacaatagcaactaggaacagcttctcaggggccggcaaggtagagatttgtgggagctttgctaggctcttcagttgcttctactgaggcatttatcacctctcagattagacttcatagcttgagtaactcctcttcttgccactagggaccaaaggagggagtctagatagaggtggcttctttgtctcacggtaatactagaacacacacaggacaggcatctttattcagccccattgagggtgagagggaaaccagattcaagccttccagggtatgttaaaaaaaataaaaaataaaacaaaaacaaaacaaaacaaaaccagaaaggacttgtccgattccaggaattcttggctggaagggctcttggtttcaaatttgcttgagtcttttcctgaccaagctgcaggttgctttgctcacttcaacggtattgttacataaacaagtaagctgtctgcttgctacaggcggtcaggttttccatccgaggtttggctaatcaggatatatgggcggatacaagcttaggattcttaaatctcctaaacctcgcagctgtgttccctgtttccactaaacgctagagtttaagatttagggaattatgcaaaacaggcttgcagtgccgggtggggcttaagtgtgtgtgtatgggggcagggagtgtcccccgccctccagtgttgcctggtgcccccccccctttatttgagggtagagtagaacccttgaaaacgcaggagtaaattcacaggagactgagcaagtggttgaagacattgatcgggcctcagccccaggactatgctttttcttaaaataactttttgagagttgagtgcaaaaatacgcgaacagcacagcctctgtgtgcgtttatagataactgcttaatgcagagctccttcacacatctagcctacaagacactcagcagctcacagtccaaccagttttccaaaattctaccatggtgcattaaaacctaaaactgtgcaaggaaatgccctgcaatatatgcaatataccttgtaaaaagttgcctattgtagtacaagtacaccctctgcttaggcagaatattacccctctttcgatgctagaaaaatcccccccccagcagctttgtttagcacactcaaaattttattaaaaacagttttcaaacgtagcttcataaaactagacaccagcaaaccttggtcgagggatggaaaataaatcgtatatctttaacccgcagaagttaaagtcttttttttttttttttttttttttgttagctaacaatggaaactttttttttaagtgtttccctccctcggtttgccaagcaatagaaaaaaaaaaaaaaaagaagaaaagaaaaacttgttccgctgagttcaaccccagacaggctcacaacttccttcctgctttcctcccccaagcccccgcctctctgcctcctccctcaacccccaacttttttttttttttttaaatcttacattgaacaaacactgaagtagcagggagcagacgctgacagcggtagtgtctccaaccaagcacagagcaacgcagggtcggcctggcggtgtcccctccgggatcgcctagtccctgcgccggtacattcagcttcgttgcaccccactttttccgtcttccataagttgttgcggaaaccctttgggagcttttttatttttttaaaaaaactttaagccacttggtctgtacgagcccggagtccccggggcatgtcgcctgcacgggacctggaagtctgagcaattgcaggtaagcgtggcggctccttcctggccctcgtctctgaaccctctttccgctccatctgtgctggggttcctctgggtgttccggggtccgagcacagcacggaggtgagggctagaacgacggagaagggaggctgatttgggacggtagcgtggcgtggccttgggggcagaggaggcgattcgactttcccatcgccttccgggccgctgcgccgccaccacctccccggcgcgctgcgggcgtctggggctcggcttgcccggcggctcccctggcgccaggcgaggctgcccgggatgcgcgaggccctgccctcggccggccgcgctgctccggggcttagcttgcgggaccccgaagggctgcaaattctcaggcctgcacaattagaaggcctccgggctgcaactgtgcaagcaagcccagagttcctccgaggggtgtgggtcccggagggggcagctgggtcctcgctaacaggatgcgcgcagggctgagtagctgcggacatgcatcccctctcccaaacacacacacacacacacacacacacacacacacacactcgctgcagggtctgaggggacagtagggagccaccaggattgattccagtgctggatactgcagagtttgctccctggcgcgcacgcgtgcccacattcacaaaacacacttgtttggagacagacagacatcaaggctagtgctgaaaagtgcctggactgccccacccccacccacccccgcgctcttcccggcctttcataggccgagaggcatagccccagaccaggatcagaaagaaaacggtgggcacacaagtccccttccaggtctcggctccagcagcggtttggggaaggcaggtccgggtcaggttccctgtgacttggcctctgatgtcctgagagggtggagcagggttgcctgtcatcctcgatagccggtgtttgctctggccaaggaaacctggccagtctcgaggagggaaccagcgagttgcacctcctccctcggccatccgcgtggctaccgagactaatttcagaatttgggattctaggtgttcttggagtgtatcacaagctgggggaggtggaccaccgccggaaaataccaatagaggccatatcgaggcggcccggcttgcctcctcactgagcatcacaactcctgtaggctagacatccaggggcaccccgtccccagcagattggggtcccggggctccctttgctctctgctttctgcgggtgggctctctccaccccacccccttgatgccttcgggaattctgacttttctccttgtgtctccacagccgcgaaatcgtttatggagcttggggcgggggccgagcccgcgattttgccctgtgcccgccgcctaggccatgctgctccatcagcgcgcagagctacggccgccgggcctccgggactaagccgagagccgcgggaggaggaggcgccggcggtggagcgggacggagagccgcggcggcgggcggaccctgtactatggctgtgtactgctatgccctcaatagcctggtgatcatgaacagcaccaacgagctcaagagtggcggcccccggcccagcggcagcgagacgccccagccctccgggagggccgcgctgagtcccggcagcgtcttcagccctgggagaggcgcttcctttctcttccccccagcagagtcgctgtccctggaggagcccgggagtcctgggggctggcgcagcggccggcgcaggctgaatagtagcagcggtagcggaggtggcagcagcagcagcaacagcagcagcagcagtggcgtgggcagtcccagttgggctggccgcctgcgaggggacgcgcagcaggtggtggcggcccgcatcctctccccacctgggccagaggaggcccagaggaagctgcggattctgcagcgcgagttgcaaaatgtgcaggtgaaccagaaagtgggcatgttcgaggcgcaaatccaggcacagagctctgccattcaagcgccccgaagcccgcgtttgggtagggctcgttcgccctccccgtgtcccttccgaagtagcagccagccccccgaaagggtcttggctccgtgttctccaagtgaggaacgcagaacaaagtcctggggagaacaatgtacagaaaccccagataccaactctggaaggagaagcagactcagcacacacccctcgaaggacaaggagggagtggcccctcttttaggcccagccagcccgaccaggttagggactcagagtccatctacttccgtgagaatggaaagaggtaccccggccagtccccgctgtggctcacccacacccatggaaactgacaagagggttgctccctcactggagcgctttggaactagcttaacgttggctactaaagtggcagcttcagccgcatccgctggaccacaccctggacatgattctgccctcatggagacaggctgtgagctcgggggcatgcgcccctgggaggcccagatggagagacgggggcagtttctgggcaaggagaccggctcaaccccagagcctgtccggacccacatgagagaaccccctggaagggtgggaagaggaattcattctgttggtgggcagggctcctggacacctgaagtcatcaaaagaccagaagagagggctgtgactgcccaaagctcagagccctcagaggaccccagatggtctagactgcctgtagacctggattccgtaggacctgagaagggaggaaataggatcccagggatgcgagggccccagcagaccctggacagtgagagagaaggctctccagcactgggcttgcttgggggcagccaggcagcacagccaggggctaggggtgtggaggaagacgttcattatggccgaatgctggaacctttaccacctggggaagtaacaacaaaattgaaagaaccccagtgcctccctggggacaggatgggaatgcagcctgagagttccatagtttggcccagtgccttggaggaagctcccctgatctggacacgtgacacgggggtacagtcgaaggggacttggggaagccagctgccagacggagatgctcaccctagctgccaagagatgcccccagaccagaaggacaaggcctccttaaaagaggcctgcagccccagcaacatcccagccatccctgcagtcatcattacagatatgggtgctcaggaggatggagggctagaggagatccaaggaagccctcggggtcccctgcctctgaggaagctgtcctcctcctcagcctcctccactggcttctcctcttcttacgatgactcggaggaggacatctccagtgaccctgagcgcacgctggaccccaactcagcctttttgcataccctggaccagcagaagcccagagtggtaagtgttgcctcgcaagcagaccttggatgctccgtgcatcatcctggttttcttacttttttgctgagcgggaaagaccctgagcagggctctggtaaagtcataatatctctctataggtggttttgttgtgggcatggtctaccaagcactctgaagactgggcagtgagtttaagttgttcttacggtacatgtctttaaaaaatgggtctgaaggaacataaggttcgtgtatgtcaactataataaaccttcctaatttctaaagctggtgagcagagatgcgttgctttgacttgatggagtgaaacacttcatttcatggtttattcaggctgacaaagatatctattggcttaactcagcctctactcctaggcaggaatgtgagtggtatgatcctgtgacaggcccctgacctctgcagatgtggttgtatggctgatctacggtttgagcaactattgagattcacacgtaagttaggcagcagttggctgtatcagtgtcagtcaacgtaactaatatgcagtgtgacgtgcgagataaatggaaaagtatcgtttgagccaagtagatcctttcttttgtagcttcatttgacttgagttgtctgagttaggcacatggtgtctccttaagagtgtaagttgggacaggtccatttctggtacatgtctacatgtatgttcattacactaatgcttggtctgtttgaggcagtggcagatgctcgttcctactgtgtggttgatctcatttttgagctgaggtcagtctctttcagaaggtaattgttgaagctagctcttctaaaatgggatggcctttctcttgcctctccatggaggatggggagtttccttacctggcatgcaagaggttgtagggcttccttgtggggaaagcaacatggtattttagtgggtagccttctggtttcatcttgaatgtgagattccacccatttgtaccccaataactttctccatccttcctggctgtattacagttccactcaacactaagaaattttggactctaaaacacagtcctttccagcttccatttcagaaaacatggtctagttttgaagagcagcaatctctttctctgttttctgctggtagtctagaaagacaaatgtgtttgcaaacaggagtcctaatcagtcatttgggggccaggacagggctccaggcaccttgcacctgctgccagtattatcacctttagaaaaagggcagacgggcaggcgggcagtctgcctcaggggacagtggtcacagggcagctgggaaatgcatctttttaaaggtgaggctcaatttctctgccctctgcccagcagttactcgtaagtaagagagggtcttctctccatttgtttttgaaaccccaaagctgggctggcacacccaaatagctctgagttgttatgcagtttccacttgccctttctgtggtggctgaacagctcctgctgactgcttgccaaaacagcccatacatgcacgtttgaaaacaaagtcttgtttgggagtgagttaaaggggagttaaataataacaagtaacaggtaaactggttttgttgttgttgtcgttgttcttcatttgtaagattaaaagcagataagtaaccagggaggaactggtaagagaggctcagaggtgagacgctgttcgctccacctcccgcctttgaacaggttcttttagacacccacaaagtggagttagggagaaagacaccactagcctgctttgctctctgaagcatgtgaaacacacacacacacacacacacacacacacacacacacagagagagagagagagagagagagagagagagagagaaagacacagagagaggcagagagacagagagacagagaatatgtgtgcacgtgtgcgcgtgcgcattagagtcagatgagtgtgggtaatcaactggaaattatggaatcctagggacttttgcgctttggttgagagcttgcactatgagcagaggtctctttttaggctaatcatgatggtggagcttatctggcaaactgtctgctcattgggtcaaaaaaaataactcatcccccgagactgctattttgtctgcagaaggccagacatcttgatggacctgggaggcctgtgggctgcccgtttgatgtttagtagatgaagtctaaagtgtccctgcctgtgcttctctaaacccttctgcattctcctcggactcgcttctgtgtgtacggcaccactgcacgacctctgagcacgttcccacttgcccacttcgcctcacactcatgctcgccctcgccttcgcattgctcgtacacactaacacgtgcctacacatgctcacactcaactcctgcctgccccctcacacccattcactcaaacacgtaggttggaaatggcatgttcacacaaccaacccgggcctctgagccaaactagaccctgaggatttttactgctgccccgccttcccaagtgcccactacggcacactgccccacactgccccatactgcctcatgcctgattgggtgtacaggcagaatgtgacagcatatctacgtcttcaggatcagacacttgggatttgcttggaaggaacaatcgtgcatccttctgcagcagcttaaattctggtccactcacacttcctgttccctgagctctgaacagaaccaaatggcactgagcaaggatggtgccccctttctactttccccattgcagaaagcatttatttcttatcctcctagatcattctattcaagagcctggggcattaagattccaggtagagagtatgacattacaacgcagaagcctcttaacttataaaatagattggattggtttgttccaaaaatctactatcaataatgtgtatgtacaaaaaatggaacaagggtccagaaagatggatcagcaggtaaagatgcttgctaccaggctgaagaccagagtttgatacccagaacctaaatggtagaaggagggaactggttctagcaagtcatctatggcatgcgcacctatctacctaccctcccccacatatacatacacatgcacaaacacatgcatgcatgtatgcatgcaaaaattcataaaataaaatgtaaaaaaaagtatattaaaaacttcaaaacagtgctctaatacctgtagagtatataaggaagtagactatcagagagcctctgcctcctagtctttactacttttaagggacactggaattttgtttctttggactttattgtgtgtctgtgggagggggtgttattgagcagttttgcttcttttcagtgaagaatgaatttgtaaacatagcacaatttaacctgtttgagatgattgtgtgtgtgtgtgtggtgattttatgtttgattatctaatagtgagcacttttaagtggacactttaaaaggcttatttatatatgtgtgtgtgtgtgtaaacacaagtgtgtggaaatgcttctagaggtcagggcatgtgtgggatccctggagcgactgtgagttgcctgatttggggattgagaaaagaactccaggtctgcagaaaccccaagtgctcctagctgctgaggcatcgctccagcctctggaaactttagatgaggatgctgaaggttcagattgtggggctcagatggcactttctgtttcccaaagatgggggggcccacctgtctgtctgtctgtctgtctctcttggacacaggggattctagatctatgggccctggagtcatttatctgagatcctgggaattaatctgacaaaaataaaacaacaacaataacaaccacaacaacaacaacaaaaaacccctaagattcaaaaagcaacaggacctgggacacacacggaaaggccctgactctctggcaccgttttctctttctccattgtgcgtaatatgagggtgattcaagggggtccacctcaccccaactttctgcaaatacttaattttagatacccacagctctatacttggtgggtgtgaagcatgtgtaaacatgtttggcgatgtgacaaggatcctttgacatgggccatgacattaaggtccaaaccaggcacctttaaatgtgtgcttttattgaagcctgttgactgatggtcctgtctctctttctccctttaccagaagataggctctttgtaacttcacattgaaaaggaaaaaaaaaaaaaccaaatagataaaaaccaaccaatcaacgaaccagacaaccataatcaccatcagaacaaagcgacagcaccacaactgaggttttcatcgtaatcactcagatcttagggagtcttctgataggacgccatagctttaaccccaaggaacgtgtaacggctacaaataaaaaaagcctaactccccatcctacccccgccccagatgtatatgtttggaaacaggctttgtgacacagagccaaaatgtcccttcaaagcattgtcttatcagagatgaaggttttctttcattaaatgggtagggaggaagaaaggtggaccctccaacatcacttttcatgagaacgtttacactctgcaaaaatacgttttgagacatacctcgcctttaggtttaaatacaaaaatagtaagcctatcgattgcagggaaatagatttcaagtatggcaaacctcatcctcagagctctgtttgtaagagctgacttgctaccaagtcacctttcagactttgttggtacatgcttgctaaatgtagttatagattagattcgttttatatagtttatttaaatcctcaggggtactgataacattatttagacttgttttattttgcctggtaccaacttagtcacctaaaggtagatttttttttttaagaacttaatggaaagaattttatcttgcggaaaaacctctgtagattttagataatcaacaggcgattcagaattaactcaaaaattcttttaaattaccttgtgaagccaggtgtgatggtgtgtgcctgtaatgtcagcacacccccacctgggctgactctgaagaatttccagtgtgaagtcagcgtggactgtatagctcgctcctatctcaaaaatgagcaaataaataaattgcactgtggtcacgttatcagtgtggaggaatctatatgggtttggttataggagctgacagcttggcattgaaaatatgtaggctgtgctctaggctcatgagaaacatggtttgctgtgattgtgtgtgtgtgtgtgtgtgtgtgtgtgtgtgtgtgtgttgtgacccctttattttcttatgaatcagaggaaggcattgcttcccaccaactgtaaactctctgattttacaaaaagtttgctagagttccacctgccccttgaggattttacaggaccttgagagtgttgtatggtcagccatctactcttaactccctgacccaactaatgatgggcctgcaggtggtttcaggagcacgagcagagcctcactttttccttaagaaccatagagagtgtccatctgactgtggacggccatcttggaagtctggaaggatcagcagccttggtctccaggtcccagcccaggtcagccctgactggtggtgcagttctgtctctggcctcaagctgagaccctcctatttctcttgtcatcttcttaccgagccttcccactctgtcccgtcttaccggtgggcacagtagctctaacccatttttcaggtgaactattggtataaagacagcttaagtctcctttgccggaagacaggcatacaagcatatgtgatctcattttatgtttttatattaaaaatagcaaaatgatttctcctggttccaaattgaacattgtctgcatatcccgaagattgtacgtatagtcagggaagcagtagagttctttttctccaaggtcacatcttatagaagaaaaaacatggcctggcacatgttcaacattgtcataggacccatgttcacatccacaaatgagcttctttttttaaactttttaaaattaattttattatgtttttaaaaaaacaattaattttattttttacttattcattttgcatccctcttactgccctttccctgtcatctctccccatccccttctcctctgagcagatggggccttccctgggtatccccttaccctagcacttcgattctctgcaaggctaggcgtttcctctcccactgaggtcagacaaggcagcccagctagaagaacatatcccacatacaggcaccagcttttgggaaagcccccactccagttgtttgggacccacatgaagaccaagctacacatctgctatatatgtgcggggaggcccaggtccagcctgtgtatgttctttggttggtgcttcagtctctgagagccctgggtccaggttagttgactctgttggttttcctgtggagttcttatccccttcagggcccgcagtccttcttcctattcttccataagagtccccaagctccatccaccatttggctgtgtgtatgtatctgtctgagtcagctgctgctgggtggagcctctcagaggacaactttctcctgtctgcaagcagaacagagtatcattaatagtgtcagggactggtgctggcccatgggatgggtctcaagttgggacggtttcacaaggctttacttgatacatttgtgtagtggatggtttgggggagactcctttgacagttcctagttaaaggatggaacttctagggtttattccttactcacttttaaagattcaacttcaaaaagctggcttagtgggtaaggcacttgctgtgcaaacctgaaggagtggtgagagttccatcccacagtgatgataaagtgtcctgagtagtgtcacagaatagtggctcagtgaaaaaagagacagtattgttggaagattgtgagttgcagcagaggcagggggaaattggattctgtgtaagaaagtctccttagcatctccaagacctcactgaccactttcaccctgacacactcctacagaacgatttgcctccggctgaaaggctaacatcaaacgttttccaaagactggaattccccagctgttgtgcacttggtgtccnnnnnnnnnnnnnnnnnnnncagaacagagtatcattaatagtgtcagggactggtgctggcccatgggatgggtctcaagttgggccggtttcacaaggcttcttacttgatacatttgtgtagtggatggttcgggggagactcctttgacagttcctagttaaaggatggaacttctagggtttattccttactcacttttaaagattcaacttcaaaaagctggcttagtgggtaaggcacttgctgtgcaaacctgaagacttgagtttaatccctggaaccttcataatggcagaaggagagaatcaaccatgcacagttgttatctggcttccacatacatgcgtgtcacacatgcgcattcatacacatcacgtgtgtgcatacaacaacaacaataaaataacatgaaaagtaaagtatttgctaaatgagagagggaggggaaaaaagtatctactatctatccattggaaaagtgttgacctgtcttggaaatgcatgaagggaaaattgcagtgaaggcaagttcactgctgatctcctgagccctgatgctgcagggataagcaagctagacttgggtttgggatgcctgggccacacatggtctgtaaaccactggagaactagcgagaatcgcggcagccttatggagtggtgagagttccatcccacagtgatgataaagtgtcctgagtagtgtcacagaatagtggctcagtgaaaaaagagacagtattgttggaagattgtgagttgcagcagaggcagggggaaattggattctgtgtaagaaagtctccttagcatctccaagacctcactgaccactttcaccctgacacactcctacagaacgatttgcctccggctgaaaggctaacatcaaacgttttccaaagactggaattccccagctgttgtgcacttggtgtcccttggtgtggctttgatgtctacttagaagaaggctggccttagcttccacctcagtcctagtaccttcatgcagggttgggaatttctttgagggttggggctcaaaagagaaggtctgtgtagaccttggtccacaaaagagcctgctctacatggttgtcagggaacgaggtcagcttgatacgtgtgtgtagtggatggttccggggagccgcctctgacagttcctacttaaaggatggaacttctaggctttgtgcagcaagatctggtttaggatttccatttccttagccagcgaccctcagacatgtctctcaataattctaagaggaattcatagctttcccccctattgatattttggacagtatattaatttgataacatgtgatagaagctcattcaacaaaaggtatctctctctctcttcaggacactagccagcacaacttaatttttttttttccttgaaagtttgatttctctcattttcgaccagctgtcaagttttctgagtaacagaggcaggggatgtacttgtccaacatgctgaaagtctctctctcacacacacacacacacacacacacacacacacacacacacacgagagagagagagagagagagagagagagagagagatagatcagcaaatgcttgactgaaattaatccctgcgacccatggaagcataagagcgaatggcttccacgaagctgtcctccgacctcctcacgtgtgccatgatatgtgtgcataaagaaaatgaaaataagaaaaggagttctaaaataggcaaaacgttggagctacttaggagattagcagcagaaccaatctctttggtgccaggatggaaatttaggaaacttcaagcatgctatgcagtcagccgcagggctagggctgcagaccctcttcttcttcttcttcctcttcttccccttcttcctcctcttcgtcttcatcttcatctttgtcttcattttcctcctcctcttctccttctccttctctttctccttctccttctccttcctcttcttccccttcttccccttcttccccttcttcctcctcttcatcttcatcttcgtctttgtcttcattttcctcctcctcttctccttctccttcttcttcctcttcttcctcttcttccccttcttccccttcttcctcctcttcatcttcatcttcgtctttgtcttcattttcctcctcctcctcctcctcctnnnnnnnnnnnnnnnnnnnnccttgtgagcaaaggtgtgtgtttttcctttctctggcctctttacaggcctctcttatctggcaaaagatttcttaatctactttccctaaatgccctgcaggtctgggcgccaccacagctccagaactccctgattgcctgtattcccttatgcacgcaagctgcctcacccagttcactggcagtccttaaagggatcagtttttagctcacggtgccccactgagtctccaagggaaagagctgaggaacggggcctggggctatgaagaatccagaggaactggggaagttccacttcccttctcatgaaagcaagcagggaggtttggaggatggagtgagcctgtatgatttctcttgtgcaccttatgcacctcgccagtctttgtacctctctcaagtccccagaactgacaggaggttagggaaagggcaggtgaagaagcatacaaagggaatttctgttccatcatcctaggtttctcagattctcatcccattaccccagctatttgtgggttgcttgtctcctcctcctcctcctcctcctcctcctcctcctcttcttcttcttcttcttcttcttcttcttcttcttcttcttcttcttcttcttcttctccttctccttctccttctccttctccttctccttctccttctccttctccttctccttctccttctccttctccttcttctttttctttttcattttcattttgaggaaaagtttcactgagttggccgggtcggctttggctccatcacatagtccaggcaggccttgaatttgagatgctcttacttcagtctctctagtagccgtgattataggcctgagctataatgtattatgtatgaccagagctagtgagccctggttactattcattcttgtgtgtgagttcatccagggtgggaggcgggtgtgttttcatttccccatctctgaatgagcaggaactggttcaggcatgctgggtggtagaggttaagtgtcaccgccctcctggaagcccttggagcttgctgttagcctgtttatctttcttttcactcttgcggtgagattgggatagaaagggaaaatgaaatgatagagaatagcaagcacagacgtggagattatttccgctgacctctgaccaagattagggccggcctaacccagagatggtacgtgctgatgcaatgcacggggctggtcctcctcccgaaggttagccctcttccttacttaactgtcttaaagggttctccgaatccttcctccaacctgtttaatcagaaccaatgaataattatactgctttcccaagatgccactctgcattgcatatggctagtgcttagtgttttttgtgccctgatgtggaatgttcagcctacttcagtggttgggggggggtggtggtggtagaagtgtgggtgtgggtctagaggggtgtgagtcgattggctgatgcctggccatctaccccactggctctgcagtctctctttggtatgccttgagctggttagcaggacctgggcaatcacaagggaggtcactgcaccccctgggcagctcccagcaagtgtttttccaatttctgctgacattcttgccaggctcaggaccatttgttttcctccttgctatggcgattgatgacggggttgtgaaatgtataattgggcagcctctcctctaagtgtttcttccccagttctgttggagctggtgtttgtctaatcccctgctgatacacacgtgggtactcacttctgagctagcatctaagtggcagatttagtaacataggcctccccagcagtggggacagggtactggcacggtggggggggggtgccaggaacgtgggagtattacttctgtaacccttatctcgcctgaatctggtagcaggaagctggagaaaggcctgtgtgctgcagtgacttacagtttaatctcctaaccatgccaaatggaaaatccagctgcctgccagtggcttaggaaatggccaggagattttgtcagggtcagataatcccgaggcacagatcactgagctgagggtagggaaaacacactggcattgtgtgttaaagctggaaggaccaggagggcactatagggttgagaatctgttacaaaggcctgtaaggtagttgctgtgtgacctaggagagccgcatctgtaggaggtggctgaaccatcctccccttcttgtttttgtttgcttgcttgtctgttttttgaggtgctgtcttgtagcccaggttagtcctccttcttccacctcctaaatgctgggattacagtatgaaccacagcatcctggttttcctcctcctcctcctcctcctcctcctcctctccctcctcctcttcttcctcttcctcctcttcctccccctttctcctctttctcctcctcctctctttctcctttttggcctcctccccttcctcctcttctccctcctcctcctcctccacctttctcattgtcatctcagtcgccacagcaggaaccacttcctagtgctgtcttgctagttccaagcaatctggaagccccttgtcagtggtcctctgagagctgggtaagccctagggctggtttggtaaactggaaacattagtggttcctgacctcaaagagggcacatattctttccttcctaaattggttttaattttgattactgtgacactgcttttatagctgtctcaaaagaggaatggacaaggcaagcactgagccagtgcgagcgttcttactgggtgttgcttaatgagaactttcaaggctgtgacagagacattcattctgtccgcagcagggctggttctgacacagacttagtagggagcaaggactatggaatgaatagacaccctgtttcctcttcagctggactatagttaccttctgcacgagcccctatcctggccagaatccccagggttcacagactcctcaggctaggttcgctcatcggtgggacatgaacatcagggacacagcagaaggccgtagaaagtgagatatcacaaaacacagtctgaaagaaatccagacttgagttttctgtttgctttttgagacagggtttctttgtgtagccttagctgtcctggaactcactctctagaccaggctggcctcggactcagagaagcacctgcctctgcctcctgagtgctggaattaaagggtggcttgagtgtccaggtgctgtgctgggtacttcttctgtataattgtctcgggttgtgtctggcaatttctgcatctcctctcatgaatctgagtcttctctccagtggctgcccaaatagttggcagttacacagcattcccgttggctggtacctatcctggagggacgggtttgattgatcctgccataggccaagcacattcattaagtatgagttaatgaataaagattcagcgtgggcgtgtgaaactcaggaagcttggttggatttagacggccaccattgggtacagacgaagcacgggtaaagggttaatgaatttgttgtgtctgttggaagtctgaagcagagactgtccaggattcaaaggttctgtgagaccctcttccctaggactggctaggtgtgtgtaactccacacaaaatggcacctcagctgatggaagctgtgggactagattgttctcttatacctgggaggttaaagtggagtcggggctctccatacctcatgtcagttgatcggaggggcacagtctggaaggagagaggggacttctgctcaaaaaatgtcacaaagcctaatctatgaagaaacccaagggagtgggttacggttgacctgatagaaagtaacaggccattctctgggttgaagctaactaaactctctcatttactaatcatgtgatctcagagaaacatcttaacctttctttctttctttctttctttctttctttctttctttctttctttctttctttctttcttccttttcttttttctttctttccttttttcttccttccttctttctttctttctttctttctctctctttctttctttctttcttccttttcttttttctttctttcctttnnnnnnnnnnnnnnnnnnnnnnnnnnnnnnnnnnnnnnnnnnnnnnnnnnnnnnnnnnnnnnnnnnnnnnnnnnnnnnnnnnnnnnnnnnnnnntttcattcttttgtttgttttatttttttcaagacagggtttttctgtgtagctatagaccaggctggccttgaactcagaaatctgcctgcctcccaagtgctgggattaaaggtgtgcgccaccactgccctgttcatcttagcctttcaatacctcagttccatcatccataaaatgggatggacagttccccagtaaggttcttgggtcttctgtgaggggacatttgaagtgcctagcaggccatatggacacaaagcacagtacttagtgaccctgtgcctcagcaacagcagtggcaccacctctcagcctcatcctgggcctgtagccaccaccatctgattccctttgaaatgaagcaggatgcccagggattatttctaatttgggcacttctctcctctaagaaagataggggttcaggagctctgatgctgatatttacaaaaagcccatgctggagcaggcagactctgtgacacagaggaaagtggtctttcagagaacgcagagcttgagccagccagacccgagtgcacactcttgctctgtcttgctttgctgggaccctgagggtctgattctgtttccacacctctaccaggagggtaacggccttcttgtgggatgtgaagagagatggtgggattcaaggcaatgcaggatggcccggagacagaggcattcctcctgtcacactatcactgagctgtgcttcaaaggggtccccagctcaggatcaagtgtgtcctgcatcacccagcatctcaggtgcaggacaaggtagacagtaggatttacattgtcaaggaggtccctgacttgtaggcgaggcctcatcttgttactaggactcagaatgtgacgttttacaaacactcctctgtattcagctgctgccacagggtatctggttactggccctggggactaacctatttattctgtcttagaggtggaaggtggctgatgtagcactggcacaaaaattccggagtcttggggtgtgggaggcacaccccttccttgctctcccctcaatcttcagcattcttcatgtctcttagagtctccatagttcgtgagcacaaatgctgaggtataggtgtgctgtagtgtgtgtgtggggggggggggcatgtgtgcctgcatctgtgcatgttgtggcaaattaactggtgtggggtgggggcatgtgtgcttgcatctgtgtatgtgtgcagatgaactggctttgcagtgtgtctgttaaaatgggcccttctgagtgacaggtgctttctttaactgaagacgggacgatgctcgacacctatacatttcattaggccttggcaccaggaagctgtggtctgtgcagtccactttacatggctctgccctgctccttccaggactccctaagttctggggctgctctttgccatcagccatggtcgaggatggtggagatgtgagacaggcacctgggatgctaactcgtaggaggtcaagagaaccttgtgaaggtctccagggccccgtctgttggaggtactgagctcattgtttggttgctgtgcatctcaggcctagctggcgtgtacatctatgccctctccacactccttctgtcatggacaggatggggggcgggctgatgtcctggaggaaggagaccataaaagagcttgttagcattacaggcaggtgattagttttaatttcaagtgagagccttctggagcagcatctgggatattgtttaccctgtggtattgcacacttcattaacagtcagatctctctctaagcagccatctcctgcctcgcctcccgcagttactcttgtaaggctggcactggagtgtggttcaatagcaaagtgcttgcctagcaagttggaagccctgggctcatctacagccttgaaggagaaacattcttgctgctgtccgagcctgatctcctggtctgttacggttgacctcaaagaccaaggggctttgggatggcaggaaggacttctggaacgtaggtgatgacggtgagccctaaggactcacgggttagcttgagggggcagtgccctgaatggaccgtgtggtgggttgctggagaccactcttttgactgtaatttgggaacatgtgacactggttttggaaatagttcagtgtgaccttggaatgtaagccccaaatataggtttaaaagtggatggtgggctggggagatgactcaggtgctgaggtgttgccttatgaggaaggaatttgatccccagtgatcattcgggaagccaggcgtagtgatgcatgctgggaatcccagtgctgaggagggtaaaccccccagtagatctctgggggttgctggtcagccagtccagcacatcggtgggtaccaagccaagtgacagaccctgtctcaaacaacaaggagtatggcacctaggaatgatatccaaggctgtcctctgacctgcacatgcatatgtgcttgtgcacattcgcgcatacacacgtgtgtgcacacacacacacctgtgacacataaaaatggggtggaagtaacttggacttgcatttcttatggaactcactgggaatcataatttccctagggttaaatgtgttggatacagggagacatggttggagttcagggagatggctcagagagcggagctgattgttgcttaggtaatactatatctaaggaagaacagcgtgtgttcacggctgctcccagcagcattcgagtcaggctcaggatcagctttctgctcctggaggtggaacacagaagacttttcctcccagatgaatgtgtctttgtttaataatatggactcagtggatgcaactatagcaaaggggacctagggaaactgccctaaacagatgctcagacagaaccaggccctgagtggatgacagtggcatctccagataatcattctgtagccccaccctcagggactctgcttgctgcaaagagagaggatggtagatatgtcctcaagaagcacttgtgtgtgtgtgtgtgtgtgtgtgtgtgtgtgtgtgtgtgtgtgttaaatgcagcagccagacattctggagcaaggtaacccttgcaaattgatctctctctctctctctccctctctctctctctctctctctttctctctcagaattatttagcataggatcccattacagatagttgtgagccactgtgaggttgctgagaattaaactcaggacctctggaagaacggtcagtgctaccactgagccatctgcgaatggggtaaacactgctggggactggtaacgcattaggtatccaattggaattgaaggccatcaagatagttacttgccagccggcctgtgatggcgcaagcctttaatcccagcacttgggaggcagaggcaggcggatttcttgcctaggaaccacacctcaataaggatattattctcacttaggtggtggcggtagagaggcctaggatctctgattgcctcagggttccttactagcaagagaagttagcactgaggtgtgacctgcagggacactgtgacttcttacagacaaaggggcatagcagttgcctgggtgagcattggaaagtccatttgggactgtgggtgacctggcatgtgtcaccccacctgggtggggtggtggcagcctctcgggattcctgagtttgaagttactcaagttctacctcgattcctctgaggttttaggagagggacatctgtgtgtagcccagggttgggctatttctaacagagctgctgtgaatgtctgtattcatgcttttgtgtaagcatgaacccattcctccacagtaactaccctgaagtgcagttgctggactctacgcatgggagatgtgttttacttaggtttggtttcttttaaaataatttcttattctttaggcttatctacttagttaaaggaaacttccagactgccttccagaatggcatctcactctacactctctcaacaatgggggtgacagtgtgtctccacatccttgccagcactgggcattgtcacttttaaaaattttagccatccagacaatcagggataaaggccacctttttgtttgtaaacatttatctatttagggatgtcgggggtggggggggattgaagttaggacccatgcatgccaggcaggtgctctgcccctgagctaccacacgcatagcctattaatgtgcttttaatttgtttacacctaacggctcacagtggtaaatactggtttatgttctgactgcatccttctattgagtgatctgggttttaaaaataaaaatgccggatgagggatttagcacagtcgtcaagtgcttgtctagtgtgtgtgaggccttgggctttgtctctagcactgaggggggaatgcacagaaatgctgtggaaatggggcggtgaagccgggggcttggagttctgcctcacagggatgtaggtgagggtgcctttctgctcttacaactgtctattccgaaatagaacgctgctgattggtaggcaccctcggtggtggctggaatgcgcaggcagccagggtggcagtccggcccaggaatccgtcctgtcccaccctgtctccatgggacccctcccagactgactcaggtgttatatttaaggaaagttgtctgtgggccgttgggcttgaaaataaaaacaaacaaagaagcagatgctgaattgtctcctcacagacgccattgtcttgggttccttctgggtctctggaaaaacaaaacaacccccaccccaacccccagaaagacagcaaaggagagacaggatccagagcagaatccccatgtgtgtctgtgtctgtgtctgtgtctgtgtctgtgtctgtgtctgtgtctgtgtctgtgtctgtgtctgtgtctgtgtctgtgtctgtgtctgtgtctgtgtctgtctgtgtctgtgtgtgtgtctgtgtgtgtctgtgtgtgtgtctgtgtgtgtctgtgtgtgtgtctgtgtctgtctgtgtctgtctgtgtctgtgtgtgtctctctctgtgtgtgtgtgtgtgtgtccccgtgcgtgtgtgggtatgcacacaccccaaaccattctgcttccacatgttgtatatgtgggtccttttctacaaccatttcccttcctctgacagattgagtgccttcaaagctcaggcccagctctgggcgaagcccatttctgtcaatggttctccctttgggtctctatcacctaggccaataaaacaacccccaccccaacccccaactctttggattccgctttgtgatttagttgtatggaaggctcttgaaaggcttctcctttcttgttttaacgtcatgaaaacgcgcagctgcggatttcaagatttctccttattcttagggctctgccagcccagacaccagcggaggggcttgcctgcatcgggaagcaggggagaggcacacatgtgtgcttaacatgtctgtctgtctttgtctgtctggctagtagtgttggtggggctttgagtgtgtgaaagcaagcaagcacctcagcccagattctgatgagtccggagaaatgaaaagatgcgtcgtccgcgccttagtctaggatttggaaaatcgcctccggtgagcttgtgttaagtggtcacaagaagaggattgttttctacgtgggcttgaaggggttctgggaaatgagcagccgattctcctaagtatcctcgaagctttagaaggaggaagtctcggaaagtcacccactgcccatccatgttgtcccaaaggcccaagagaattcctcagctcattgtggtggtcaaggtcaatgggggaggggcaggggagggaaggggtccaagcccaaatgcataactaaaacaaatgatggtttgctttgagtgtttttctggtttgatacatttggagaaactggggctggtttgaagttgcttaattgatttttttttaattaaaaaaannnnnnnnnnnnnnnnnnnnnnnnnnnnnnnnnnnnnnnnnnnnnnnnnnnnnnnnnnnnnnnnnnnnnnnnnnnnnnnnnnnnnnnnnnnnnnnnnnnnnnnnnnnnnnnnnnnnnnnnnnnnnnnnnnnnnnnnnnnnnnnnnnnnnnnnnnnnnnnnnnnnnnnnnnnnnnnnnnnnnnnnnnnnnnnnnnnnnnnnnnnnnnnnnnnnnnnnnnnnnnnnnnnnnnnnnnnnnnnnnnnnnnnnnnnnnnnnnnnnnnnnnnnnnnnnnnnnnnnnnnnnnnnnnnnnnnnnnnnnnnnnnnnnnnnnnnnnnnnnnnnnnnnnnnnnnnnnnnnnnnnnnnnnnnnnnnnnnnnnnnnnnnnnnnnnnnnnnnnnnnnnnnnnnnnnnnnnnnnnnnnnnnnnnnnnnnnnnnnnnnnnnnnnnnnnnnnnnnnnnnnnnnnnnnnnnnnnnnnnnnnnnnnnnnnnnnnnnnnnnnnnnnnnnnnnnnnnnnnnnnnnnnnnnnnnnnnnnnnnnnnnnnnnnnnnnnnnnnnnnnnnnnnnnnnnnnnnnnnnnnnnnnnnnnnnnnnnnnnnnnnnnnnnnnnnnnnnncaagcccagacttaatgcatacaggcagttggggatagttacacaggaacgtccatgccagggtcagagagcacagtacagtacttgacgcctattatgcatctgtcatgtgtcaagtagtgcctgagaagttaaagtgacatgcttaaaactgcagcaacacaagtcaggaggtggcctcagacagccttgctctagaactgagtgtctcaaccttggcactattggcatttgggaacagttgttgtaggggacactgtaggatgtttagcagcactcttgatggagaacattttgtcaaccaaaacgttcctggtggttaggtaccgtggcactcacctgtcatccaggcaacccaggaggctgaagcagggggactgtctgagcccatgagcagcatgggcagcactgtgagaccttgtcactaccacaaggggcttggatgtttctgggtatctgtagagctattgctcctcatcgggagacacgattgtaaagctccctcctgtaactgttgctttgtctagttctcccagagaaggagcacacatgccctaagtgtgtttgtagagctatgtatagattttgggtggaaacagaaggcagatgccaatcaatactatctaaggccacaagagaaatattctcagagatggtgttgatggatctgaaacttgaaggcattaacctggtcacgcaggaaaatgtcacagacataagaaatggaggcaggcttgcgtggggtgtgcgacaggtcgtttgctctgtacccccttgctttctcccgttcttctcttggccatgtgatccttactcaggaacaggatgagctaaatgtggggcagtaacgagcaacttcccatcaaacagctgaacgcaacgaacctttcttcctttctacacacctgatccaagtacggctccactacctctcacccttgcctaggcttgggctgccaacgcccattgctacgacggagggaactagctaggcagatgacctgcagagttgtgaggctgcagcccagagatgtgacacacaacacttctgctcacattcagacagcaggacaagtctcatgtcgtcaccaaactgaggagccagggcgtggagccctactatgtgcccagaagaactagaaatatttgagagttaaaatgaactgtgggggtgtttgttggcgtgtgtgtggggatacagcctgtgggtggtaggtcattggatgaggtaggttcagggcgctagtactcaacaccaggatgcatccttcagcctaagcccagagtcctgggagtgacatcccccttaaccttaaattatagctttacggtgctgggtctcagaaggcaggccacggcagccactgagacacattctctctccttgctagacactccctgaggccacagctctgcccccaagtcccggggtgaggagacaggaagctggctgccatggatctaaaatgggatgggaccggaaacctatgaccagggtgaagtccttgtcactcctgacagaggggcatggaggtctcagtatgccagataaaaatagcagttgattgctgcttccctcctcctgcagcatgttctccaaacctgattccactcagtttctgaaccatgaagtgggcattaagtgtggggtgggttgggctctggcgcccactcaccagacaaaagcagtcagtctggagatgggggcagggacaggacagaggcgggagtgcctccaaagagctggctgggtccagggcctgctcagctctgggtcttaccagagcctctacgtgtatgagtcgccgattatacacttgtgtgtgcgcgcgtgcagtttataaatacatgaggcagatatggatatatgtatctatatgtatacatgtgttgtatatatttgtgtatgtatgggtggatatgggtatatgtttatatatatacgtctatatatgtatagtatgtgtcatttgtatgtgtctgtgaggatatatatatatatatatacacacacacacacacatatatatatgtgtgtgtgtgtgtgttcatgttcatgtattcatggaatgtattttgtatatatgttatagataacattttctttgggtatggcatgaacccacagaatgctgtggtgaacctgcacaggcttggtctgtgacctgtggccgtagcagtaacagaatggttagtagtggtgatgatgatggtggtggtgatggtggtggtgatggtggtggtgatggggctgttaacactcactggtaaaaggaggggagggagagtccccaggctcatggagggttttagttcccactccatcacactacactgccacataccgttcaggaggtgctagagcatatatgggaggtgcgaagttagctgaagatgagaccccagggatgcagggttgctgaagttgtcatcttcctgtgctgaagtgagacttctcagtcacccatggtcccgcaggtaagcctaataaacccactagcagcctggatggcatcgttgctttggtctgtcagtggctccctgtctggagaacatatacctttactcacttccaccccagaagaagtcacacgatggcatcctgttctacatgtgctgtggtcctgtgcatgtgctatagctatgcgtgcacggacatatgtatgcatgctgctctgtgtatgtgtgcctggggttgtttacatatgtttgtgtgtttgcgtgtgtgcgtttagctgtgtgcaggtgtggggtgggttcacgtacacacgcaggggagagtgtgatggttgctgggagctgggtgagcatcacttcctagagtgaaagttgcctgtcttgggatgcctgagacttcttcctcctctggcagatgctcctgtgctcccaatgatggctctggcactctgttttaatactctgacccgaattgttcttttcacaccaggaacagccccctcctgagcatggcccttctcagactgacaggaacccgagctcagagtccagaacaccctggtgggcttgggtgaggcacagcctgaggagtgtaggaccaggccaagcacagttccccttccccaaggggtgctccctgccctgtgaccactatgcactttggttctctccgttgtgagatgtacgttgtacaggcagctcagcagacagtgtttgcaaatgtctgggctccagagatttgagcataggaagcctggcaggaagacacacacggcctgggttttctttgcctttttcagttgcctaccttgtggcagtggtggccaacacctgcttccccctgcactctgctttggatcagggctgactggaaaggcaacagagtagaaggctgtgggcctgggtgggtcctggaagccctggagaaggctggaggctgctgaaggctggggcagcagccttagagaaagggctgtcttctgagcgagccttactgtgaggggagggagctggctacgcctgttggtacccagaccctgaggtttccggaagacacaggtgctatgtataaaaccacacggttacctctgccttgtgaagtttccatttccaccctctggcctgctgcacagtgctgaggaggagacttcctgaggctcccctgagcttgggggccagaccagggatgcattctgtggggggaaaaccttcacccagggagactcctgaagagctggctggagaaaagggagaacacaggggaagggggggggtgctgtgtgcaagaaaatggcacctccctcttgtcaggcagctctctgctagagcagtggacctctgaggagagtgtggccagcactcccaaggaattctgcccagcctttggcatctttgaggaaatgacggtgggcctggtgggtaggttaatagctgagcttcccttacctcaagtctccttgggtggttttgccgaacagagcatggctgatattttggataggataggtctcatgtggtcacctagtgtctttggctcttggtcccccaacacacacacacacacacacacacacacacacacacacacacacacaaacacaaacacacacacacacacacacacaccagctagggcgggtagtctatctacttaacacccactgccaagaattagctccttttggtaaaaaactccagaggacagagccagagtggaagggccaggggaaggaagccggcagagggcagacaataaaatatcttgaacacagtcacagggcgctggcctagtgttttcgagtgataaagctgtttttaaatcctcaatgaattggagaatcctcatgtttgtttcttttcttttttttttttttttcctgttctttcctcatcttaacaagcattcttccccgggcacggccatcctggctgtgtgatggggctatcctgtgctttcgggagcctcgctcgcttctggggctgggtgctctgtagccgctctcagggacttcttagttacccgtctaagtctgtgcttcgtcgatgaagcatgagccccctaggctgagaaacctgtcttccctcttgcttcctctagtaattgctggcaccctgaactcagaaagggcctggcatgggatcatcgagggacatggcctcccactcagtccaggtctagataccgagcatacctgggtgtgaaagtacaaaggctttgggaaaccatctacccgctggttagtcagtggggagcaaagaccagtccgtggctggtctttagtggggaaggaattggtatggagaccttgagtttaggggctttctggacttagggtccagtgaggaaagcatccaacatctatgacaaatagtgaataagaaactgtacattaactatggagaaagagctgtgagggaaaggaggcctttgacattttagactatctcttagcccttctcctgcctcttaattaagaggtgctttctctttgcactggaccctggaaatgatacagtcatccccgcttggttccttctggccggcaacttctgtctggtcttcccctcctgcttctagaaaggaaacaagaagtcatttaaagatattgctgagatcagggacgagtcatttcttgtctcttttctgtccttctgaaggtcactatgaccagctccacctcagaccttagaagttacccggtctgaggagaggagacaaagtcgtctatcactcgctggcttggaagtcatgaatcttcctgccagcgagctatttctttgcagacacttactatgtccccagttctgggttagtgttggctctgggcaggaccaattagggatgcaggacaggaaccataaagcaagcttccaggaaatgaggctccaagttcacagtcagctttatttaagggcttgtttgcaagcacagggacagggccgtgccaggcaagttaaacattgtccctggccccaaggggatggatcatggcgagtgcagacatggcctggtgcagagagggtgagaagacagcctgaccactgataaggtaagcctatagacagttgtcacaagcatgacactgctcactgttgctctctaaccttggtccagaatcacgggcattccatagttggcaactgggctacgtctggttcatcgcaagctgtcatggaaggagaatgtatgtcaggagccactgtgccctgccccccccccccgccccactctcaggtctttcccagggcctacctcatagtttccaaacctttcaagactgcggtaatgccctctctaccggtacattttaagccccgctactttgtttgttactataaaagtcgcatcagacattcccagaccccaagaggccagacaaacgccaactgtcctcctgtggtcctgctagacacatctagaataacccagtcagtcaatggacaggggagacatctctgtgtagcctggcaggtgggggaagtatcccgtgtgggacatacctgcctgtcctcagttatctgaaattccagtgtaggcggacatcctgtactttctcagcagcttctgtgaaatgggtgaatccagaaaggacaaagactctagaggattctgaaggtccccaggaagggtcagaagggaccctattactgtggctgctaactgcctgctgtcatgtctgctggtatacccaggcctaggcatagctcctctgtgcactgggatgggtgtgccgggccttttcctcctctccaccactaagctctccccagggatgggacacagtgagggtcccatcccaaccttggcccaggactcaagaggcccaccaggccatcagaaggccgttcttgtttcctcactgactagcagcaaaatgcaacactcttggctcaaacaatacagaaaatgtcccctccatcttaattagtcctagcacaggcagctccagtgttggctaattcagtgttagcagagactgttattttgacctgtagcctgtgcgactctttcttgtacccagggcatgtcgccttatgtcctttattggcttcagatggctgctgcacgtctcaatgtctgcctgaggacatggtaacaagccatcaaggaagaagagagggtggcttgcccagatgttcaagcccatgatgtcattctcaggaactcccatcagatagctcctgtgtgtgtgtttgagctgaagttgtcacgtgcttgcatgtacgtcagcctaaggcacagcagtggcctctgactgtcactgtttgttgctggagtggtccctgggtgttcagtgcatggagtggagacacacacacacacacacatacacacacacctgagctacaccaggttctctaaccactccctaccttattctataaagacttcgaggttgttgtttttaatctgttttctcattaaaaactcaagcattacagagaaccatgactaaaaaaaattccaataatttaactcattctaaccatacttgggtctatgacaaattacctaattttatttcatacaaatgtaatccgattttaatttaggtttttgtttttctgtttctttctcttttccttattttgggcttttgagatgagagttttaagatgtatccctgcctgccctggaactcactatatagaccaggctggactcaaacttgtggccaccatctgagtattgggatttcaggcctgcaccaccaggggcagctaacctcctacttcatcattttaatgccacttcacacgtttccctttgccattttaatttaattatactagcaatcacatgcggctttggtcaggttcttaggtgacagccgcagctctgtctcccatggacagccttatagaagaacctcgcggtaacccatttcacaggagaggctacacattcctcatgcttaacaacatccagtgagcaatggctggtggaccacaaactgatgtgtgcatgggcatgtgcatgtgtgcatgtgtgtgtgctcgtgagcacacaggcttgcatgcatgtgcatgtattgtgcatgtgtgcacatgaaggtaggcatggcatgccttagtgtgcatgtggaggtcagaacggaggacagacttggggagccagttctcaccttctaccttgcttggcatggggtctttggccatttctgttgctaagctctgtaccccaggctggctgacttgtgagcttctgggtgattctcttgtccacaactcccatcttgctgtagaagtgctgggattgcagatgcaggctgttgcagctgggctttttctgtgagttctggggaatctcaggctgccgtgcttatttgtaaaatgctttacccgctgagccacctccctgtttcgtgtctcagctcggacagctgacatcatccttcttttcctatggatagctgccaccatccatggtggcagaggtcgccatatatatatacatatacatatgtgtgtgtgtgtgtgtgtgtgtaggaacatattcataaaatgtatccgttttcttctcactttattacatcattgggtgatattcccctgaagctaacatggtgtgtcagttacggtttctatggctgcaagaatacaccaagaccaaaaagcaagttggagaagaaagggtttctttggcttacacttccatgtcattgtcatcaccacaggaagtcaggacaggaactcaagaaacacaggaacctggagacaggagcagatgcagaggccatggaggggtgctgcctactggcttactccccctggcttgctcagcctcctttcttacagaacccgagaccaccatgctttcttacagaacccgagaccaccagtgcagggatggcaccacccacaaggggctgtgccctctcctgttgatcgctaattgagaaaatgctttatagctggatatcatagaggtatttcctctggagctccttccactctgatagctgtagattgtgtcaggttgaccaaaaaaaaaaaaaaaaaaggccagtacacatggcatcaaaggtcaagagaaagtagagcttttcccacactactctggaaaagccaaaaacaaactgactatagcattacctgcaaggtctaaatattgggtttgcccaatcacatattgttgctgttgttttcaggtctccttatgaagctgaaggtaaccttggcctcttgatcctcctgcctcaggcttcttgggtgctggaattccagacacattcctttacatgcggttctgtcaattagctatgttttttagacttatttttaattatgtgtatcgagagagagagagagaggtatgtgcatgtgaattacagtgcccacaggggccagaggttggcactggatgtcctggacctgaagttacagctggttccaagctacctgacgtgggtgctgagaaccaaattctagtcctctgtgagagcagcccacactcctaaccaccgagccatctctccaacccctcggccaccaagttttacttgtctcatacttttcattcaaaatctttcagttttcaagaggagctcggtgcttccttgtccccatgttgcgcatgttgcctgtgactgtggagcagccgcctccgaccacagggccacggggtgtttatgtcctacgcttactgctgtgttgtttacaaatgttttctgccctgtggctcggggaattgttcttaattagcctggaaatggagaccatctgggcaatgtttttacctattcttcttcttcttctttcttcttcttcttcttcttcttcttcttcttcttcttcttcttcttcttcttcttcttcttcttcttcttcttcttctttcatatatgatcagcttttgtgatgggtttgtagaacatggaaatgtaccttaccctgtgaaaactgggttttcaagaatcctttttgagcccacagtggtggtttagctgagggctagtgcctgggtgtgcaagctggctgccagtgaccataccctgccatccttgttctctggccatctgtccacctccgcaacagagtggcaagtgacacgcccaggcccagaaagccagacagagtggcggctggagactccacagaatccttgtaatttgaaatggaaaaggtctgttggcttgtgtggtgttgtcctcccatggggccccaacccgctttagaaggtgacataaaatttaccttgtcactctgagcactcaattggcttttctgggccttatctgagaattcaagatctaggccagctcgggaatttgaatgtggatctggtaccatttagggatgccaccgaaagccggatgctctcggagactggcactcctcataggctgttctgcattccagggtggctacaacaaatgacagtatctcttctagtctgcaggtttgaaaacaaaagacttcttggtctgcaacaaccttccagactttctagaaggctttgtgtcaaagaacccaaggacagaagttgataaaagggcatctcctgtactgaacttggagagaatcactgtccagtccagtgcctttcactatgttgttaacctattgtttcttgcttatttttattactgttttatgcttatcccatgtattgagttcaattttgtgacactatgctcttttgtttcaagttaatcttttaaaactttgttctgctttttgactgaaacactaagatcttggttttgtgggcaggcgatgggcttggtgagctctttgaccttcactgcgcagaaggggaaaccatctctcgtgtgcttctggaaaggccagcaactggctctgctgaatgagagttagcatcctcctcaacatcccctagcagctggaacacagggagaccgtctgggtgggttgatgtctgtccaagcgactgagtgcttgggagttggggggcaggagaaaaaatccctcccagtcacttcattgttggggtcccagagccctgggctgatcctcaggcatgatttcagtgacagagatctggtctcagagatggggaggaaacccctagaacgcctaccctccagctctgaagggccagccagtctcttggaacaggaaagcagcaaccacaaacaggaatttcctcatgggagattgaagggatgtgtgcatggaagtgcacattggtgttttgcatgtttgcagttgacccaggaagttggtagggtatgaggcagagggaatcaaaaccttcaaatctcttccctccctctggccgcaagaaaggcttctggaaaatgtgagctttgtgataagggaatgagctcctaaatatttacaaaattctaggatgtgttggctacagaagagggtggcctccatacgaagcctttcagttaccaaccttgagctttccttagaatctctggtggaccatggttaccaaacgttgccctgatttactgcctgtttgagaattcatctccaaacatttaaggccaaggaagagcaactgtgtgagtgttttttaattactgaagtactcatgtggtaaatctctgagtctgtctgggaaggagtttgtcccgtagtgggaaggtcattccagttcaagattttaaatgagccggaggctggatgatgctaacagactttctcttataaaagactcttgtggccgtgggccccgcagtgtggagtacccatcacttactgtgtaagtagttggtgatttcagaaacaggcctggctgtcggcttgccagatgatgcgctgcttaacctcacgtataaacctccttcctctgtcgttgttatctcaagggcctttgtcacatcacttcgctcatttccctagtgagaaaccgtgacacactccagaagggcagctcctatggctgcctgctcggtttttttcacagcgagccaggaaaaggtgagtcacgttcctctccagtctcgttcaccttcaccagtagcgcacacacagttaatacaggaaatacgcattgcagcgtacacaagaaactgtcagcgaccagttgtgtcggcagcggctagcctagattatataatgttttaagagataagtcacgttagtgcttttgtggccatgtataattacattggagaactaatttactgagttaataattagtaatgtgactttatggcatgctaaccattctgaagtacttgtcctgttagcatttattgctaattagtagagtagccccattttcattactgagaaggtacactgctttcagtttgcgactgcattattaaagtctaaatagacaagcaaacggtacttagacatgggtcctatgagatctggggaatagaagtttcaggactacggtactaaatgcagaaatccatggcctttgtaagctgtcagtggagtaagacagtgtagcaccctgagaaatgaagattttaaaaaaacaaaaaacagaaacagcagtcctggccccaaaagttgttgaatctggccacttaaaaagcaaaaagaagatgtaagtctttgagagttaagggcttacattgtcccttgcaattgtcccaaaagtccctatggtgatgcacatctataatccattccagtccttaggtaaggcaggaggatcaccagtttgagactagcctgggctatacacgctgtctcattaagaaaaaaagaaaggagaaagaaagaaagaaagaaagaaagaaagaaagaaagaaagaaagaaagaaagaaaaggaaaaatgggcgtggctcagtgacagagccctttcctaatatgcacaagtccccttcaatccccagcccctcaaaaaaatacgaaagtactgtacctattctataaataggaatatccaaacacaagcacatccattctcctaacaccagcggaagtggccgcgatgggacagttatttcccacaacatggtgcaagggctgtgctctgttcctcccacttagagagcaggcacccagagtgccatagagcgggtcaggccccctgttgcctaggtaacgggccgcctccacatcacgtgaccgctgcgcatgcacggcggcggcagcggtggcactcttcccctacagggcgactggcttgcggacctggctgcgctgctggcaaatggcatctgcagtgcccaccctgtatgagcatatctgggtcttgattccttttccccctgagctcggcaactcaagccggcttgggctagggtaaaagggccttagatgtatcggttaatttacctatgtctgtaaatatggagcgagaaatgtaggctagcctcaagggcccctgcgcagagcgcctttgtttttgcaaagctcagcacttcaccccaggatgctggcactccgcccttctcgtgcgtgggcgccaggactatgcgtgcagtcagattttctagcaatatctcaactgtttcttttcttcttcttcttttttttttttttttttcgttcacccactcagacattccccgttttttcgtcgtaatcactttctctcatttaaacatacacacttaggctttggcaaacaaagtggaatctccagacccgttagacctcagtgttttagctacagaaacacagagcacatttggtttagatatcttactgttacagaaataaatcactatcttcaggttacactaactcagagatttcttccatagggttagtatagattaatctattgcagggaaagatgaataattagaaaggaataacaatcgaattcctacttccataaggttaggacaagaccggaaagcagggctctagactggcaaagcgggaaagatacgagtgattggtccttgttaccacctgcccggtgtgttcagtggttcttggagctgaatcattgaatcgtaagattaggtgattgaattaagtctaggcttttactatgccggttcggtcaatccagccctctctgaagatataaggccagcgctttgcgacagctgtactgaggtcccacaaggaatatggacagtccagcagaaaggatttttttttttttttgatcttgtagccctgcagcaggagcagccatgagctcataaactgatctttctcttgagagagcagttgcccggcacaacatggaacaaatgttacctctctgtctctgccttctttcagccaagcatttcctgcctttgctggtattctctctgtgtgtgcatggggcttagatgggtccttctgatcagggagccgttggcgaacaggaactggctgatgcttctgacttcagcagaattaggccaccacgatgtggtgaggagccaggaggtttcacttgctctgttcacaatcaggtggatgggggtgagtgagtgtctctgagatgtgctttttttttccaagcctggttaggggttggctttaggaacactcttctcaccccaccctgcctttttgacagtttgccgagcgagcgctgtggatctttaaagagaaagaggcgaggaaggtcaagtttttaaagtagatctgttagcaagaagtgtaaacacacggagccccacaaacattcttggttggggttttatagctgtgatacacctcccaggaggacccgaccttacatggcagggactctcccttggatacacagcccagctggcttttgatcatggcaccaaaagtgttcgaggttcttgggcgtggaataatgtaacgtgagcagtagtatccttagactcctgggacagaggaagacattttgtctgagtttagatccacagaactgtttttggattgcctgctggatggtttcttcctgccagggttgatgccctaggttggagtctgaaggcaggctgtgagtgctagaagcccatagaccgtggcaaggtgcctgggtctcttgcattaactgcctctctcatggctactgccttctcttctaagctactgctccatcttgcaagagtccaagctggtattcctggggcagtcaagcatttatgggaagaagaaagctaaggtcacaggccaagttttccctcccagcctagccaatcagtgatagaattttaggcaagagatttatcttccttgaaagctcctcccgtggggactgggtgctgcatatggccttgcatatgtggtgcaagtctctggagactttcccagtaaggcctatacgaaaaggctgcagggaaagataatggagaataacagatatatggtggtggtctgaatgctgtggatattttagcttatttaattctcaaaatgaccccatgaagtaagtgcttattaatgtatctctcttgctgtagacaaggaaaacgagacacaggctggataacttaaatgtggggggaaactctggtttgaacacaggctgtctggaggcaagccaatctcttagctgagttccctacccctttggtataggcaacggtctcagcagtttgggattgggaggggctgctgcaaacacccccagggatgattctctgagccacggcctgagtttctgctgccccaggctggcacccttccttttctctgtcacagggctgtggcagggggctcctgctcctaccatcctgccaactaagcaaatggccactgagtattttcctcttggctgacactgtgtcctcctccttggcctaacaggcccttattatcagcatgttaaaaagccagggttgtttccttatgggggggggggggtaggaggaggccagagggccacggagagttcaaggcacccggagaaaaacttatagcattgtgcgtccttggcagctccttcctgggccttcccagcagccctccgtgtccaaggagactcgtttgagtccctgtcccgagatgccgagctcagctctcttcattttcggagtatagaaagagtgggttggagaaggtccagccttcgagatgaccagagtgacagcagtggccctgcctggggcccttcctggagccccagcacacctgtgagtaagccaggtgggagcaaggccaggtgggagcaaggccaggtgggatgagcagccactgggaggtagggagctctggagggtcatcttggataccaggaaccttcgtagatcaagcctgtcttcttcctacttaacttcaggtagcaacctttcctttgcatctccatgccactccctaaaggcatcctccatcctcctggcatttagtaataacccagtcatgtggaagaaacctgtcatcctggcctctggctttcccagagaaggtttaatgggatacgagatacgaggtgaaatgaaacggaacgtggagttgtgcttcccagccttagggtcccatcccctcctctgacacagtcccctaaggtatgtgtctcatctctgtgcagccagcatcctaaccttgctccctgactcctgaggtcagccctgtttcatccggggcatgagctgtggtttgaggaatcgtagagtccgtgaacattctcatctttcacatcaacagaaatttcctgaacagctgatccgtgccaggcgtcacgctgagcactgtcgaaacacagatcaaaccaggcagatcttgtggccctaaggaaccatccagtttgggtgattcctcttggcctcttgacagttaaacccatgacatttagggggcagacaggattgaaccggttggggagattcgggcagagctgtcttacagcccacagtgcttattcagctctggagcagtgtctgtctatctggacaacacagttgggagaccttgcctctgtctggcagctctgggcctggggggcagccagtgtgactgtgaccaaggctgcaccaggaaggcttggattctcttagtgctcttgtgaagccagagacccgaggtgttctggacgctattcttacaagcacccttttgagttctatgcccaaaacactggaggctctctcttctgcacgattgctatgtggcgcaggtggtgcctggacctcaatcacttcctctctctggctcgtacagttgtggtgtgggaaaatggctttaaagtccatctgtgggaagacctcagactcagttggtgcttgagtggaagtagtcagtcttcagtagcagagttagaaaattaggtccagagagactcctctcctgacttccaggaaccctcccatcatcccacgagtgatattaagagatccaggccttttggctgctatgcctacttcaaagtgttctttccccctaaaagagtagtttggatcacagagtccctgtgggtattaggactacctgggcatggtggcacacacctttaattctagcacttgggaagtaaaggcagacagctctctgtgagttcaaggccagccggatttacagagcaagttccaggacagccagtgcaacacagagagatcctgtctgggggtgggggggatgtgcaacgggatggggatagggtgagtggattggacttgggggaagttgctaaggcaactagaaaacattccaaggactgactggataaaaaggtgatgtgccctgtgacgtgtggattctctttggtttggaggaatgtcagacatcctttgtgaccaaccactttgtccctaactgaaccctaggaaatagtacccactgatgttagcgatgctccagtcagaaaactctgagagaatggcaccctcgagcctgttgcttcctctctgaaccttggccttacataaggtagacacctatattctatgcagtaaattaaggtcactgccttacctgccaaagttgtatgctataaccaatgccagataccagtgagtactctctatgtgccatgccctgtggggttttttatgtatatgtaacagcctaataattatgtgtgtacttatagtttaattttcatttaatctcagacccaaaacacgaggttggcattggtatcccagtcttacatacgtgaaacaaaggcctggaaagattgaaaaactgacccatattcacaccacagggattttaacccagggtattgaattccctaggctgactgatagtggcattggtgaattagatagcagcttcgtgaagagggatgagatggaaaagaaaaagaaaaatgagagaattctaggaggctgagtgtgattaacccactcttgccccacccttatctctgcttccctctcctgtccctgggtccctaccaccttttctcctcttcccagccttcatccccaactgttctgaaagggggctctcaggagataggcctcttcctcccatgctctctacatcgtccttctcttctctcgttgtactatgtgtgactgcggcagcagctgctgctcctgccgcctcgcccccaccccccctccccaagcagagccagcattcacatgaagaaggtaggaagttctctgggaaacagggcctgcctcagaggcaagatacctgaatgcctcctgcatctggggaaactcaaggtcacatggtcatcttcagagtcacacaggattgtccctcatggaactgaggtccttcccactcccaggcactgatacactgactgctgtcaagccaatgtcagcctcgctttgcacaacctattcccaaaacatggactttatatgcttctagtattggcgttggcccagcattttatctggtataattttgactctagatcttcgtgacttgttgctattactgtccgtgattgaaagggtaggaagggcaaaggaacctatagtgatatcgccctggcaacctcttaaccctgaccttgaataaaccagatcaaaggtttgattagatcagtggcctcgtggttttcagcatgctcatgcactcctgagtgtgtgtgtgtgtgtgtgtgtgtgtattatctgtgtgtgagtgtgtatgtgtatgtttgtgtgcatgtacatgtgtgtgtatgtgtgtgtgtgtgtgtgtgtgtgtgtgtgactgtctagagatattatacacagtttcgatggtacttcagtaggtaaaagccagggggaatgctgctacctgctacacaggacagcagggacaactggctcctaagtgtaaagactgctcacattcatatgctggtggcagagcctgaatgtccttgattgtaacataagcacggtgactctgccttctggactgtggaggcttggatgagcgagtctgtgaacggctgtaaagtgctcctgtgattgcctactgctgggagcctcctgctgcaccctgctgctcctcagacttgaggggcttacaggtggactagaattggacctagaaggggtcccagggaggctccaagaggagtatcctccaaggctctgggggaccatttcaacagcttccattaaataactgttctgtctcagaactatccagccctgcttcagggcaggagtatcgcccttactttcctaatgcttctcccacgctgtccttggtctggtagctgcatcagaagaggaatgcttttagtccaccagactttatcttagtgagactatgtctgctctcccctgcaaatgccacaaatcacttgtgtaatcttgccctcagtttgacagaacattaggcaaatatttccccacctatgtctatggtatctaaacctacagattgttagcaatgattctgtgagcacacattgggttcttcacggctctccttgatgggccccactgtggctagagccattgaataacttgaactttcctacaaacactggccaggcacattttggatatgctcaagttatccagggcgagggaaaatggaaacctgtgttctgtgtggacttttactcagaaaggaaggtctggcccttgtggaccacagggatccttagacagtcacaaccttctaatggtcaccttagtcaatttccattgctggaacaagattcctgagactggctaactagggaagaagaagagtatgtcaatgtctcatgcttctggagggcagggaactctggaacattctattgaggacttctggcctcatctgacagtgggccccatagagccgtgcagacagtgatgctgaactctacagagcatcacctggtaagaagatgatgctgcctcagaagtgcctgctcactcacctccgtggaattttatttgactttccctaggccactctgcctggttagtcaataaacaccactcacttgttgcttcttttgcaaagcctctccgtctgaatacttttcatactgtggttaacatttagacaagtgtgaccagcgggcatgttctggagtgcaacacttctacctaaatgtagactctaccgttagccagaaatctgtctttttaaaagaattcatgtgtgtgtgtgtgtgtgtgtgtgtgtgtgtctgtgtgtctgtgtgcatgtgacatgttttcgtgaaataaaacagatcaggatcgcagaatcctttgcacaaagcggtggcttgttttcagctttgtgtctttggaagtgaggaatatgctggatttgtctgtaattagactgtttacaatggatcacaatctaaaactgccagagagtggtctccatagaacccacacaggaactggttctagagtgtagacgttagactctagaacatcactgttttctctgatgccactgtagaaagggaggccagacatgggcgtgatagagggcctgaccacttcccgaaggctgaagtactctcttgggccagtgtctcctgtgttctgccatggactcacagacttccctctgtccacaggagccacagctctgatcctgagaaagcggcactctgtactctgttgacaggaggtgaccagaagtagctcttgtgttgactggtttatgtcaacttgacacctgctagagtcatctgagaggagggaaccccaactgagaaaaaatcctccataagacccagctgtaggcaagcctacagggcatttcttagttagtgatcgatgggggagggcccgggctgttgtgggctggtggtcctgagttctataagaaagcaggctgagctgggcagtagtggctcacacctttaatcccagcacttgggaggcagaggcaggtggatctctgtgagttcaaggccagcctgggctacatagttccaggactgtcagggctgttccacagagaaacctgtcttgaaaaacagcagtagcaacaacaacaacaaagaaaagaaaaagaaagaaagctgagcaagccagtacgcacccctccatggcccctgcatcaggtcctgcctccaggtccctactctgtatgagctctagttcctgacctctgtcactgttagactatgatatggaaacatactccaaataaaccctttcctccccagcttgcttttggtcctgggaattcatcacagcaattctaaccctgactaggacaatgctgtctgcagagcctctgggtccctgaaggaaagcagtgcccaagccaggctcacacgtctgctaattctttggtcaatacaaccatcagcatgaggcttagtgtactgcatctgagatttcagctgaagccagcaccccagcccaggaggctgacagccattggccgaggtgccaggcgagagtctactcttagggctggttaggcatatttgcaaagatacttacacaaagtagtgttgtggtatgggtcagctcccttctccttccctggcaatcctaagtatactctgggtatctacacttgaacatcaaatcctttgagtgacgtgatagcccaagcactggctcctggtagcaggcaggtgggggtggcttggtgtgactctctcttacagaaatggccagcacacttattacctacactataagtttctggggagtaggacatggccactggggcccaagcacagcctctcaatggcagcgcagggtgaggacagggtgtggcttatgggaaggaatccagagccacagcttgggagggttttccttagaagcccctccattatggatgatgtttgctttactgtccatttaaggaggtttgggggcctcgtggttatgggtctcccccagccactttgtgtgacttgggtctcagcagctggatggagctctttttcactcaaacggaaaactgggctgagctggggcctctggaaaacacggggaagtcaagaaaccaggcaaacaggattgggaaaaaaattattctaatgtaatggaaagagtgtaaactttgagtcttagccctgctccttgagtggtgcccagttctgccatttcctcatttaaaatgacgtctagccttaccaagctttgaaggcccattgaaaagtagagccgtggcatttacagagtagccacttactaaatagtgatgttttaaaaagctgaattatttatttttattttatgtgcgttgctattttgtcttgcatggatgtctgtgtgttggatccctggaacagaagttacagacacctgtaagctgccaggtgggtgctgggaatttaaccccggtcctctggaagagcagctggtactcttaaccactggctgctgcttttccagagccatcgctccaacccactggctttttttttttacttgtttctccagtactgttagttttcattactagtccttcgggtgcacaaattaggtctcagcacatatctggaagcccagagccaaaaacagtactttgtaggtggcagggggccatgtggcaggggtggccagggacctctgaaacctgtctgcttcctgagctcttcctgcactcttgttggtttggggttattgaaaccccaccgcgtcgggctggtgagcccgtggggaaaggcacttgctggcaaacctgagttccacctctggctcctaccttgtaggaggggagagctgactcctgtaattgttctgtgaccgccatgtacacataaataagtaaatagcaagataaatagatgaatattaatatccatcaagtacggatgggacaggaatggtggacagtatccctaacagcatctgcaggcagagcacagtcacggaggcggtgtcaaccagctatgtggcaccgcagcattactttttattaggaaaagttgaaaattgtcagaaaataaagttttcctgaggactttagccttagaacacacagtctctctttcagtgttcccctataaaaggtctctccccccaccccacccaaccccccctccctcccgccaacccggtgctatattgagccaactgaactagccaaagtgatattttgcaaatttcagggtgtggggcagggggtgcctgctaaatctagatcctctccttcctgcttctgattcaggctcaggctaaggcattcacaggtaatggagggactttctggggctgattttagaaaaggtgcttgcttactgtgcctacagagcctgctgcggcccacctctgcccagcctggctctgagttttctcatctccgcccagcctggctctgagtttcctcagctgaagctcttgacctcaggctgggctgagaagagaagatgttgaccatacagacttgcccagagctcctctgaggaagctactgtgtgtccttacctcccaagagaagaaactcaagttctttaactgagaaacaatatatataggaaacattgtagcgttttcaactctatagtccagtagcattacacatacttacacagtgcagccatcaccaccatctattgccagaactaaatcttgcacagcaaagtctgggggttggaggtgtacctcagtggcaagagtgcttgtttagcatgcataaggccccaggcaggttctaccctagcaaggcgtcaaactaaatggcaaaattgtatccttacataatacctccccattcttttgcctcagctccagccagctccagtctactttctgtgtgtaaatttgactgctctagaaggaatagagtgccacagtatttccctttgcctccagcttctctcacttagggttacatcctcaaggctctcccatggcatagtgtgtgtcacagttaattccttccttcctttccagtcctagaacattgaatctagatcttagtggatgctaagaaagcctctgagctagccattccttcagatatcttttacttactgtttgacacagagttgtgataattttcccaggctagcctcgaactctactccatagccttgactttataatctttcttcctaaacctctgaagtagttaggtttacaggcttgagccattaggttttgctccaaatcctgcccttttaggagggctggatcatatttccttgtatgtctatgccgcattctgttacccaatcatctgtcatcggactcttggtctgcttcatatttgaactattgtcagaagcaagtctggatgtgcttaaaatggagacctgatgcccctgactcccgtgaggtagacaagttgaatagactgtgtgagtgagcttggtgtgcgaacgtgcctgagcatctgtctttctcagttgatgtaaatagttggagtgtgaaagccctgttttatatctgaagaaattctccttacccattgtgctgtcagagacttgatgtaaaggtaaacaggaggcgcatgcttgacgtaggacaggccatgttcagctctgggtcaggtttcccactggggcctcctccgagtcaatcctcctcctggatcatcagcttgcttcaggatgctgcccgggtgtgctgagcaccaacacgcgaatttcacatccccagcccagtggcatcgccaccgtctcttgcttatgtgattctggccaagacattttaacgtcctccattttaagaaggtttgaggggtgtataataagtgtaacataccaaaatgtattgcccagtacctggcttatggtatatgttctcttttccttccttgccaggaaaggccttgttcaattactacaggggcctccacccggcctaccacagtgcctggcacacagaggcagctgccggctgaatgcttattaactttatcctgcacaacactaagcagggcaaagactgttctgtggcagctccttccaaagaggttttaagcaaacacaacacccctggaatatgcgcagggcttgggaggggaggtactttgaagagaggcttgtttggatgggtaaattctggcttttttttttttttaagaaaaccctaacgttggcctcattacttttgaggcagtcattcactgcctctttgtctgtgtgtagagtgctcttaagaaattactggctagacctttaaaaataggccagttgtcagatgtcttggcaagaggatgtatcccagtggtgttaggatttttcctgaagttaaacatctctccttggagagggttgtttttatcatcagctgctaaaaattctcaggaggtcacagaacaaactcagttccaagggaaggtcatggaatctactagatttaagtaaagggttagtgggggacagggcttgagttttgttggagggccactgaatggctgtgggtgagaaaaagagatgttgaagacattctcatggttctgcgccatcacagagtccccatcctcctggatttggtttgagcaaggaaagtcatactggcctctgtaggtagcttgtggctctgacaggtgaacaggattgttgatgggagtcaaaggacacgcagtttgatcatgaagatcgttccatctgtgtcagagccccgccttggattagcaagcagcagtagcacatctgagggtctcagcagccctgtggccatagctgcccttaggatgctgttaggatgaacaccattagcatcaagtaggaccagccagttcatgcatggttgacataatgatggagagtttcccttttctccacctggcccacattaccagataacgctaagagcagcacaattcaggtgacacttctaaacaagagagtgttccacactgggcctcggagacactctggagagcagttcccgggaatgctgtctatttcagctttggatttctagaactagctcggcaactgtcacatgtagggggctgtggtggaaagggcctgtgccagcatcccagaactctcaagggctgtagggatcttctgtcacaatattatcactggccaggtttgttactttggaggaacttaacatcagaagtgtgacccattaggaaccttgagccctttcttttcacctttatttgaacttgtacccaagactagctattggcttccagtgtttgtatgaaaacagaacaaaaagaaaagaaaccctggggtctttgggggctttctccaggttcattcatttgttttgttaaaaacaaggatcataagctgggagatggctcggttggtaagagtgtttgccacaaaagcatgaggacctgggctggatcctcagcccccaacgtaaaaagccacatgtggcaggcacgtgcccctgctgactgaccagcctggctcaaggagacttgggctgggagatagcttagagtttaagaacacaggacccaggttcagctcccagcatttgcatcctgtgacttacagctaactatagctccagctccaggaggaccggatacctctggcctccatggcaccttcactccatgtatgcatctagacacacacatacacaatttaaaaacaataaaaataaatcttgaggaaagtaacaaggtggaaagtgattggggaagagacctgacactgacctctgacctccatgactgagtactgacctctgaccttcatgactactgacctctgacctccataagtacctgcacacatgcatctcacccacttacacaagtgcacacacataatatcacacagtgtccaattaaagcagatttaatgtgctagttgaaaataaatacagagtgcagcttcacaagtcagtcagtaaaggagacacccctgagcctgacaacctgagttggatcccctgagtccatgcaggagaaggaaagaaagaacaaattgccctctgcggacgcccacacaggtacatacacatataaaataaatgttaagaagttattaagaactctttaaaaaatctactctccatggatgcctcttatatgttacttatgccttataagatgtgaatggctaatacataccaaaaaataggagtttggggaaaaggctgctgaaaagctttcttgtctagacccggttgagaacccaagattggctttgtggtctctcaggtatctgtggaggtcatgaacaccctagaagagtttaaaagcaattaaaaaaaaatccatgtcacccctccctgctccttggcttgagcagcaggccacacaggagtgggttcctgcaaatgaggaacagtcacagtgtggcggctcaggcaaggaggcctgcctgtgtctggcatctgtgaggccccatctgcagcatgtgagtcccagggaactcaggggcgaataccaaggctgctcaccattgctgccttctcttctggaccagaacttactttggttcatgctgcacttatttgagccaaagtattggtgacactatagaaagcttccatttttagatattccttacactagaaacccaggaaaacaaaggacttgccccctctgtgggtcagggaactggactgaggtgtcttccctgcctggagttttcagacagtgggttccctgctccagcaggcttcagttatggaatcttctagaattgcctcccaccacccatatctctgggctccttgtacagtgcccttccttcatctccgtctaagccagctgttcagagtcctctggccagtgtggcaagggcatattagtacctatgtatgttacttctcttcaatatcgtgataaaatatacaaagggagcagtttgaaggaggaaggacttaccttgctcaggattagagagggtgcagcccaacacaacagggaaggcatggaggggctcacagtattaggtctgtgtgactgggactcctcccatctcagtagacatggaagcagagaggggctcaggtaggaaccaggccaggctatgcaaccataaacccagccctacagccttctagccccatgtctgccaaatgggatataagtccaaatggttctacaacccaccaaaaatggcactaccacctaaggaccatatatccaaacccacaagcctgtggaggtatcttacgtctaacactaacgcaagacaactcttaggagcaacagacacatactgaggctgtggactttctttttctgatatcatgcatagctacccattatacgtaacaaaagattcctagttgggtgggaggatcgtgggcaggtgtactgtggctaatgagtagcatggggcctacaatctggttgtctgtacaggggctcgggttgtactctgtttggtctgcatggaagatgtattacttgtggttggaggagggacaggccccagaggatgtaaggaacaatgtaggacctttgaggtttgcccaactgagtttaaaagcactagagtggtccagtcctattgaattttcctcctctccttgaaggtcaaggtggaatgtagcttctgaattttcaccactgcagaattttcaagagatagtatctgtgaatcctgtgactttccccacttttgatacttactgagaccccttttttagttaataccaggcatgtctagaaatggtcaggtctgataagtagttgaggtgctgagtcattctctggccctccaggtgcaagtgtgacctgtgacctgccccctgcccgcccacctctaggacttcagcacagggcatgaaatcggtttgaaagcatgcatgctcacatggctctccctggggttgttttccagtatcctggtaagtcctgtatataccaggcaaggtcttctagcttatctgctgtgctgagtgggctgtatctttcttgtaggagcttgccttgccagtctagggttggtttcagagtgtctcctgttggcttctccaccctccctctgcccttcccctaacccctgcccccttccacagttccactctcagcagctccctgggctgcccctcactactctgcctcactaccaagcccagcctctcagccagccactgtccacacccagccctggagctgcatgaccaagaaggtagaaatcttcctaggtcaaagggtcccaactctccaaacatccaatatccaaaaactgggcactggcaatacacataccacaggaggaaaattcgactcctgacctcacagtctcactaaaaatgccgtataaaattaccttcaggggccggagagatggctcagcagttgggagcactgaatgctcttccagaggtcctgagttcaattcccagcaaccacatggtggctcacaaccatctgtaatgagatctgatgccctcttctggtgtgtctgaagagagtgacggtgtactcacatatttaaaataaacacatcttaaaaaataaaaataaaattaccttcaggctgtgcgcatatggtatatgtgaagcaaaaaaattaattttgtgttaagacttgagttctgtttctaaaatatattgtttttatatatgcaaatattcaaaaatcagaaaacaaaaaaattaaaatccaacatacgtctggacccaagcattttacataagggaggctcaatcttaggtaaatcttactgtagtgtcttcaggcttttaaccagttaacctgtgtgttcattttataaacattgagctaaacacctgtttcatgctaaacattcctgctgggtgagatccatgccttgtgaaggtggaggtggaggtgtcatcgtcggtcagatctcagagcagaagctgcagggccgctgtggagggctgggccatggtgtcgtgggcagaccagggaggggtatgcctgccccaggacttgctgggaggattccttgccagagcttatctgtgaaggctccgtgggagaggggaacattgagctagattttctttgttgagttggactttagtagctgcctgtcgaaggaacaaggatccacagttgaaatctgtgttatcaatggccagaagacccgagagaactcggcaggactgggaaatggtgagtgggcctttgttgccagcccctggggcaggggtggggcccagtcggctgtcatcgtgctatggagcagttactgaacatgcaggccagcatgagccaaatttttcggtgaggcattcaaaggctgttaaaatagcccgtggacaacaagagcacatgtcagaagggaacgttaacagatttaagcttttataaagacatgctccccaatgacaaagacccattgtgtctctcctggtgaagggctgtttccctctgggtacctggaaggtagcatctttctgtgtcatttgctttccacatctacacaggcatgtgtttgtttgtttgtgacatggtctcactatgtagctttggttagcctggaactctcagagagtcacctgcctctccctcccgagtgctgagcttaaaggcgttccgccacgctcagatcagcaccggctttggggggtaggggggggcgaagctgcccatagaggtgccaacttagtcctcctaactcagacagcttctgtgagagagtaactggaggccagaagttctacaacatagcaagatctgggctcttaaaaaaaatatgttaaagaaaaaaaaatgaggaggaggaggacctacccgtgagcagcttttacccttcctcccatggagggcttgaaacccagctgattgtgagtctggtattctgcaccctgggcaatgctgacctgagggtatgaacaagtggaggttagagggtgggacagtgggacagcacatggccctggcagatctagacttggttcttacctacgagcctcctagaagtcctgggatgtcagtgcttggctttctggtttgtaaggtttatcacgatgatggaccatatctcacaaatgagaacagtgacaatattttatttccaagacccttcctgtgatgtggctgactttcctaaggactttttctcatgccctctactgtggaagggaacatacatgcatgcatacatacatacatacatacatacacatttttttaaaggtgcagcttctgatcccctcccccacaccgagagaagcatgctctttgaacaggaatgcaggcaggctggggagcctgcttgcctactgctgcatacagaccactatttccctcctggaagcctcatgccaggcaagctggctggtaagggtttggcagaagatgagtcacagcggttaagaacatttgtttctcttgcagaggaccctcgttcaattcctagcacctccatggtgactcacaaccatttataactccagtcccagggggtccatgccctcttctgacagccttttaaaacaaaggtgcataaggagaggaaggctatgccgtggacatagatgttacaaaggtgctcaggggttgacttttgtaactttaggtcccccttcgtcctgtcattgggcaggtggctttgccattctctcagatgaagtgaagattgagggtgtgatgggttacccagctcagcgttagaatcaggactctaaccagagtaactcagctagcgcttggattagttttatatccaaaaaccccctgccccaagctccgcattcacaggtgacacaccacgtagcggccataaggcctttgagttggttaccagcaaggcccatggcatggtggagcaagtgggttctcgttatacagacatgggtcccagtcttggtttccctttgatgagttgtgtcttccttgagcttctgctttcttattagtgaactggactggtcttaatcctatgtcatcgatgcttttatagagggctgttctgagcatcaagggaaatatgcatatgcaaaagcgcttcctcagccatttagacgttaaagggaaaaggagaggttaggaagggtaatagtggttttactgagaggttgttttattcctggctgctcaggaaccactagtgctggcttggtattccttcctcctcctctctgcctcacatgcctgtcagagtcccagtatctgtctcttccaacgggcttcacacagtttgtaaggaacacatgacatgttgcctggctagctgctcctctggggcctggcttccctcagagtctcacaatagggtgtgggaagaaggtaggcgtgaggctggggcagacagacctgtcttctgcagaacgctttgcgctttgcgatagcataatgtggcagccgcccactgtgggaggtagaaagccagatacagccaagctgtccttggaaacacacaccctcccctgaggtggaatttacaagtgacctcgggtggggaacccaagtgaggcgtcctgggtgcttgggcggtgcctgcctgcttccacagcactcttagtttctttggctttcgcaactgcttccaaggaacaggaatctctaaatgggtccttccctcggaagaggactgccagccgacggcatcttctcttcacatattaaacatatctaattctgtggccaatttatttgttaacagtcacaggcaatgcttagaggtctttggatggctcaggtaatgactagtatagctaattcttccaccctgcaaaggaggtattattaattactgccacacccattgtacatgtgacaaaaccaaggttcacagcagttaagtggcttggcccaagtcacaaggaggggagggaaggaggtgtgggggcttagatgtaaatttctgcctacctggttcccacccctccccttgtcatctatttcactgtgagaataagacaagaaaacaaactaacaaacaaacaacgaaaagctatttcactgtgaatgcatacgagtgtctgagttgccctgtttccaagaaccagacctgcttgctgactgacacttatgcattcgtagccctcttggaccattttgattaaacacaagccaggtggatctggcctgagctgcattttggaaaaactttggaagctttaatgagtctcggtgccatactgcattctaaactgcttaggtcagaaactaagagagggagggacacgggcgataagtcccaagtgacgctgatgtgtggccaaggctaagaaccaccccactgccaaccttgactgtgcttgctcatggagatgggagttacctggggcccttaaggaagctgagatggctttcagcccaccatcttcagctgtttaccaacatcattcattctatatgcaacgttgagccctaacatggatgtcaatattttttaatacagacatttatttctttgcttgtgtgttttttagacagtcacctgtgctcccagggacaggctctgctgtgtccaaagggcttcaaggcaatggggcagcctggcctcaaacttgttctgtagctgtagatagccttgagctacaaccacactgcttctgtctcctggctgcttagattacaggtgtgtgccaccgtagcctgttcgcagacacttatttaggaggggaagacaggacaactgcccaagagttgtaaattatgttcttcaggatgctaagatggacctgtattgcttactttctcagtgctcaggcatgtacgtgatgcagaaggaaaaggagaaagcccatctgcccacctcccaaatctacaccatgcaaagatatgtaaactttttttgttttgttttttgttttttatttttccagacaggatatcttcgctgtcctggaactacctttgtagagcaggctggcctggaatccagagctccacctgcctctgcttccccagtgctgggattaaaagtgtgtgccaccagtgcccagctgtaaattgatctttcttttagagcttatatttaatattgggatcaaacattttaccttgatgaaggtgtttttctatatgctataagcagttgcattctgtcagctagcctgagctagatttggcctgtagttgtatccgtttcttaagacttcccaactctggcctagctcagggaataggtgggagctctcttgagtaacgacaggaatggaatatatacccacagtgtattactaattccttctcttccctttcttttcaccttttgaaggatggtagtgtctataggaacagactcgctgactaatccacagtaataaagtaccatcccttagggcagagggccgtgtcagctgggactgtgggtcccagaaaagagacagaggttgggggggggctgcagcagtgtgtgggggctgtgtgccccaagtactgttttctgatgtatcactgaattttacatagtgagaggaggcaagctgagcaaggtgttaaggtaaatgtccacacaagtgatacaggttgacccccccaaccaccacccctcccgccccccccctgttttccctctcccccccccccccggctcaagtggaggttccagcgattctaaaggagctggcaaacacagggacagggacttggcctcaaatgctgaccacttgttcatctgggggaccctttctcacaaggcttgagcgccctgatcgggatggaggtgtcttgcattcacattgaattttctcccttgcttggccccagggacaggctctgctgtgtccagaggctttaaggcacgtggacagagaaggtccgtcagtggacaaattcgctttaaattgtgtctgggacaacagaaactgttcagttcctctctctgactttgcttttgcttcaactaaactgagtcgcgactctaaacaaattcctttcacagatgtctgcctctgtgtacctgctgggaaacatgcgcactctctattcctcttcctctcttctgtggagtcgttgctctccttttccttaaagttccctgattgtttagcattaattcttctggtcataaaagggacgaatttctgtcccctctactcgtggccacagacattccctacctccgacctctccctccaaactaagttatagagtcggggctgcctttcaggaaggcaaactggtttcaggaaggaagactagcgctttgtcagagtcttagaactccggcttcccctaactctgctccgcccctccctcctctgcaatgccctcccttcttccggcccaccccttatttagctccgcccttctttcctagcgcagtgccccgcctctcacgcactcggcccttcccccggagcctgacgtcatggaaaggcggggtggagccatgtcctggacaccctatgcctgcaggccccaccctccatcaggaatgggatgtgccaccctggagcggtccctagcggcctgagggctctgatgactttgagctgttagcctcggtgaacaggtcctagactccgacatcagtaagagactacagagacatttctgtcttctcccnnnnnnnnnnnnnnnnnnnnnnnnnnnnnnnnnnnnnnnnnnnnnnnnnnnnnnnnnnnnnnnnnnnnnnnnnnnnnnnnnnnnnnnnnnnnnnnnnnnnnnnnnnnnnnnnnnnnnnnnnnnnnnnnnnnnnnnnnnnnnnnnnnnnnnnnnnnnnnnnnnnnnnnnnnnnnnnnnnnnnnnnnnnnnnnnnnnnnnnnnnnnnnnnnnnnnnnnnnnnnnnnnnnnnnnnnnnnnnnnnnnnnnnnnnnnnnnnnnnnnnnnnnnnnnnnnnnnnnnnnnncttctacactggtgaaagtggtttcaaaagtcagacgctttcttggctcttgcctgtgaaatgtgatttaaaacagtaacatttaacttttttttttttttttgaaacattcacatctgttgtgggttaattcagagaacgaaataaaaatccttgcagtcatccttggtaggtttttcctcatgcattgcttgtgtttattaccattcctaagcaattttaagtaaagccttgagttaccctgatagagaaaaatgtccatctcttatctccccctcccccaaacatcagttaaaagggaactagaacgttaaagatattcctcgggaaccattctatccacagcatctcaaagacccctggtgtctgccttcatgtggttaatcagtctgttttctgcgtggaggctgagaactgacatatttggcttgggggttgtcagactcaagacactgtaagacaagattagctcctctctaaattccaggagtgtaatacaccagacttaaaagagatcaaaggcaccgaagggatgaggggacccaggagatggctggcacattaggagatagtcttctttagcatccaggtatgttttaattttcacaaatggcaagattgcaatcaaaacgaacaacaggaacatgttgagagtcagtaagtgctgttttggaaaggaaccaaagctctaatccctagagaaagtgactagggactcccaggacagcctttcccatgcagacttaccctcagagtaatgcttgcctagggcttggccctggggatgcccccttcctgcatcctggctgcctgccccttttctccagcagagttgttgattgacacctgtgagcccttctggggtggcctcactctaaacacaggaaaccaccttcctggtaactgagtggcttagaatgagtctcctgtgaacaaaccttaccaaagctgtagctcagctctgttttgtttgtttgtttgtttgttgtttgtttgtttgattacaaaagggcaaatggggccaggttggtggctcactcctgtaaacccaacacgtgggaggctaagcaggaggatctacaccaacctgtgctacatagtaccttttggatgagtctgggctgcagagtgaaacagtttcaaaagcatattaccacataacaacaaaagcatacttaaatggagctggacccggtagtgcagctcagtggtagagtgtttgcccagcatgcctcagtccttgggttatatccccagcacacaccactacctaccacccataccccaacccctgctgcccaagtacggaattcaacctttcttacccagaccaagattggttatgataacaacgatgaccattttggtatcatttactgctagacacttttcctattcattgtcaatgtcccaagctcatgttacagatatagaagtccacaaggacacacacaggtcgacttgaagtcacacgagactaggaaaggacagccagaatgaacgctcagctgtgctctggagaccaatttccaacctccctcccactttagttgccctagctaggcagcgccctgtgagaggcctgcagcccggtgtctccatgcactgagtagaatggtgttcttgatgctgcctcagaagtgcctgctcgctcacctccgtggaattttatttgactttccctaggccactctgcctggttagtcaataaacaccactcacttgttgcttcttttgcaaagcctctccgactgaatacttttcatactgtggttaacatttagacaagtgtgaccagcgggcatgttctggagtgcaacacttctacctaaatgtagactctaccgttagccagaaatctgtctttttaaaagaattcatacacacacacacacacatgcacacatacaagatattatataaaaaacatagatgttgcatagtgatatagcaagtgatagtgtgtatgcatatatatatatacacatgtatacatatatacatgtatacataatgtacatatatacacacacacatatatatggaggtgacagtcctctgcctctcatctcaacccactgagtcagcatacaccatgcttcttccatggacagattacttaggcttgccaagattgcctctcatctttaacacaaagttgtttccctactttgaacaggactgaaagtgacctatggaacagcactatgttaatggtcaccatcctttggtggtataagtgtgttgtagcattagggctaccctaaattgcatctttgtcannnnnnnnnnnnnnnnnnnnnnnnnnnnnnnnttctgctcattctttttctgtttctctaggcctctccaggcctgttgcagctccacacccagagacctcaggtgactgagctgggcctagcagcacaggggtacacctcgagccacatccagggtgaactttgaagtttgggtgtgtctgaggttagcaagctaagaggacaggctgttggcaacctcaccctgctctctgctctgtggaggaagcctcaggaagttccacctgcttctttctcctgcacacgcacctcctcctgcctccttccccttgacacaaaggggtgtccccagccccgtggcatcttgcctgggttgctaataatagagaagggtgcatctgccagaggtaaagcagaaactgtccctgttctgctcttgcatgccaatcctggcacagtctagtaggctgggttggtcaatacccttgtgagcagaataagtctttgtgtgtcctggaaactctttctgtccccttcctggggggtcagagcaccagagagaaggttgatggggatgtctttgtccttgagatcctggccaaacagatctagactttcagctcagcaccgagctggagctggtatgctgcccaccacaggcccagctgccggagtggggagagggttctaggaaatgacctttacgctcatctaaaaggcaatgcggtaaggttgcccacgttcttttcatgactcaaaacccaaaataagtgaaaagagaacgtggaaagtgtcccatctttcctgttgtgcttacagctgtctgaatcaacagtctgtttatgcgagttgcttggagaagttgatttagaagtcaaggccacttctgggcagctactctggtctctccaccccaccccttttggcttttctgaaatggagtctcactgtcgaccaagccagcctctgttaaccatcttcctggatgagccttctgaatgctggggttacagatgtaaacctcagcaccccaaagtccttttaagtcaaagaatgatataaatcctttaacaaatcagaataaaatactctcaggtttctgggctcttctccatctcaggagcttgaacttggagtgtatcttgtggtttgtaaagcaccttcatatctcctttcttactcggttgccataacaacctgggatggggcagggcttgccttgttatccctgttttgcagatgaggaagtcaaggttgtcagaaagttgagctgcttttcaggctcaccaggggagtcagagtagcgggtggaaagggtaatagaatccaacctccaactggagtagtagggtggtgtcccagacccaagatccctttcaaccattgtattaaagaattagaagagtcttcagagtgtcaggacctgtggtgtagtgggaactctgggattttggtttctttaaaaagcacagaactatgataagaacatgttttcattttaacccaaggtgtgggtcatggggctgcttcagattgcccacagctgactatgatttgcctcgtgctctagcaggggtgtgattttgccagctcagatagtttctacgattgtgtggtcttcgggattctggggacttttcagagggtctataaatgctagagttcctgggggggcgggggcagggtgggttggtaatgctgggttcagtcattgtcagtcaccatttgttaagtagtcatgtgttaaaaactgaaacaataacaagaaaataattaggtctcctgatggcaaagatcaaacttgcccccacccaactggaagcccctcatcagctggaagtagtctaacggtaacattgcctccctttccaactgggactttattcggggatctcttcctttcccctctatcctttttactctcctacttagagttaggagggattaaagggtgaaagaaaagaggtagagaagggtagaagaaagaagaacccacaaagtagcaaaaaccggctacatggtggttcaaacaaactgccactttttgcttccttagaatttaccagtaatattgaaaccaagatggctgactcactatgccaaacttagcctgtacagtgctaaagtgaaatgaaatagaatggggttatctgtgattgcattttttttctggattgctttagacatcaggatctccctgcaggtaattctgagttagaaggttctgtgtaaggcatcacacggcagccagatgttcattttactacatggaaaactggggccaccctgaccctctgagcaggcaaatcagtcattgaggacactgcctttggattgtagagaatatgggcgtggaggactgaggctccgaagtttagtttggctcctccctctgttcctcggacttgttattcttgacaccttaggatactccagcaaaacttcagatgggccaaagagggtgccctagactggagtggaggggagccaagtcaggactttgaaaggctctgaacagattttaatgtgtgaaagttgacacacagtaggtagaggcccccagagctcctcctgcttgccaccaccctgtatgattctcatagcaacacaggtgtgtaggcccaacagagattgctcctgctggtgcagaggaagtcgggaccaagatgttttctcaagttccatagttaaggatggcactggagctccggttggtcggctgttctacctcttgttcaatgttccctccactatgccacccaacctccttccttcctcctcccgacagctcccagaggctcctggccattgcttgccaatggtgaaggaagtcagaatgacaactctctcagggctgaaatgtttctgaaagaaaaaagggggggcttgtatgtagtagtgatccactggttttggggttactgtggccaggggagctctggtgcaagtctttccaggtgcggcttctgctgtcaggctgctgatggaaagtgctaagtgttccaatttcctgtgtcaagcaagtatttccccttggggttacagtagctaccttcctcctcagcacccaagggggcggtgagcatgagccctggctgctgcagagagcaccctggcttcctttttttttttttttttttttttgaaggggcatagagttttgacagttaccagcagtggccttagaaacagcaaatcctccaaagtgactgacagttctcccaagcatccttgccctctgctttgtggagaaggaacaagccagagtcaccgtagcagcgaagcagagttcttagctgctgggggagacactgcagccaagtgcatgtgggtaaataggaaagtcacagacttggaacaccatcaagaatgaaccagaatagacactacaatcattgttctgaatgtggggcaggagcagaggagctcttgctcgatgggcaggtaccgagcaaaggaggcacgaaggatgggaagtgggtgggagatgcaagcctagggcagccgagacgttgaaagagtcacattatggatatttgagaaacacattcctgttttaaaagtctcttgctggggtggggtgacaagagcttctttgaaagctacccggctctttagaaatgtcaagtcagaggagttctgttatctgaaaactgtggggtgaagctagcgactcccagacaactgaagccaagtggaagatggaggggcagggaaccaaatggcaataaagcatccctgccctgtcccctacacacgctgtcactgagccaaggaggaaacacgtcaagacacactttgtgtttcacctaacccttattcacccttcagcagaacaatgagtgtaagggccacggagccttggagaccaagatgtccctgaggactaggtgggagtttcctacagctctctgacagattctcaagacatccagatatagatatccatgccccagcaggcttccgggtggttagatagcaaagcagaaaggccaagaaatgtaaatagcttgtgtcatgtgtgcatgcatgggtatgtgcgtgcgtgcgtgcgtgcgtgcgtgcgtgcgtgtgtgtgttgatgtatatcagtactatattgtatgtacctatattatagatataaatatacactacatacaatatctatttctacagcacaaatgtgtatatgataacagatacccgtagtgtattagctaccttctcatcgtgataaaacacctgactaaagcagcttaaggaagggaaggttggattttggctcacagttcaagggtggcgaggtcatggcagcaggacagggtgccagctggtctctttgctcccaccgccaggatgcagggggaggtgaatgtagtgctcaacttttttttttctattttttttaaagatttatgtagctgtcttcagacactccagaagagggagtcagatctcattacggatggttgtgagccaccatgtggttgctgggacttgaactcgggaccttcggaagagcagtcgggtgctcttacccactgagccatctcaccagcccgtgctcaactttttattcagtatggaactccagccagtgaaatggcatactgcccctacatttggggtgggttagcccattgaagagcttcctcatagacagagccacagctttacctctgaggttgttaaggtgacgatcaatattcacggtcacaaaaagatgctatgtctggctctgtatcattcctgtatgtaagtctgtattttatgttaatcctgctccaacttcagaatatattggcactgtgtctgcaccatctactccggctacgccgtatccaaaggtttccacacatcctgagattttcccaagggaacacaaatggttgcgtacaaatctactttttcctcagaagcatctcaacattacataatttctcatcatcactgtgaccacaggttggtacttggctagattttagtgccaccacctggctgctgtggttgtctttagctccagtccctggtgttggctttccttaaaccccttaaaccgtctccactcctaggcagggaagaacttttgaaccatggtccagcccttctattttaaaagggactctgtagaggagtgtctgtgtgtgtttggtatgatgtaaaacatgctcattaacaggataatggctttgtggggtcacaattctgggtgtggtcggagtttttgttttgttttgttttaatgactaaaattggggtccgggagtcaagtgcagggtctccccatcctgttcctccagatctgcccacatccacagctgccctgggagctgctatgggcaaacaatgaggagtcacaccagccaggtgaacagagaccattgctcctaagacaagatccagactcatccagatacacccctaattgctgttccttcctactgctgccggtgagctcatctctggcacaagaagacatggctctttctctgttaacagcaggaatcttgtctcaacagggaccatacctcctggttggagtgggactttaaagtagcttgtggtccctcctcccactaaaagacagtctcagcttaaagtgagaagtgggggtctcaaatgtatgtagtcttctcctctcacttggacaattacaatgccctcaaattccatctttgctgtcttcacccttcctcattggcttttctcaggtcaactcttcataataaaacagtgcggcttagaatactgcttgcttagaatttaccaaggcttcccaccctgtatgaagccctaaaatcctaactcagaacagcctggaaagctctgtagggaccagcctagctttatcactctctgccctcctctccggcatgcccagccccacagcctctgcagaaaaggtactgcaaaggccacacccctctcccctaccgccaggccgcctcctgtgttcccaccctgcctttagcaatctccagaatgcatgccaccacctatgcaacatgtatttgtatggtcttcctccacctagaatggaagctacttctaggtaccgtctttgtgccccacctccaaaatagcagtgcactcaagtactttttcaaaactaaatgaatggtggggcagtggtggtgcatgcttttaatcccagtacttgggagacagaggcaggcagactctgagttcaaggccagcctgctctacagagtgagtttcaggacagccagggctacgcagagaaaccctgtctcaaaaacaaacaaataaacacctaaatgaatgaattcattagcaatggcatttagttagtgcttttataaggcatcgtgtgggtagcctgttggaaatcatgaccccccactcttagtgggttcatcttctctttgtggaggttttcttcagtacatgtcatctttacttctgttcttgacttttttttaagatttttttttaatgtttatgagggttttgtatgtctgtgtaccacgtgtgtgcctggtgccctcagaggctgaaaaagggcatcagagcccctggaactggagttatagatggtgtgagcctctgcgtgtgctcggatctgaacccgagtcttctgaagagcagcaagtactcttaacagcgcagccatttctccagcctcctggcttggtttgatactaagaaggcccccaccaaactattatagctatcttccatcaaattggcccctcatcaatgtccctaggcttctggggttccctggagttttcatagagcaggcatcctatacggagaacaggtttggtcttgatcttccttatgagaccaacacagaggtaaaggaagtccagtgtctctcccagaggaagggccctgttgaaggagactgtgttcttagatcagacacaggaagaggcacaaaagaactgggtaagatagtactgcagcttgcccatgtgatctttctctctctctctctctctctctctctctgagtgtatgtgtttgtatgtatacatacatgtatatttaactgtaataaaagtaagctaaccacttactatagtataatactgtacttagtatagaaactgaataaataacaagaaagtagtggcagggagatggcttagtggttaagagcacttgctgttttactgagcacttgctgaggacccaggttcagttctcagcaacaacaagacagcttataatcatgtgtaactgtagttccaagggacctggtgccttctctggcttccaagggcaccaggcatgcatacagcataaatacatacatacacacaggtaaaactccatacatgtaaataaaaagtaaaatgtgccattgtagtgctaccatcgaacacagaccctgtggatcatgatggtcattagtattctctgaggggggcaaggtctcagtgtgacaccctggctggcctgcagctcactgtctagaccaggctgtcttcaaacacagaggtctacctgcttaaaggtatgtggcacacacctggcttctgttgccttattaataagtcagtttagattccaactaactcagaaaggaaagctggcagcttatttgcatgcagtaggatagaatataagaagagaagtcagaccaaaagggtcagagagtttactgagatcggtgtaaaatcacagtgcataaatgtttacttagtatcaatggctgtgtttctttgaagccatttaaagcccatccttttgggggcagggcccgtagagcacatctctaacatacgtaaataaccctagcagtgaaccgcagcactgcaaaaagaaacaaagtattttaccacttagcctcctctgcaccccaccagcctaatagtatagcaacaactttcatgtagctttttagtcttcagagtagaggaccaaataatcaattagttcactgatcaactaaatcctgtgcggatgtacctccagagttatttaatcatttctccattgttggatgctgggttattttcaatactattgttactagaaacaatggcttcattaacatttttgtgtttgtaactttttccgtattttagagtgcttccttaagtagatttccagaggttaaaaaaaaagtaaatgaaaggttgagacatttttagagccctagaaacatattcctgagctgtgtttccagaagatcgcgtgccttttgggagcatgtctcaatagtgtgtcggtccgggttccattgtacagctcatctttattatgttttttttttaacttttgatagtttgatagacaagtgacatattgctttcattgtatacatacatatatgtatatatgttgggttatacgtacacaggttgtctgttggcatcttgaagtcttgcttgagtcctttacatacaaagcctgttacatcttcaatcatgctgtggtttataaaaggttttctccaacttatttgactcatgcttttgacacgtgggcaattttaccttgtgtgtagtgaagttcccagccatttcctgtgtcatttacttaaagacagtagtccaagttgtttggcatgctggcccagccttaggagatttgagcttagctgtcagaaagcgtcctcttttccccagaagccagtggtgtttctagcatatatacctccagacatatattttttaaaaaataacaaaaccagcaactcattatttctgtaatgacaaaaattatcttcagcaattaatgaaccaattatactaggaaagaaatacagagagtaaagcctatgctaattaattttgtgtatatgatcatgcatattttaaaaattcagagtaattaatggtttaaactcttgctaattacattatccttattttggaaactgggaaacattctacttatggagtggtttgtagcagacacaaaagaaacgttatagtttctgggtttgagacttctacaaacttaatcagatttcacaaaaatggctcttctgtgtgtattgttgatcttgcttttctctgagttagtcaatcacactttccattcatattcatttcaaaaagggtgttttttttttcactcaaagcaacagacacctgactgcatgagaaaaatgtaacctaaagtcacacacacacacacacacacacacacacacacacacacacacagactcattacagttgaattctagaagtcatggtgccttccttgtctttagttcatcaggattatttatcaaatgtgctattgacttgtttgtttgtggtgtgtgtgtatgtgtgtgtgtgtgtaccactgtgtgtagaaattgtgatgtgatgtgatatgatgtggtgtggtgtgtgtgtgtgtgtgtgtgtgtgtgtgtggtacaccactgagtacatgtgtggaagttgaagttgggatgtctttcccgtttgcttttccgccttagtctttgagagagaatctcagtgactctggggcacgctgttttggctgggctgactgactgactgactgacccctgagctctgggtgtccaccctgtctcttggcctgtgcttccgccctcagcttttacatggggcctagagatccaaactcaggttctcctacacacatcacgaacactttagctcctttcccagcctctgttatcatgctttaaacacaagctaaagccctgagtggttgcctcaaacggtaagatggaggggatggggctccatttccatgcttttacaattccagacccaacttctagactgggcatgaagctcagggacatgcaatcacccgaagcttggggacaagccagcccacagtgagctctgctgaaagagatgtggggtgctccttccatgtgtgtctaggtcttgctttacaaccagagttctctgaacaagcacctgtgtcgactatgatacttgtgagaggcaggcggtatctctctgtgtatttgacacttatgtgcggtattgaaagtctagggccagccgtgcatagctcggttgtagagcatgagccacgcagcgctagctttgctcatgctttctctaagcccgaagcccaccttcttctgccttccctctgccccttgtgctgctttcctctcttggctcttaaagatgcagaaactccatctttcccaaaaaaacttcctttatttcccccctcccaaagcaatgcccccttatctgtgccttcctctttataaagctggttggcatccttgtcatgttccattatcaggcctgtgctcatctactctgggcttcatactccctgggcttaagcctgaagccagaacacagtggggcaccatagtggatctatgtggtattggttgtatcaggtaaaacagagcaaagggagggagggaaggagggagggaggggcgataacaagccggagcccctggtcccaggacaaagggagatagcaaggctgtcactgccagaaaggggctagctggacaaggggagagcctggtcagaccggcttgttctcactcagtctggatctttctaaaaccccataaaggaagctagttcaggctaagagtagagagcatgggtgagtgtctgcccaggtcctgatgcagagctgtgactctagaagtaagctcctatccagcctgggatacctttctgtctagctctttttgtcctaatgttcatcttacatctggaagagcattgtggatctgcttttctcatttgcctggccctggccatccctgccctgggtctatgggagaaaatagcccagccttgatgtcgacagccaggaacaaacagcattgaggtcatagaatacagatagatagttgattggggccagcgacttccagattaactataggatagcaatcttggcttttgtccacctctacctctaggggctaggctggtgtcttaatctctgtttccatgtgaccatctcatgccaggacttaaaggctcctcctctggttcttagttcccaggaacacaagaagcatcattctggtctaggaatctcagtttgcttcctgccagactccttcagaactggttatagatactgaacaggattccctttttgccttctcagccaggagccaggtcttggaggctcgtgctacttagttctgcattcatccattagctctcaactctgggaaggaagtgtgttaccagggcctggggtcctgccctccggaactgttgctataggaaatgatgctcataataaaaccagacctgaatgagctctaagcaggtgacaaagggattgtggactgtgtgtgatatgtaaatcttgcaaggagaagccatttaccggggtggctcagagggaaatgggcaggacctgggaaggtgaaagtggacaggttgaggggcaccatttaaacagtaaatcactgtcctccaagtgacataggttattgccaccagacgggctgccccagaaccagcaatatggcacatctgggcaaacaccagtaggccagttttgcagagagagaggacatggaggatgggaactcaggagagtccccaggcagagcttggtctctgtttgcgagggtttgacgaagctgggctttgtgtaagagagaggagcgtatggaatgagtgggatccggtgtccttggccctaggcctaggaaagcagtgtgaactgggtacccaatccaggcaccaggtgtacttggcaagatccaaaacctcagctctactttctaccttcctgggtgacgtcacctctgaggcttccggtgtgtttgttcccctgtcctcaccctagttactaatccaatccaagaggctggctctgtgtgtgtcttagtctctgtacccatgtgaccacacgtcacccagctggtagagtggtactcagttcctcaaacccttctcttgcttttcttccttatcctctctatagaatatgagccatgcatgtcaatcattttcttctctttacagacggagaaagagacaactctgtgtttgaggtctgggtctttgggctttctttggcgcgtttatagttggtcgcctgttaatgtagatactgtcatgggccaggctggtggtgataggttaaaatttgacccccatcccaagctgccactattcaatcccaggctgccaggactgcagactcagtgtgtcaaagaagcattggacttttgtttgaaatctcatttacaatttttggcaactgatttagaaaaaagtggtgggggcgggggtggggctatagctgaaccaagttaagtctgatggtcactgggagggaagctctgtcccatgtcacctggtcactggtcactaatagggtctccttctgggtctttgagcaagcatggagagggtgtctgtttctctggcctttgtgttagggaaaaggaaagagctaagcttggggaaagggaagcggaagcggcttgtgggtgctctgtgcatccagcccagctgccccgttcccagagcacatactttccgttttcctcgtcgctcatcctgaattctggaatcttctggtagttagtttatccactcgcttcctttttccgaagattgaaatgacgactgcttgaaactattttcctctggttgggtttttccttggtgacctcactcagagacagatgtgcctaataataacaacatcaaaagttaaggagaataaatcaaccagctggtctgttccctagaagagatgctgcagttcctaaatatgggctgtccccagagacattgagggggcccagcttacccaacagggctctcgtcactgcgggaggatggaggtcctgggacactttgttcaccctctgccattctcaggctccaagggttcagaagatgctccacccccaccctgggacaagcagccttcccagacagacagcaggtggacatctacaaggacatccctctccctaggtcctcaaaggcagtatgcatttcagccctgcctccgggaactgggcctgcacccagtctgcaaagaaggtctttgggttgagatccttagcttggaggatcctcggctccggtgtcattccttggcctctgccattctcagagtttcattcccctacccagtgagaaagagctgtgatagtctacgagaatcgagaatcgggaaccttctgtaagcgtcgcagatgagaaggggactcttgtgtgcaccaagtactctgtctccctctgggtagtgacacataggagtgttgccgccgtgtttattggtttcgttctctgatggtcttgagatgcttggtggagtctcaacaaacaaaggttaagtccctgtaaccaaaggcaaaaagtgaaggaaccactgagtgcccctgctctattgagtgggaaaccccactccccacttccgtggacatacaggctgccagggtgacgggttgagcatgattccagttctgtcaccttggggacactagcagaggtagaatatgtccctgtttgcaacctctgaaagagagaggcaagtatgctatctctgggatggccccgtgggatcctcataccgcagcgtagaacgggctaagtaagagcccactgccaccaccgggggccccacggtgacagatacaggaggaccagtgatgagtcagactatttatgaaagtcacacatcctcatagacgtcaggatgaccctggcctcaagttctgagggtgacgaatcttgctcgtacttgggggttcactggtgtgcctttttggcaacccgtttcctgtgcctcgcctccagcggtctgcacgtgaacaggagcatggccgctgaactctcaagaccgggaacagcctgtcagaagagggaaactgggtgactcacggcccagtcgggagctgcaagtcagcttctgccaggacggggctgcagaagtgtcttcagaaggcggaaagggtttctggtgctcaggaggtctgcactgtgttacagagtgcccttagccacgggcaactcagcgctacctctcagaaatatgaattgctccagtgtgccttgcttggaaataattttctaaatatagctgtgggatccgcctgtaagcccttcctcaaaagtttccttgttagaaattcctgaggtgggagttccctgcgctcagccctgtcccttctgtgtgtccacctgtgtccatggcatttgcactaggagcctggaacttctctgcctccgtggctctgagcgtgagtgctacagaggccgtttcagaagcaactttccttctgcaagctgcttgtgaaaggggggcaaaggtgacctttgagctccttctgctttctgtggcgaacttcctttcagatgcctggctttctaaaatgtcatcttccagccaggaaaaagcagtgtgtgtgtgtgtgtgtgtgtgtgtgtgtgtgtgtgtgtgtgtgtgtgtgtgtgtgtgcgcgcgcgcgcgcgccttctgcctcaggaacaacagagcagaggtgctcacagtaaccctccccagggcgccctggcttgggatgggactagaaggcctctggtggcctctctgctagactcgtggatctgactatcctgtgaagactcacagatgctcagaaatggctcaggtgattcttctggcagagaatctgactggtcctctttgtctctgtcctcctggaaaggtgggattcaggctgagggccagggtggaggaagagggtgtcaggtcctgctgttgaccaagctgcccttcctcagcatcatctcctgcaggcttgtgctgttggggctgagagagcagacagaacttggaagaggttcagtgtttctgactgtagcaagcctcgcccaagcaaagttggatttaactttgagaacaacctgttgtcatcgtcagctggtggtgttggccgagtggtatttccatgtcacaaggatggagaaaactgaagctcagagaggtttggtatcctgcccaggaccttcaggcaggactaacaggagccgagctcaagttcatctggctataaagtcacatgttacaaatgacaaaggagatagcctagctgaatgatgcagacctgggactctcaacaggctttctccttaccatctctagcaccttcggcaaattgtctaatctctgtgtgtctcagtgttcacatctgtaaaatgggatcatgagagcacctccatgacaagttagcatacattcactgtacctatcaaatgcttagcactgcatctacctgtccaaagtccttagtacacaagctggttaccactgtttccatgtgctggggctctgccctacctaccctgcagtccctcaggcggaggaggaggaactgagcactctggcccctaactctgtaaagttctccttaggcagtgtgttgggagtggccccctcacccatcttgtctgagagataatccctaagactgagtgctgggccgattgtctgctgcccagagagggccctcagtaaatttccatctaccagaaactcaaccttgtttttttgcatttaccaaagtaaaaataaaatctctggggagacagggagggagggggcctggggagggttgtgggacagccgcagtgcctggctctctttcccagacaaagctaaatgtcccctgttctctgcctttttccatgaggaagtgtccaggagaggcccaccccacccccctcggctcttcctggtggccactcccagcttccgactattgttacctccctctcagccttgtgagttggagggaggctgaggcgggccagctcctggtgcaggcatgggctctgtgtggtcaggcatttccccatctgccacctcctcctcctcctcctcctcctcctcttcctcctcctcctcttcactgctgtcatttttagttctggaaggaggagagaagccaagcggtgaccttcacatcagagacagcgattgctgggccacctggcagggaaacccaggaacatgaagggcacctcagctctcgggcagtaaaaacaaagactggtttgcagggatggcagtcccctttggcagcagctcaggaaagtcaggcttgggggagaagaattacctgaagcaaggtctctagtgcaagatctttctttgctgtggtccctagagtcccagctacatgcgatggctgtccgtgaaaacatccaaagtcccagagcaagagggaaagagaagaaagtagcccagaccccagacctttccagtcacgagtgttttggataagggagatagacagatgagggacaggaagatggcatgtcctgcagggtctcaggcacacagagagtggggtgtgaagtgagtgggggaggggagtatccacagtggccccgaggctatgctgggaccctctttctctgtgggtgtttagggagccacggtggcactccacggcggcaggcctgtccttgccagctgtgtccagggcctttctccagggttctggctgataagaggaagagcggtttgtggagcatcccggggaacagtctggatacagcctttggtgtagcaactgagccttaagttacaacagaaaaaaaaaaaaaaggcagctaggcaggccggaccttctggggagccacacaaaaaaaggctttctgtctgcccaaaaggtgctgcttaggagaatggtgacagacagctaccccctcagcaaggcgatgccttccatgcctgagcaatcaggggttggtcctgatgaagaacaaccatcctggatctcctgttccaggccggcaacagattctgaaggagatacagagtatccctctcccaacaataacattgacctagacgcctaacttcttctcctgatgggtcacaaacagccaaaccacagggacactaaaaatgctctgtaagatcaccttggggctatgtggatgccgggtggattgaaacaaggagtttcacgtgtagacttgggtccagtctttaaaagctacaacatggtgtgtgtgcacacactctaagacctggaaaaaagtctaaagcatttctggccccagatatttcgcataaggcgcgctcagccttcctggactcacctgtgtgtgcctcagctctcttcctaatcccaccctgctcaggcgattctttaaaaaacggctccaggctgccccctggtgggcacaaagcaagggctgggtgggaaggcggggcaaaacaaaagaggtttcttcgacaggtttgaaagtcttgcttgttaaaggaggaggtggtcagtctcgagtacagccttgcttttaggtgtagctaccggccttaccaatggtgggactttctttctcaggccttctgtcctctcggagcgcaacacgctgacctttgtggcaggcacggtttctaagcaggctccaggaaggggcattgagtgccctacctgcctgggcctgcaccacaccgccctcccggggcctctgccagaagagcacaatgaacaaagttggccacaaggcctgggagaagcaccaggcttttccccagagagggcgggcaccgatcactagggaaaccctagctgcttttatggaaagaccaaaagaaaaagaagctaagaagaaggcatttttttcccaaacatggtgaacgcaatgactttgtccgacttttgcaagagggagcagaaggtctaacccagagtgagccctttcctgtccactttttgtccagtgtgccttccccaagtgtgtgtcagccaggaccttctgggaaaagcctgggactcagagggaggggagggcaggtctcttcaggcctcccccatctgaaaggtcagtcttgtgacaaagtgacaaagtgttcgctgtctatgtgaggctgttttatagctaagggagagacgagaggggccctgggcatcctgttggctgaaacaaaatcttcagaattaaatggcagagagctggaagccgtgcaacttggagcaacactaatgcctctgaacaaaatggaaataagtatgtcagcgctgtgaggctccattgacgacagcaccatacctagcaacgccacagacactgaacctctgatttgcctgagatttccctgtgcgggcacacgaacctcgcgcatgctcagtccagcattagcctgacaggcttttaggatcgtcgaaggacagtgatatttcacagttacttccccctcatcactcttaccctagaaaggggggagcaggagagagggggttttttttctttaaaactatctaaaaataaaagcagagttatcaaatcattgaaataagagagagtgctggaaggaaagtagtaagttggaggaacgggtctggcggaaagggactttcccagagtctagcctcttcgtggagttgattttgttggcccacaaaatatgtgcccccacccctctctaggtgatgtcagccatttgggaatctgctttcatagagtggctggaccaatggttctcaacctgtgggtctcaacccccttggaaggagttgaaagacctttttgcaggggtcacctaagaccatcctgcatatcagacatttacgttataattcataacagcaaagttagagttatgaagcagcaacaaaaaaataattgtatggttggggatcgccaccgcatgaggaactgtattaaaaggtcatatgaggaaggttgagagccactggtgtagacagaagcaggtgaagcccctgggctcctggggctcccactatgtggtcaggacctagcacggtggccctggaggtggtgcttcataaataaccaatcacacgctggctcagctcatggccaccccacttgccctctggccctttggaaatgcctggtggattatcgccagcactctgtctggagggaaactaaaacaaacaaaaagaatcagaagtcaagacaaagtgagtatttatggctcgcctgaacttggccatgtgcggagcagagcacgtggtgggaggttggtctgtatcaccggggattccacaggccctcaggggacccagttataggacctggtttaaccgcagtgagacctggaagaacagtggctccttctcaccccaaagcttggtggctctaagctccatcagtctgttgctgtaggatctagggagtgtttagatatttggcctcaggagacagcatatttcttccattgttcactcatggggtggtgagtcctgaacctgcagaggctccatcaagcaggtgctggaaggagggcaggctggcagtcaaggatccaccagggactgcagtggctctctccaggagatctgtcctgcggtaacacatgttgtgtcaagcctgaagccagaggctcttgacagccatggtgaaccttgcagcagaggccatacctgcttggccttggaaaggtcatactaggctaccctccctgcctggacattcctaccacatttgaaacaaggggcccttcaattccattttgtgccaggcccttgctgataactactgcactgtgaaagtaggaaagaggcccttgtccccacaccctgcctcctctcatccctgatcctgtcattcctcttccaaccactttgcagaagacacaagccatgactccttcctctttgtttaagtcactacatccctgtaaaatatctgtagatgcccgaagggaaaggccaccagagagtggcatgccctggaaactgtccacctcccccgaagcctacacaaacacagagtcagaccctaccgaggcttcctcccatgggcagagccagggcagaggtgtgccctccgaacagtgggtcatttctactgaaagacaagggtgctaaggtagggagtggcatgtccccagggggccttgtgtcctgggaatagaagctcaagtttcttctgaggcagcagctcatggggaaaaggaaaaggaaaaggtgggtcaggctatggctgccctgagctccaagctgctcccccacctcctgctggcagatctggtggcccgtggtttagcatggcatggaactgccctgctggtagcacttgctctctgtttctctgtctctgtctctctgtctctctctctctctctctccctccctcccttccagatacctcaggtgcaaagaaggttggtgttgtgtgccttctgtgttattttctttgtttgttttattttccctcttcccacctcaaatccctctcccacactctggctattttagcaaagccaggtccggtgcaagctgtgaggctgcccaaagtcgcttcagcagcttcggcaatttcaaatctcggtggctttcaacagctcttgtgcatcttagggttttaaaaaccacattccccaacgtgacttttctctgatcctttgatccaaatttagccagatgagtcaggaggaccctcccatcccttgcacaaccccaaggtctagctgagtgagaaatgatcttacctgtgtgtggacgcagaacaaggctggaccaaggctggtttgattgaggatgtcaatccagggattggttcagctcatcacttaaggcactgcctggaggctttgcccgtgacttgttagttggcttaagcaactgccttgaagttagagtggaagccctgagtccccagcagtccctgcatcctccctctttctggtggacacagctttattagtggtgctctccttactgtccacagggagcttccgtgtacattacacacacacaaatccctccagagcccacaagcacatgccagctctgattccacccagcagagtataagctttgtgtcacctggtgaccgtgctggaagggtcccagccccagtacaggcatcatcaaggtttggtggcaactagaggcatgttacaatggctctgggctccccagctaagggaacagccagaacaccccaaaagccagagccctggctgctcagggagatgtctcctttgtgtttgtcgcccgtccccaaaactagctatcaaacacctagacaagagcagccatggaaggggccctctccgtggacagatgcagaagttagattgcaggttctcattgtgctctggtctgaccagcaggggagagaatgaactagaagagcagcggtcttcagacttcctaacactgccgcccttccatacagctccccatgttgtagtgacccctaaccataaaattatttttttgctacctcatatctgtgattttgctactgtaatgaatcataatgtaaatatcagtgtttcctggttgtcttgggcaccgcctgtgaaagggtcatttgaccccaaaggagtcgctgctcccaggttgctggactaggggcaaagacttgctgaagctggtatgcttcatctgtaaaacagattaaaatgttcctgtcaccgtcaggctttgaaggtcgtcggcacaggccacaggaccccagcctgtcacaagcacttatacagcaaacactgtgctggctgcagctggtgcctgtgttggcatggctgctgacatgagttctgccatccactacttggtggtgtgagtgtgtgtgtgtgtgtgtgtgtgttttaggggtttcccactgtatcatttgagctagactcaaacttttgagctcttgtgacccttctgagtagatgggagtaaaggtgtgtgcccccccccacctggtactcagcagtcacaggtgtgtgccccccccacctggtactcagcagtcacaggtgtgtgccctccccacctggtactcagcagtcacaggtgtgtgcctccccacctgatactcagcagtcacaggtgtgtgccctccccacctggtactcagcagtcacatgtatgtgactccccacctggtactcagcagtgacaggtgtgtgccctccccacctgatactcagcagtcacaggtgtgtgccctcccacctggtactcagcagtgacatgtgtgtgccctccccacctggtactcagcagtcacaggtgtgtgcccccacacacacctgatactcagcagtcacaggtgtgtgccctccccacctggtactcagcagtcacaggtgtgtgcctccccacctgatactcagcagtcacaggtgtgtgccccccccccacctgatactcagcagtcacagatgtgtgccctccccacccggtactcagcagtcacaggtgtgtgactccccacctgatactcagcagtcacaggtgtgtacccccccccacctggtactcagcagtgacaggtatgtgccctcctcacctggtactcaacagtcacaggtgtgtgccctccctacctggtactcagcagtcacaggtgtgtgccctcccacctgatactcagcagttatctataaatggcctttctgtggagtgcttcctcattaatgctcatttaccataacatctacaaataaaatgtgcggcaacaccttgctgctgggtgacagtgacccctctagactgagatcacttgctttggtacaaaaggtcattttccttgtgagcttgtttgaactggtttatgtctgtcactcagagtgctctgtttgctgtcttccagagcaagtcatggagaaagataaagaacatggtgcagtggtccccctttgtcatgtccttcaagaagaagtacccctggatccagctggcaggacatgcaggtagtacactctgttctcctagagaggtaccaggtgaatgtgggtggatgctccaggagagggcagccctggaacagaccctggcagaaggtgttatccttacactgcctgtaagtgcctgtagacagttgtcctttccaaagttcttgacacattatccccaagactacacctaccccagccccagcccaacctcacttccagtctcatcgataaaacttctttatcgatcagttctttataacttgtttgccctttctaatcctggacaaagggattaagctaagccacttcagcgtgcggccactgtgtgtgcctacatcgccctgttctgggggctgtactgtcagcagagatggagtctctaccaggaaggaacttgaactggagggagatgtgaccaagtcaccccatagccaccaaggtgctggcaaggtcatctagccaccatatgaagccctttttcttgcactgtcctctgggaatacctccatagccaccccagatttggtccttgtgacttcaccgacctgcaggttcttcacagggcaacacagacttagaccaagacgtagatagacaccctttcttaatactccctgacggaataactgaaggagcactacccaggtggcctgtgcattggacacactcttttagcccactctgcgccctgtgtggcactgggctttttttcctaagactcagcaacacctgcttcattaagaggtagaggtggggtgcttgttataatactgaggggtggatagaactataccagggttgtagtcagtggatgagtggccagaactcaaagccttaaggggcttgtctacaaatggccacacctcaaccctcaggtcagccatagctgtaacatctcatctggggtggggttgggaggagggagtggtgtcagatgcagcttctaagggactgttacaaggtgacggggtccctgatgcctctggcttccgctgaggctagaggtccttctcctacttactccacagggagcttcaaggcagctgcaaatggccgcatccttaagaagcactgtgagtctgagcagcgctgcctggaccggttaatggcggatgtgctgagacccttcgtgccagcctaccatggggacgtggtgaaggatggggaacgctacaaccagatggacgacctgctggctgacttcgattcgccctgcgtgatggactgcaagatgggtgtcaggtgagccaggctttttgcaggtgtgccccgcccccatcctgcctggctgtacagaggacacttggaagctggccccactctgccaagagcctcttctcctcgaggcagccctggctggatgctgaggctgttggggagcagacagaggagatgcacactagtcaggtgggaggtgaatagccatcagggaggaagcaagacaatgacctcctggtacaggggaatagagagggagcacagaactggcttgtagcatatgctggtttcaaaaaaagaaaagaaaacagatctgacactagggtacagctaagagtggagctacagaggcccctgcagcaggtagaagataggcctgaggtgattccagaccttgccaggagctccaagcctatgctaagctccacagtctggagggccagagagcctcaggcagaagtggacaccatccctaccttttggctgtccacctttcaggcttccagcatggcatgacgagcccagagaacctaattttggctgcagacatgcacactagacagtggactgagctcagagctggtgcctaaatctgacttgaatagcctgactgagctatttcttcagcacatgggcaggtgcatatgagtgtgtgtttttatgcatgcgtgtgcatgtggaggctagaggtttgttcagttcctctggaactgacgaacttgttttattaaaacatcattcatggctggagagatggctcggtggttaagagcactagctgttcttccagagaacccaggttcaattcccagcactcacgtggcggctcacaactgtctgtaactccagctccagaggatatgataccttcacacagacatacatgcaggcaaaacaccaatgcacataaagtagaaataaataaatcttttttttaagacctcagcttctctgattagggggctgggtggccatgcagcctcaggtctccacccgcctagtgctcggaggacaggcacacaccaccatgttctatgatagtgtggtcctcaagtctgtgccaagcactttaccaactgagctatctcccctgtccctcgcatatagtgtcttttatatgaagatggcaaggaggaagggagagcccagtgtactcggattacaccaatcatcttccttctttccttctcatccctcctaggagttctgtgtccatatcagcccctggcaactggccaagaccagtccccttgctcttatcccgagagtagggatggatggggtcatggagcaatacagggcctgctattggctcctctccaccactcgccacctcctcctagttccaaggccctggatgtcttggctcccagggagaaagcagaatgtccctgtaactaccatacagccttggatctctggatatcttatttttgtctctagaaaattctttccacaatgcactagaatatgcccactcaagcagaggccctgcccttcctcccaacattaggaagacggggactcagtctgcctgcaggagaaggaggtgggcacaagcatagccccactaggcattcttgcaggtgcccagaccagtgcaattacacaaagtcagctctgccttgcctccagccttgtgtgctccctagaaagatgcaggaatggggcacccactcccctctcttctagcttaataccttttctctctttgtacctcagagctctcctatccaagagggcttaagtaaccccatccctggtggagttagggaagaggagaccaccccaaaagcatcactcacagcccttatttccccacacacagtccctaagggcctcctgaactctgagtacttctactacatgcttcaactgtattgtccctgtgtgtcccagggccagccacaccacaagggtagcctgtgctaccatttgagcgggagtctccagggatgccttcccacgtagcaacatagtacccaggcctctgcactgcacaccaggacctcaaccgtggcctgccctccatggagacgcctagtgatccatttttccatagtgctccctggagtcctctttgggccaaaacttgtggctttctcccaaatacagtagcacagaaacatagccctctgtgcctgcaccaagataagcaggtcatggctgtccctagagcatgacctgtccttgccgtggaaagaggctaggacacggatccttgtcaaacaccaagtctcagggcatgaatgaggcagaggcttacaaaaatggtgagaaggctcgtcagcagagccagccttagccatggtgtgtatgggtcctgagggaaggcacggagacctggacgcatcttaaatcagggtgtttctaggacctggaacctgcctctgggagagtggcgctcacactgcaccctcgggcttacaacttcccactggatgtgggtgtatcttctgtcatccagacctagagctggtttccagcccccagcccctggggaagctgctctggccctgacctgacacctgttggccttgcatggactcaccgcctccctttctttgtcttgagtcagcctctcccccagagtccagccatgggagcacctctctgctaccccaagttaattctctgtgctccagaagttgatgcacaggtctccctccccctataagaggagctcgggcttccctctgcagtaacaagtttcactggttcctataatagacctgtttcctagctagtatccattgagaacatctcttccaagccccattctgtgccagaggaacaagcgactctgtctagctggagctgtggggaccccctttgaagaagggtccatgggatcagagctgtggtgttggtgtccacttcctgtttaaggagctactgagaactctttgtagaagttagcctgctttgcagacctgttttgcacccttatgcgtgttaggaatgaattcctccccctctcccccatggcacatgggtcgactgacaacttggtatctgaatgcacagtgtggtgtgctgtgtgcatgagtgcacggaatgtgtgtgtgtacaagcacccaaccagaagctaatgcaccctccccttatggccttcctaaacaaccaagacatgtttatacacacagaccccaggtaattcggagtttcctttcagtgtaataccagtgggtacaggtttctgaaattgtctcctttgtaagatggagatttgtgttctgtctgttatgagacccagaatggcagaatggaagattgtggtggagagatgacttgtgggggaaggggagaagagtggacaggagagaagggagggtgctctgagggcagcttacacccacgcaggccacagggggcccacttccccatcctgcagcgaactgctgactgctgcctcatgagggccctggtcagcttgcacttgggtggaagagctcttgtaggggagaaaggctagggtgagtcatttccagttggaggaggtggtgggagttttcagaggggagttggaggctagaattggtccccagagttctgggccaatgactccacccccagctgctctgagcctggcttgtctctgcctgtcacctctcctaagggcttagtgccctcacctggtcagcctgcagattctactgtgcaagggggggggggggggatagacatgctttagtcttcctgggatcagaggctctgtgacctgttatggtggagaccgtaagagtgccagtctaatctctgaaacattactgggctacagagcccacttttattctgaccttggtgcttccaagaaccttgttgcaaaaagccagagatgcagccctgcgtcatgctgcatgaggacagggagacagactggaaggacagaatatgctctccaggctgccagggtacaacagagttccaaggggaaccctgccctctgtctctcttccacaaactgaccactgtcccgccatctttcttctcttgctgaccctagaaaagcttccttgtgggcagttctgagtttatcaggccttcatagtcatccagcatcaaggtgctctgggcctgggtggtacatggctttcctaatgaattcatcccatcctagatgtcactctattgtgcactgtcctgagtcaaggcacagccaactcagggccttcatccatcagacgtgactccagggagttgtggcccaatcctggactcatgtccttcacctcccatacaggacatacctggaggaagaactcaccaaggcccggaagaagcctagcttgcggaaggacatgtaccagaagatggtcgaggtggaccctgaggcccccactgaagaggagaaagcccagcgagctgtgaccaagccacgttacatgcagtggcgggaaaccatcagttcgacagccaccctaggcttcaggatcgaaggcatcaaggtgagatttgtaaggcattgcctgaggctgctgaggtccagtggttctcagtgatgaaggccttgggagactggaatctataagcctcgccctacaggcctaagtatggacagccagcctcaggggtgttggcccattcggcagcctggggtactggtggtctggctgtagcaggccatcagacctgggggctggggtggcttgtttgtacagctgtacagaggccctgaagagaagccagcttatagacttgccacagggaaaatgttgactcatgctagtgaggtgcaggtaaggggagcgtgtagcggcctgggatcaccttgtgagcctcatccttcatcctttcctcttggataccctgaggaagacctcagaagactgtccttgtccctttgttccagtccaggtccctagctactagaattgcaagacgcagctaggaacagagaaaggggatacacggttctcatcgtctcaggtggtcattccttcagggaaggtggcagtcactcaggggccctgctccttccttttgttgcccaggcttggtctgcctggcctgctctccagcatggagttgggttgggtagctgaagtaaggggaagctctggtagtcatctctcacacagtgtgtagatgtgatcaccagtgtctcacgggcttctagagctggggactaagaaagccacttgtcctccttgtcttcaaaaaccagccttccctcctggcaatattcagctctcaggctggattcaaattatatacatgcatgctctccatcccttgtctatctgaactgcatgtcctggcatctctcacccaggcacgacatgctcccagtctctggtctctgcaccatacagccaacagcatccactggcctagagaggctgactggacacaccctcacctgccctcctttgcctcaactaacagaaagggcctgtgagaagggcttccctgaggtgccattccctcagacctgcggctcttctgcagccagccttcctgatgttacagctgtctcctaggtcagcctgaagagaggaagcactgggctctgagcatggagatggtggtttgtggagtagagatacagtgatgtgggcttaaaccttggctctggggaaaacctatagcagtcccctggtctgtagtgcatgacaagacccagaccaaatgtctggaatgtagagcaccaataggaacatgtgcacatatatacatagatgtatatatgcatgtacacacttacataaccccccatgcaaatacataccaaacataccacacatatacatactacacacacatatcacacacacacacacacacacacacacacacacacacacacacacacttatttttttgcctttttccttcaaggagacactttacagcttctgtttaccatatcataaaaattgccagcattgttgctctcgtgctttgggccactattaaatgaccatcacttgaccacaagcctatgacaggctgactgttagcctgatcattcagatggctgctaccacattaatgagacacactgtgagtcacgggcccaagacaagcttctgagcaggacgtgaagctggccataccttggggcccttgctgcccttacgtagagcaaggtcctgccccattgttgtctcggatacccctcacaccaccaagacttcctaaagtggtgtgtggccggggatctggagccactgtgtacacccctcagctggggtctgggacgggctctcctggaccaggtgacaatcacctggttacacctggcttgctttaccgtccctgggcacctgaccacctccacagagcagcaagagggtctgtcccatgggccctctgctgacccccgtgggtgactccctcctcagaaggaagatggctctgtgaaccgtgacttcaagaagaccaaaacaagggagcaggtcaccgaggctttcagagaattcactaagggaaaccagaacatcttggtgagtgacgccttcagtccctctgccccagcacagtgcccttccatgtcagggaacagtgatagcaggagtccgtgagcacctgctgctggctgggtgttgtacagacaagcaagcagaccttctgtctccacttgacagatcaaagacttgagagagatcaaggatgcataggcaggaaaaggctgagctgggattcccacctaagttggcctgacacaggccccctgcccctcctgatgcctccaggcccagacctataaggctggaatgcacacagtaggtctgcagtgcagtcctctagttccggggaacctttccggatcatttcagatcctctgagtcaggccactgactgcatttccagctgttgctagggactccgggacaaggctgactagccctgcctggctgtgcctctgatattcaaatcatcattgaaggaccctgtgtgatataaacttccctagtggcactgagttctgggtgatgggactcacagagctggcccctggggatgatcaggtatctcattgccaacaaaggaggatctgtaaggctccgtggaggggactcttgtagaggcactgtagcttttccactaccctgtctttagtcaggagcacagcactcagtggtcaggaagttaccatagcaaccagttctggcctctgcctcagctggctggctggcatgctggcacgggccagcactgcgagaggatgagcggccacagtcctctggaaaaggtataactgagctcagctggggtagatgaagaagtcggagtaaaattggttcaaggtcactgctagctgtaattccaagagtccaacgaactaaatagacctgacgcaccgcccctcccctccacacacacagagtgtgtgaatctctgaccatctctgccttcagatcgcctaccgggaccggctgaaggccattcgagcgaccctggaaatctctcccttcttcaagtgccacgaggtagggtactgcgccctcagccccacagacacacactgcctgcttgactgacacccctccccatcacccctagtcccaataggaagtgaaatcgctgatctaagcgcctctcaggatcattacagcctcaagccttcctttgcctcttaaatacctgggcaccccagccacgtctccccctaaccccgatgtcctccaggcactgctcccctcccttctggccctgtcaggtctatcccccccccacacacacacacacacaaccctgcccctccctgtcctggcgcagtttccctggtccctctctcacagccctgcttccttccaggtcattggcagctctctcctcttcatccatgacaagaaggagcaagccaaggtgtggatgattgactttgggaaaaccacgccccttccggaaggccagaccctacaacacgacgtcccctggcaggaggggaaccgggaggatggctacctctcagggctggacaacctcatcgacatcctgacggaaatgtcccagggcagcccactcacctgaggccaccgccaccgtgcatagccgtgccactttgcccgccacctctgcctgtcgcctctctcctcccctaattcttccttttcctgtctgagcgcctacctagaacagagcctcccatctgcactacaggacactttggagaaaaaaaagagattttttttttctagatctttacttccccggcctcctacataggggcttggaggtggcgtttctcatgctctctaaatagaaccaccttctcgaagagaattacacaaagctaggccccacatcctgttacactcagagtcggcacgggtccagaaggccgtgtgatccctggttgcctaaagtcttgagagattaagcctccctctgggagacactgcccccctcccagaaaattctggcccacactggctaccagtaggggccttgctgccccctagtggctaatgccatcagtaagcacagtcccatttgtgcctctcaccacgggccctgaagccaggacagggacctgatttctgggagttggaaatacaatctctggggttctgcatctggattatgagcaaagtctcctccagtgggaagtcccagctcccagggacactgagtggcttctctagagatgctaaatcagggccccaccttgccagcctaggaggagtatggagagcagctccatttttaaagaacgtcacccttccatctgggagcattgcccgtgaattcagagaggacattctgcaagcggagtttcaggggatgacgtcacctcctagagctactgattactgcccttaatctgcttgctgtgggaaggtccagagctgggcacaatactcaaggctcacaccaacctccagggagcaatcactaggcagcagttctgagagccagccacacccgggagagcaatcactaggccttagggaaccaggattctggcttcctggaatgatccctgagtttcccttgaaatcactcactctcccagcttgaaggacttagaccggtgtttctccatgtaattcggtagttgccagagttgttcagagggctgcccaagccttcctcttgctcgagttctgagcttcttgaagggctatgggaagatagatcattgttattcgccacttcagctctgaagcaagtagcctctctgattgaaaagagtgtacaacttgtatgactttttaaaagacaaaactcctagctctgttgctgtttggagctatcctcttcacctctgggcttatcacctcctcttttactgagagactctggatggcatgtacagaggctcctctgggatccacgccagcaggcactgattagggaccaaggggaatggggtagaccaacgtgtacacacctggcgacatagctttgggcagggttggccgtcttgactgtctgccccagctccctggggtttctagagctattggcccacgtggcatatgtgcttccccttcatgctgggtgggtgagtgacagttggtgggggcgggaggagggacccacgacgatgtataagtacagatgtttaaaaaggaactcgtttaaacttcctggctcctattcagatgggcggtgagctcctgtgcgggctgacttgctaaaggtcacgccccacgcccccccatcctcggagcccagaccttgtgacagcacatgattgggaagatgggcagccaggcgtggggggagggcagtagcaaccaggcatccagctctgagcctctccagctgtagttgctagagggcttgaggtgacctcgtggtctgtacattggccatttgctgggaaggggtatcattaattccaagagtctacagctatgatctggccaaaagttccctcctgctgtctcagagaaatgtttgctaaagcaaaccacactataaacaacaacaacaacaaaaatgctagggaccagtttaatgtatgaaaagaacaaaacatgccgagacctttagggaggtgccacctgtcacaataatgtgctaagataccataactgggggccggttagcaagagcctccagacagtgctaggcagtgctttgtgctgggtgtgttgtgagtgggaaagcggtgtggagaggcatctttctagggttagtctgttgccaagggtgtcttccttagttggggtttgtatttgtatgctagtacccactctctgcctcaaaccattctcacttctatcctgccagaggcccctccttccttctgtggggatgggcagagctcagatggaatttcccagaacctccaacagtctgataaaccgagttctgggaggcctgctggggattcccaaggtcccggccacacaggtgctgggacatggggcaggctccatgtacctacctatgtgcagggtccctggggccctcctgctcttgggccaccagatgtcttggtggtcagctctgctttacacacgctgaagattgcttcaattgctttcccccagactagactttagtgccctttaagaagtgtttaagttatatttattttgtttttttgttttaattgcacaaaacactaagatgaaaggctgggctgttcttcctaagctctggggcctgccttctggggccattccttcgtggccagaggaaccctgagcaggtatagcctcaagacagatgctgttcacctttggctggctgtatttagcttcgagagcgcctgtcttctgacaaccctctgtgtataggccccaccccttgatccaggccgcttgcccatcagtgccttttgggaggagaggaccctccctgcaccctgacaggcaggctctcctctgaactcctttcctcttgggactgttacatcccctgccctgtgcccctcagtcgactatagatgctatctcccttcccaataaagctttggagaccattactagcttgatgtgatccttctgcacaccccatccccaccctccaacaaccacaaaagagccatgatgaggtctagcagtgaatgtcgggaggggtaacgttctagtctgcaaacaatgcgaggcattctttataaggagtctactctacatactctatcatacctttaaacagtggctcaagggtgtcacccagtgacaaagaaagttcccctgcccacagtggcctctgtgctgggtgcatccaattccccacagcccatcacctgtaataacaagactttatcgtctctattgatcagatagggaaatggaggcttagaaagttaaacaacttggcctgggaaatgggtgtcttggaaatatttagagccagaccttgtcaccgttactagaggagtgtcaggggcagagagctaggctctagatccaggaatggctcagttgagagccttgtgtgtgtttcagggaaacccttaagagcaaaaccctggtcaggcagtggtggcacatgcctttaatcccagcacttgggaggcagaggcaggcagatttctgtagttcaaggtctacagagtgagttccaggacagccagggctacacagagaaaccctgtctcgaaagcccccccacccccgccgccgcaaaaaaagagcaaaaccctggcctcctaagaaggatcatgagccttcacagcttctctctgattctgccataagctatagccaccaaaggacactggtgtctacattttagaacgctgctcagctcagaccccagaagagtgattttagctactgttgtgtgggaagctgctgaccgctccgagcaaaaccatctcacagcctccaccatgcttgctaaaccaaccccctgggagaagcctgcgagccatctgcagatggcctgtggtcatagccagaaggagatgttccctaaagaaccctcagtagcaacttacattgactgagtgactggaccatccacgttctttgtacatgctgcccagagccatctgacagaccacatccctgtcctcagacataacattgttcctcatcacatgggctcaagtacctctgccctccaggctgatacctgcaggggaccatagtcaccctgtcacagagccctcgtccccttgacctgtagtcatctttctagcagacctgagagcatccagagaagtgggtggcccgttgcctgttgcatctcaagaccatttttggtaccgactgcctaatcctgggctcacaagaagctggtcctgctggcacatggggtagcaattgtgaccaacgtcatttcatggggcgtcttcaggggtgggtgctcttcctggatggggacagaacaagcatcttggggaggcagggcaagaatctgtatccagttcactcctgctgcatcaacctccggagaggagtctttgcgatggcccagccatgtctgacagcctagactgtgcttaccgttgccattcatcccaggaggtgaggagggaaggagtatcaccacctgtcattaaaccccagggagcaactccatggccacaccctctggctggtctttccccccacccctaccccttccactgacagggaattggggtgttgggactgtcgtctatcctgtgggtctggagggcgaaacaggctgaaacaaggccgcttcaaaggcagcactggacgtagcctggagagttctgtgtggcaaaaaggagccagaaccacgctgaatcagtgataatgcaggagaagcctggtgacttgggcacatttcagtgtctgccagctccatgagccctactatgtgccctccatgtctgcacaggctccttggttgtcctgtcttcactaatgcacgaggtggctcagcctggcagtgaatcttagaaacagccaactgtagaaactctttaattaattgagagggaactctgaacctcctctgaggtagagtgctcattgcacagcaatgctgtatacatatgagggacacagggtccctaagtccggaggtggtatccgagactcccttaagaggctcctgcctgtaccagcccttctgaaccctatacaagaatatctctctcaccgggtgtggtggcgcacgcctttaatcccagcactcgggaggcaggggcaggcggatttctgagttcgaggccagcctggtctacaaagtgagttccaggacagccagggctgcacagagaaaccctgtctcgaaaaaccaaaaaaacaaaaaacaaaaaagaatatctctctccttccttccccatactacatagctgactctgtattctctgcccctctcccacctttcagctatgcagtcaccagagcaagcatcctcttagacattagaccatataaataaagctttattagagaccaccatgtcactactttatatatcatctagggcctcattcaaccccttacagaactgccgaatcctgttcgaaggtagcagtggccgatggttgtgagttgctaagtgtcaggtgattaaaggtaaagtagtttaatactcataacaactccatgagatgaaccttgccatccccgagttcttcgagacagaactaggaaacaacagaccaaactttgctttggaccaaactcgagacctgcctgtgattctgcctgtttctgcttccctggacagtccagggcgtgtattctggtaccaggctgtgccacaggatccctaggacagcccatggatgttggtgcctgggatatgtagggacagagctatcaaggcccagagtcagtgtacctggtagtccttgttctcctgcaggcctggaagtggggctggagacccgagactgctggagcgagggtctgtttgttctaggcgtgggatgaccctccaggcagctgagtgttagcatccatggcatccagtcccctttctccgcagactgagggttcagaaccacgtctgcttgccattcacagtctggatcacacaccctgccacagaaatgcagcaaacacatccagttcccgggaacaccaagaaccagcctgggtggcattttttttttcaatttcgttttcactgtgacagctgtggcccagctcctggcatttagcacaccatgcacaggcataaaatgacacattcaacagagaagtggggactgggaagcagacaagctcggggaccaggcgtttcctcgctgtgcggaagatgggggagggtcaaagggagcttttattaaaccccgtaggtgacaccgtaggtgacagccacaacccctaatagaccccaatagaaaattcacagagacaaattcaccaggaattggggtcctaccttgtggtctccttactctgcacacttggtcctggggacatttagaggtcacagagttcaggccacaaagatagacgtttgcaaccagcgtcattatctgacctagtctttcctctctgtactttccaaacttgtgaatcagcaaagtgggatttaaagtgggggcaggggagaaagtcccacatgacttctgtgcttttcgggacagtagcacatacgattttaaaaatagtttctgcacattacggacaaacggggtctgtgatagcttttttgacagcagcaggcctgctctatttcaatgagaagaaaaaaaaaatgcccaattttagtcatgctttctgagaacacatgctggcatgaattcaagacagactagaaaccgcgaggccccattagggagcctgcccccttgtggacatcaaggtgcattgcaagatggccctaggacaaggaggctagtcagggaatgcatttaatttacaaatgacatcttgctctagtaaataccagagcccacatttaaggcacagtggtggtggtggacagatatcaggaatatacggtacagtataaaggacaccatgcagaaaaaacaaggggtcccataggacaaaaaagaggcctcacccaagtcaggaacataaaggccatttaggaaaggctttgcaaaggaaatgccaccaaaatgagtttagaagctgaatatgaattatccagagggttgaaggatggaggaagcagacacacagcacagagacacagggaaggaatagctccaagtggccagagccgaggacccatgtgcagaggacccatgtgcagctcacaatgtggtcatagccggatctcaggcctgggcaaggaatagcggaagcaaatggggaatgtggagtgtctcccagtgacaaacaggtgtccctgggggctcctcggcaatgacatgaggtgacacttctgcatggaggaaatgatgctaaccagtggagagatgccaagttctataatgaggtcgaggccgtaagctagagggaaattaaggaaacagtctggatgccgtggggtccatggagtgcagagaaaccaagcttgccaggtcagcctcgctcactcctgtggagccagaaagccctgccacccttccttaaggtttgacttatcatcttctaggtgtccccttcctgcccacctcccttccggttcaaacaaaatcctttgagcctctactcctgcaggttcgtggttaatctcacggctaaatagccaacacttcaaaaccaatcccacttctacattaggtgtaaaagattttccattttagggagaaagggggaggggcagtttacaggtgtgtctcgcgtcactcagcagccaggcatttgtaattccagttacctggctcagggatgcagctggtaggagatgaagagacacatccagaagtcagtagctagtgtgtgtttgagacacccacccctctctataaatcgacctgcatcgtagctcctgatctgtggagagcacagtgggaatggctgattggatactggctgaaaggcttggatcttaaagaataccgaaggcccagctgctgccctctctactcattccctaagggctcaaggcagaggcttggatgtctgttacctcaggttccagcgcttagacccaactgacaccagctaaccccaactgacccagttggcccagaaaacaatatttgtatgttgcttttaccatgtatggcaaatgtctgttttataaggttacttccaacctatttcctgttttcagcacttattactacaacataagtaaacacgtgcatgactctgggggggggggggaagagtactgtaagcttagatcacagccgtgcataatcactgcaagagccagctatctctccagccacgcccaggcagtttcttattccgtaacttcaagcgcctgcattggcttcacattagggaacagatgaccaccatgagccaggtctacaggtctgggtcacaccaccatagctggagacagctcagctctagtgcttgctgggctgtggccccagctgaggttctagcaggctcaccatcaccttggctggctcagcagcactgtgaagaacacacagtgtggccattctcacattctcatttccctctctatataacagggaaggccaagctgtgggcgtgtaaggctaggcacaggagagggcacacctggccccaggcacgtatatagatgataggtggagtcctccgtcctcccttctgtcctccacgctgggtgtgtgctcttaggggtgtagtcttgccccagcccctcctgattgctgctctgttcttcttccttcttgctatgatgtgaaattctctgctttacaatactctcaccactgatccccaacatagattagaatccctgaaacgatttgaaaaacaaatccttcttcctttgagttatattagacggtctagtcccccagctatgggaaagctaacacgagctgtgggttgttctgatagacaggaagaggctggacgtttcccttggcatatgaggagctaagtgctggtccctgatcaccccagcactggtggtaaaattgcaggcacatctctctctgtctttcagccagctgctcctgaaccaatgacaggagatgatgtattctttctacccacctgatgctcatgaaccctgagatgccctaggagagtgattttcaacctgtgggtctcaacccctttgggggggccaagtgaccctttcacaggggtcacctaaaaccaccagaaaaaaaccagatatttatattactatttatttttttaaaacctttttttataagatgtatttatttattatatgtaagtacactgtagacacaccagaagagggagtcagatctcattacggatggttgtgagccaccatgtggttgctgggatttgaactcaggacctttggaagagcagtcaggtgctcttacctgctgagccatctcaccagccctatattactatttataacagtagcaaaattacagttatgaagtaaccagcaatgaaattaattttatggttgagagtcaccctaacatgaggcaccatatgagagccactgctctagaatattccatgggtacagggaagcccagaggctaattatcccccaggcactgatctttccataacccacaagggttccatcttgttagatttttttttctgcctatccagaactttctagattcgtcacgaattggtatgtgttctggcgtttctctggctgttgatttgtagccttacagtcttgtactcatccaggatatggaaattattttaatgttgtgtccttgtacgagaggatgtcccatgggctgctgagacgagtaagtactatacagcatttgaatgaagtgctctatagatgtctgttaagaccatgtggtgtacaatgtcatttaatttgaatgtttctgtatattttgtggtgaggggatgacctattggtaagagtgtggtactgaagtcacccagtactatcatgctaaggttaatctgtgactttccatctaaatagcatgcgttttatgagattgtgtgtacctgtattcagggcacatacatttagaatcataatgttcccccgatggattgttgttttgttcgaagtctattttatcaaattttacaacagttttgtgcgttctcctgtgtttatctgtaatctatttctttcccttcatcggtaaatttgttaggttccccaggtctccgcgcatcagctaataaagatgttggctgggctgtagactgcaccttgccacccccgctgcatttcagaagatcccctcgtggtggcaaccgtcagctctaagttctgactactcataccccgtgctcatttgtggttagcatcatttcaacatctatctcacacacatttcctttgccagccagtccaacctcccaggaaggaaacgggcactgtgcaccctcggggcctggtgcttcgttcagagtctacatccttggctacaggggacccagtgagcggagaaaatgttggattggtccccaaggaaaggggaagatggccatccaaatggaaagaccagcaggtgaggttgtagggagagagagagagagagagagagagagagagagagagagacgaaagcattcagggcagctggagatctgattacagaaatggaagacacaggaattcaagaagctaccaggaaggtcacatggatgtttattaaatag

SEQ ID NO: 554 - DNA, 3806 bp, Mus musculus
gcggtagtgtctccaaccaagcacagagcaacgcagggtcggcctggcggtgtcccctccgggatcgcctagtccctgcgccggtacattcagcttcgttgcaccccactttttccgtcttccataagttgttgcggaaaccctttgggagcttttttatttttttaaaaaaactttaagccacttggtctgtacgagcccggagtccccggggcatgtcgcctgcacgggacctggaagtctgagcaattgcagccgcgaaatcgtttatggagcttggggcgggggccgagcccgcgattttgccctgtgcccgccgcctaggccatgctgctccatcagcgcgcagagctacggccgccgggcctccgggactaagccgagagccgcgggaggaggaggcgccggcggtggagcgggacggagagccgcggcggcgggcggaccctgtactatggctgtgtactgctatgccctcaatagcctggtgatcatgaacagcaccaacgagctcaagagtggcggcccccggcccagcggcagcgagacgccccagccctccgggagggccgcgctgagtcccggcagcgtcttcagccctgggagaggcgcttcctttctcttccccccagcagagtcgctgtccctggaggagcccgggagtcctgggggctggcgcagcggccggcgcaggctgaatagtagcagcggtagcggaggtggcagcagcagcagcaacagcagcagcagcagtggcgtgggcagtcccagttgggctggccgcctgcgaggggacgcgcagcaggtggtggcggcccgcatcctctccccacctgggccagaggaggcccagaggaagctgcggattctgcagcgcgagttgcaaaatgtgcaggtgaaccagaaagtgggcatgttcgaggcgcaaatccaggcacagagctctgccattcaagcgccccgaagcccgcgtttgggtagggctcgttcgccctccccgtgtcccttccgaagtagcagccagccccccgaaagggtcttggctccgtgttctccaagtgaggaacgcagaacaaagtcctggggagaacaatgtacagaaaccccagataccaactctggaaggagaagcagactcagcacacacccctcgaaggacaaggagggagtggcccctcttttaggcccagccagcccgaccaggttagggactcagagtccatctacttccgtgagaatggaaagaggtaccccggccagtccccgctgtggctcacccacacccatggaaactgacaagagggttgctccctcactggagcgctttggaactagcttaacgttggctactaaagtggcagcttcagccgcatccgctggaccacaccctggacatgattctgccctcatggagacaggctgtgagctcgggggcatgcgcccctgggaggcccagatggagagacgggggcagtttctgggcaaggagaccggctcaaccccagagcctgtccggacccacatgagagaaccccctggaagggtgggaagaggaattcattctgttggtgggcagggctcctggacacctgaagtcatcaaaagaccagaagagagggctgtgactgcccaaagctcagagccctcagaggaccccagatggtctagactgcctgtagacctggattccgtaggacctgagaagggaggaaataggatcccagggatgcgagggccccagcagaccctggacagtgagagagaaggctctccagcactgggcttgcttgggggcagccaggcagcacagccaggggctaggggtgtggaggaagacgttcattatggccgaatgctggaacctttaccacctggggaagtaacaacaaaattgaaagaaccccagtgcctccctggggacaggatgggaatgcagcctgagagttccatagtttggcccagtgccttggaggaagctcccctgatctggacacgtgacacgggggtacagtcgaaggggacttggggaagccagctgccagacggagatgctcaccctagctgccaagagatgcccccagaccagaaggacaaggcctccttaaaagaggcctgcagccccagcaacatcccagccatccctgcagtcatcattacagatatgggtgctcaggaggatggagggctagaggagatccaaggaagccctcggggtcccctgcctctgaggaagctgtcctcctcctcagcctcctccactggcttctcctcttcttacgatgactcggaggaggacatctccagtgaccctgagcgcacgctggaccccaactcagcctttttgcataccctggaccagcagaagcccagagtgagcaagtcatggagaaagataaagaacatggtgcagtggtccccctttgtcatgtccttcaagaagaagtacccctggatccagctggcaggacatgcagggagcttcaaggcagctgcaaatggccgcatccttaagaagcactgtgagtctgagcagcgctgcctggaccggttaatggcggatgtgctgagacccttcgtgccagcctaccatggggacgtggtgaaggatggggaacgctacaaccagatggacgacctgctggctgacttcgattcgccctgcgtgatggactgcaagatgggtgtcaggacatacctggaggaagaactcaccaaggcccggaagaagcctagcttgcggaaggacatgtaccagaagatggtcgaggtggaccctgaggcccccactgaagaggagaaagcccagcgagctgtgaccaagccacgttacatgcagtggcgggaaaccatcagttcgacagccaccctaggcttcaggatcgaaggcatcaagaaggaagatggctctgtgaaccgtgacttcaagaagaccaaaacaagggagcaggtcaccgaggctttcagagaattcactaagggaaaccagaacatcttgatcgcctaccgggaccggctgaaggccattcgagcgaccctggaaatctctcccttcttcaagtgccacgaggtcattggcagctctctcctcttcatccatgacaagaaggagcaagccaaggtgtggatgattgactttgggaaaaccacgccccttccggaaggccagaccctacaacacgacgtcccctggcaggaggggaaccgggaggatggctacctctcagggctggacaacctcatcgacatcctgacggaaatgtcccagggcagcccactcacctgaggccaccgccaccgtgcatagccgtgccactttgcccgccacctctgcctgtcgcctctctcctcccctaattcttccttttcctgtctgagcgcctacctagaacagagcctcccatctgcactacaggacactttggagaaaaaaaagagattttttttttctagatctttacttccccggcctcctacataggggcttggaggtggcgtttctcatgctctctaaatagaaccaccttctcgaagagaattacacaaagctaggccccacatcctgttacactcagagtcggcacgggtccagaaggccgtgtgatccctggttgcctaaagtcttgagagattaagcctccctctgggagacactgcccccctcccagaaaattctggcccacactggctaccagtaggggccttgctgccccctagtggctaatgccatcagtaagcacagtcccatttgtgcctctcaccacgggccctgaagccaggacagggacctgatttctgggagttggaaa

SEQ ID NO: 555 - protein, 930 aa, Mus musculus
MAVYCYALNSLVIMNSTNELKSGGPRPSGSETPQPSGRAALSPGSVFSPGRGASFLFPPAESLSLEEPGSPGGWRSGRRRLNSSSGSGGGSSSSNSSSSSGVGSPSWAGRLRGDAQQVVAARILSPPGPEEAQRKLRILQRELQNVQVNQKVGMFEAQIQAQSSAIQAPRSPRLGRARSPSPCPFRSSSQPPERVLAPCSPSEERRTKSWGEQCTETPDTNSGRRSRLSTHPSKDKEGVAPLLGPDTRLGTQSPSTSVRMERGTPDRCGSPTPMDKRVAPSLERFGTSLTLATKVAASAASAGPHPGHDSALMGCELGGMRPWEAQMERRGQFLGKETGSTPEPVRTHMREPPGRVGRGIHSVGGQGSWTPEVIKRPEERAVTAQSSEPSEDPRWSRLPVDLDSVGPEKGGNRIPGMRGPQQTLDSEGSPALGLLGGSQAAQPGRVEEDVHYGRMLEPLPPGEVTTKLKEPQCLPGDRMGMQPESSIVWPSALEEAPLIWTRDTGVQSKGTWGSQLPDGDAHPSCQEMPPDQKDKASLKEACSPSNIPAIPAVIITDMGAQEDGGLEEIQGSPRGPLPLRKLSSSSASSTGFSSSYDDSEEDISSDPERTLDPNSAFLHTLDQQKPRVSKSWRKIKNMVQWSPFVMSFKKKYPWIQLAGHAGSFKAAANGRILKKHCESEQRCLDRLMADVLRPFVPAYHGDVVKDGERYNQMDDLLADFDSPCVMDCKMGVRTYLEEELTKARKKPSLRKDMYQKMVEVDPEAPTEEEKAQRAVTKPRYMQWRETISSTATLGFRIEGIKKEDGSVNRDFKKTKTREQVTEAFREFTKGNQNILIAYRDRLKAIRATLEISPFFKCHEVIGSSLLFIHDKKEQAKVWMIDFGKTTPLPEGQTLQHDVPWQEGNREDGYLSGLDNLIDILTEMSQGSPLT

SEQ ID NO: 556 - DNA, 128005 bp, Homo sapiens
cctggagctctgtaatagagaccactgagcctggtctctatttcccctacaatatatcctctgtattgcctcagagatatctttttaaaatgctaatttaattgtgtcactctgcctaaaactcctcagtggctgcctatcatttttaatgaaaatccaagctaattagcatagtaattaaggaacttcaccacatgtccccaaactgttattccaggctcttctccccccccattgccccccactcaccaccaccatatactctggccacatggactcaacactcctcaaacctgctcttccatgggtcaagggacttgtgattgctgtgcctctgcctagaagactctcttcttttcctggtgaactcctactcatcctttacagtccaccaaaagataaccatttcctgaagccttcccatctcctcccctagcccaaggccacccctaccactgttctctcttggtcatttgagtgctattataccatatatcacataaaaataaaaataattataactattttaacacttggttccccttctagtctgtgagtactttaaagatgagtacaactcctcttcatatccttctcttccctctccccttgcctagaaaacccagtcatagtttaaagagtaaatgaatggcgttaatgatacccaaagctgaaatgagatgctcatgggttaaacagcagtgaggtaggctgcgttagtgggtaccagcagaagttctgtagacacctgaagcatggactgagtgtggtttgcaaccagtatagatataatctcttgttgctggtgctgtccctttgttgtaagggaaaggagaaatgggaggcatgagaaacttccctcttctaccaaagacagccgtctattctatgttagaacattagatggtgaccttttctgagactctgttcttacacaccaagcacgtaaacttaacactttcttttcattcctaaagtcttaaatgatggatcaaggttgactcaaagtccttctctggctctcctaaacttcctaatggaggctattcaaacacaaggcccactgtatcaaaacctcagagaaaacattttgtgaatgtcctgtaactcacgcgtttccaatgctctttctcaccaattatttttgtcctaagggtccgcagatgtcatacaaatccagttatccagagaaaggtgctaaggccgctcctcacctttcactctttatttttatttatttatttatttatttatttatttatttatttatttatttatttttgagacagagtcttgctctgtcacccaggctggagtacagtggcgtgatctcgctcactgcaagctccgcctcccgggttcaagcgattctcctgcctcagcctcctgagtatctgggattacaggcacctgccactacgcccggctaatttttgtattgttagtagagacggggtttcaccgtgttagccaggctggtcttgaactcctgacctcaggtgatctgcccgcctcggcctcccaaagtgctgagattacaggtgggagccactatgcccggcccacgcttcattctttaggatttaaagcaaaggcagccttttcagtgtgtaggaggggatccctggagaagaggtttagtgcaaagccatatagagtcagcatcttaaactgacagcaaatgacttggtttcaattaaaacaaagtcttgacaccacattccttttcttttcttttcttttcttttcttttcttttgagatagggtctcactctgtcactcaggctggagtgcagtggtgcaatcatggctttttgcagcttcaactcctgggctcaagtgatcctcctgcctcagcctcccaagtagctgagactacaggtgcacgccatcatgcctggctaatttttaaatttttgtacagacagggtctcgctatgttgcctaggctggtcttgaactcctggcgtcaagcaaacttcctactttggcctcccaaagtgctaatgcactgcacctgggcttgacacaacatttcaacatgagtgtttaagttagctaagtcacatttaggtaggaaaagcaggatcgcattttttcagtccatctcttatcagtttatggttgtttacagacaatgaaaaaatgtatatatacatttttgatgctgagtgaatacatatatttataccactggctcagatcatggctattctatggattttgagtctctgtgcataacttattaatagatttgcaacagagccaacccaatctgttgtttagatggctggaaaagtcagtttgaaactagataattgtttcaatatccacatgtaaatggaacatacctataagtatcttacactttgctgcagaaatcatcctaatcagcttggtattctccttccagtcccaccacaaagcagcgtctggatttaggagaggcagaaaatgcttctgttgctcgtgcctgagttggggacaaagacctttcaataaatatgatcaaataccttccctacaccagacatagcagatgcaaatgggactaagtcctcaaagaggaggagacaaaaggtagcacattataacatagcatggagttagggaagggtttagtaagcgtttgatgaatgaatgaatacatgaagaataagctgttataacagtgaagtatacccaggaagccatgaaactagggctaaagctcaggtgtatagggaacgtaaaaatggactttctcttttctgtatcaatctagaatcataacatttgctgttttcattttgctcttccggaccatatgcctcatgagtagtggcagagggtagcaagactgtgtttgtgtatgtatatgtttacataaataagtctgtcttttaaaaaatagtatttttaatgactaaggaattaatcatgaataaatatatgtaagacaaggtattaagtggccaggggaggtgggggttgttcatagaaaagccatagctgctctctgccttcaaggaccttatgggagagagcatgaaaagcttactaacagtgcgaggcagaaggagggatgctgagtgaagggtgctgatacagagtctccacatgtgaggaggaggaggtcatttcaggctgggccatcagaggaggattcctaagaggatgatattgcaggatagatgcgacagctggaacgattgtgataatttaacaaagttatatttgaaaaaaggggacacatagttattccatgaaacatgtgaatgaaaaaatgaacaacttacccagaacgtttcacccagaagagagattatatgtcaagcactgtgcttgacactaggaatggggcccataatatcctcatcaaaggctatatccatccatagctatgtttttaaaaatatctttattggctgagcacagtggctcatacctgtaatcccagaactttgggaggccaaggcaggcggatcacctgaggtcaggagttcaagaccagcctggccaacatggtgaaaccccgtctctactaaaaatacaaaaattagccaggcatgatggcggttgtctgtaatcccagctacttgggaggctgaggtaggagaatcacttgaacccgggaggcagaggttgcagtgagctgagatcgcaccattgcactccagcctgggcgacaagggcaagaccatgtctcaaaaaaaaaaaaaaaaaaaaattctggcctgtaatcccagcactttgggaggccgaggtgggcggatcacgaggtcagaaaatcgagaccatcctggctaacatggtgaaaccccatctctaccaaaaatagaaaaaattagcctggcatggtggcgggcgcctgtagtcccagctactccggaggctgaggcaggagaatggcgtgaatccgggaggcggagcttgcagtgagccgagatggcgcaattgttgtactccagcctgggcgacagagtgagactccatctcaaaaaaaaaaaaaaaaattttattatgttataagtgatatacaacaaactgcacatatttaatgttttacagtgttatatgttttcatgtatgtatacacccataaaatcatccttgcaattaagacagtggacgtatccattactttcacaatgtcctacatgtcccttcatctttcctacttcctgcccctctccacagcctccatgttcaggcagccacccagtcttttttctgttactatagatgagtttgtgttttctagaattttccatatttggaatcatacagtagatattctcttttgtttgatttttctcaggcagcataattcttttgaaattcatccatgttgtatgtacatcaatgtccatttcttttttattaatgaataatattccattgtataccacaatttgtttatccattcacctgatgaacttttgagttgtttccaatttttggctaattctaataaagctgctatgaatagtatgctttgcatatagtttctcccagtctatgcattgtcttttcattcttttcagtatcttttgaagagaagtggggtgttttgttttctgttttttttgtgtgtggacacaaggtctcactctgtcacctaggctggagtgcagtggcatgatcatggctcactgcagccttggcctcccgggcttaattgatcctcccacctcaccctcctgagtagctgggaatacaggcacgtgccaccatgcccagctaatttttgtattttttttgagacagagtcttactctgtcacccaggctggagtgcagtggtgtgatctcggctcactgcaacctctgcctcccaggttcaagtgatgctcctgcctcagcctcctgagaagctggtactacaggcgttcaccaccacgcccagctaatttttgtatttttagtagagaccgggtttcaccatgttggccaggctggtctcaaaatcctgacctccagtgatctgcctgccttggccttccaaagtgctgggattacaggtgtgagccacgttgcctcctaaagtgctaggattactggcatcagccaccatgcctggcctaattttttttttttttttttttttttgtagagatggggttttgccatgttgcctaggctggtctcaaactcctgagctcaagtgatctgcccgcctcagcctccccaaaatgctgggattacagatgtgcaccactgtgcctggccttgaagagacgttttaaattttgatgtagtccaattaattttggtatcatatctaagaaacaggaacccaagttcccagagattttctcttatgtttcttataaaagtttcttggtcttaggctttacattaggatctgtgagccattttgagtaatttttgtacaatattgataagatattcattgaatttcctctttttagatatggatgttgaattgttatggcactatttgttaaaagacttctccactttttctgcacttgtgtcaaaaatcaattgtccatatatacatgggtctatttctggactattttgtcctattgatctattttttgaactttatgccaatgccacactatcttgattaccgtagctttataataagtcttgacatgagatagtgttagtcctcccactgcattctttttcaaagttgttttggtcattctagatcttttgcatttccctatgaagtttagaaaataaaaacaaaacaaaataaacaaaaacaaaaacctgctgaaatactgactgtgattgcattgaatctacagataaatttgaggaagaactgacattgtaacaatattgagtcctccaattcatgaacatggtatatctcttcatttacttgggtctttttttttccagtagtgatttataattttctcattatagatcttcaaatgttttgtcatgtttatctctaagtgtttcatagtttttgatgttattgtaaagatattattatttgattttttaaaatttctgattatttattggtagtatatagaaatacaattgattttggtatattaatcatgtattctgcaaccttgctattatgggctgaattgtgtttccccccatatttatatgttgaagtcctaacccatgatgtcacagaatatgactatttggaggtagggtctttaaaaaggtaattaaggttaaatgaagtcattaggatgggccataatccaatatgactggtgtccttataggaagaggagattaggacataaacctatatagagagaagaccatataaagatacatagagatttatcggctggacatggtggctcacgcctgtaatcccagcactttgggagaccgaggaaggcagatcacaaggtcaggagtttgagaccagcctggccaatatggtgaaaccccgtttctactaaaaatacaaaaattagccaggcgtggtgtcgggtgcctgtagtcccagctacttgggaggctgaggcaggagaattgcttgaacccgggaggcagaggttgcagtgagctgagatcacgccatagcactccagcctgggcgacagagtgagactccgtctcaaaaaaaaaaaaaaaaaaagagagagatttatctgcaagccaaggagagaggcctcagaagaaactggccctgcaacagcttgatctacagactgaaactattcttagtcaccagaattgtgagaagataaatttctgttgtaaacagaatttctgttgtaagccaaccagtgtgaggtactttattatggcagcctggcaaactaatacatttactaaactcacttattagttctaatagctttttcatagacccaagattttccacatagacaattatataatctaaataaatagttttacttcttcctttccaatttgatgcctttttattccttttccttgtcttattgcactgtctaggacttcaagtacagtgttaaataaaaatggtgagagcaggcatgctaaccttattcctaattttgtttcattttattattattttttgagatgaagtctcactctgttgcccaggctggagtgcagtggtgctatcttggctcactgcaacctctgcctcccgggttcaagtgattctcctgcctcagcctcctgagtagctgggactacaggtgcgtgccaccacgcctggctaattgttgtattttcagtagagacagggtttcaccatgttggccaggctggtcctgaactcctgacctcaagtgatccacccgcctcagcctcccaaagtgctaggattacaagcatgagccactgcgcctggccatttttcctaattttagtggtaagtgtttagtacttcatcattaagtatgatattaactttaggtttttcgcagatgctgtttatcaagttgaggaagtttccttttattcttagtttcatagctttgattttttaacttcaatttcaaaagcagacaaatgggtactctgaatagttaggcaaatcttccctacagttatagagaaaactgaaaagttaggcacaccttccctatggttatagataataactatacaatatgcagaagtagtgacaagcatggattctagacccagattacacaggttcaaatcctggttttgccacttaccagcaatggaatttggggacaaactactcacccatttgcgctttcattttctcatctgtagaataaggataataatgatgcctgcctcgtagggtttttaatgaggataaaaatgtataaatatttataatgtgtctagaacagtgtctcgcaaataagtactatgtaaaatattcttctcatgttcatttacaatcatggaagacaactagattctctctcaggatgcaagctcactatgctagcttccagacatgggttttattccatcttttccccaacccctgttgctcttggtggcacagttagaattttagactggtagaatcatcagctagccccacctcgagcccaaggcagaaaccccttctgcatgtcacacctgacagctgctggctgcgttctgaccaataattcttcaggttgactgcacattcaagaagtctaagtttctcagctacggaagcctgatgatgtcaggctgtgaggtggcagtgaggtttcccagggattgggaagctaagtgtctgtgcttaatgtatgcattgctaggtccttcagtttcttccaccatgacacctgacatgggtattggcctctactagaacaaaggcccctcagacatgaactccaatgactgggtctcctgaaaactggcaactcctcttttttgcccctagggaaccaaattagggtcaaggagagggctggcttctctttcttaggaactgctcagatcctgaataactgctcagagacctgaataactctgggctctttttttttttttttttttttttttttagatggagtctcactctgtcgctcaggctggagtgcagtggtgagatcttggctcattgcaacctccacctcctgggttcaagcgattctcctgcctcagcagccacccaagtagctgggattacaggagcgcaccaccacgacctactaatttttgtatttttagtaaagacagggtttcaccatgttggttaggctggtctcgaactcctgaccttgtgatctgcctgccttggcctcccaaagttctgggattgggcttttttttaaaaaagccccattgagggtaggagggtaattaggttcaattcttccatttctaatttttaaaaattataaagttttcaacagtgtgtgattctcaggtattcttggctagaagatctcttgatttcagatttagcatgagcctcttcctgatggagcagcaggttgctttgctcacttaacagtattgttacataaacaagcaagagatctgtgtgctacaagtaaagtcaaaatttccatctgaatttcagctaatcatgatataaggaccaattcaggctttggatgtttcagtctcctgagccgtgcagctgtgttttccctcctttcactaaatgctgtagtttaagatttagagaattatgtaaaacacactggcagtgccagggcttagaaggggtaggatcccctgcccagtaatgttggctgatgttctttctcccttttttgctgatagtaggggagaaagtttcttgaaaatgatccagtctacaggagacagtctacaagggtctacaggagcaagaggggtttcagacgttacccaagccttcttagtttcaggactatgctttttcttaaaataattctgagaattaagtgcaaaaatatgcgaatgtcacatgtgccgtgtgcatttataaataaatgtgacatgtaaaggtgtatttatatatctaccaattgcactgcaaaaccatccccagctcatagaccaaccagtcttccaaaatactactgtgatgcacttaaaacctgcaactctgcaggaaggtgacctcaatgtaccttctttgaatttgcagaactgtgtacaagaacacaaactgtttatacaggattgtagccttttttaaatgctaaaaaggtccccatgatttgctttgtttaagacatacactcaaaactttattaaaaacatttttcaaaaatagtttcataaagctagacacatcagcaagcctcgattgaggggtggaaaatgaattgtatatctttaaaccgcagaagttaaaagccttttttgttgttgttagctaacaatggaaacttttttttaagtgtttccctccctcgtcttgccaagcaatagaaaaaaaaaaaaaagaagaaaagaaaaacttgttccgctgagttcaaccccagacaggctcacaacttccttcctgctttcctcccccaagcctccgcctttctccctcctccctcctccactacccccccccccaacaacttttctttctttcttttttttttttttaatcgtgcattgaacaaacactgaagtagcccggagcagacactgacaggggcagtatctccacggtcgaaaagggcgtgcagggccggcttggcgtcgccactgccgggatcgccgggcccctgaaccgaagagctttcccccctctttcgcactcctcttttttgtcttccatagcttgtgagaaaataatttctgagcatttttacttttaaagccatctcgtccctacgaggtttgcgcctctgggcatgtagtctacacaggacctgagaatctgagaaactgcaggtaagtttggcggccttttaatggctctcgcctctgaacaaccctcttttccctcactttctgctctggagcgaatctcggcgttcctggttccgaaacagggcaaaggggtgggctggggaggcagggaagggggtttgattttggagggtgacatggagtggcggtggggagaaaatagggagagacgaggtctccgcatttctcctacccgccttccgggccgctcactccgcgccgcctccctcagcgcgctccaggagtccccaggctggggtctcggggcggctctgctggcgccgggcgaggctgcccgggatgcggagaagccctgcgctccgcggcgctgccctggggtgttagagcgccggctcctgggaggtttgcagagctagaggctctgtgcacctagggctgctgcccggctgcagccatgcacgcccctaagttcctccgagtgggcgcgggtccgggagcccgcaggggcagtcgcgtcctcggcaacagggcgcgctgagagcggactcgctccgcgcgcgtgcggcgtatacacacacgcgtgtatacacacacactcacagacacccccccataggggacgacggcaggggggcagcaagtactggttccggtaaagagaacgtgtagaacctcggtgcgcccacactcacaaaacacttgtctagggataggcgacaaggctagccctgaaaaatgcttcggctgcggccccgctgcccgcccaggccttcgtaggccgagagacacagccccaaggctagggtcaggaaggtaaacggcgggcacgcgggcgccctcccagatccgggcgctggcagcggctcgggcaaggcaggtcccgcttaggttccctccgagccggtcggtctctgatgccccgagagggtggagcagggagaccctgaagcccagggcgagggctgccgggttgccctggatagccaatgtttgctcaggctggggagacccggagacggtggctggggtgtcctcagcccgggagagctgagtcagccgcgccccgcacacagcatacttaggagccaaggacttggacctcgcttctcgccggtccgcgagacgagtattaggattgggatttgaagggacctcataaagcgcatcgcagcctggggcgaggtggggggcggggaagcacacccgaaaccgcgctggcgaccgaggcagccggggcatgccctcgccgagcctcgccgtccccataggtgagatgtccggtggcgctgggtcccggatagattgtgttcccggggctctctctgggttctgcaggcgacccccaactccccccgcgcgccctccagggtcctgacttttctccttgtatctccacagccgcacggttgtttatggagctttgggcgggggctgagcccgcggtcgtgcccccagcccgctgcccaggccatgccgccccatctgcgcgcggagccgcggctgccgggcctccggggctgagccgggagcgccgggaggaggaggcgccggcggcggagcaggagcgggagccgcggcggcgggcagcgcgggacccagtactatggctgtgtactgctatgcgctcaatagcctggtgatcatgaatagcgccaacgagatgaagagcggcggcggcccggggcccagtggcagcgagacgcccccgcccccgaggagggcagtgctgagccccggcagcgttttcagccccgggagaggcgcctctttcctcttccccccagccgagtcgctgtcccccgaggagccccggagccccgggggctggcggagcggccggcgcaggctgaatagtagcagcggcagtggcagcggcagcagcggcagtagcgtgagcagcccaagttgggctggtcgcctgcgaggggaccggcagcaggtggtggcagccggtaccctctccccgccagggccggaggaggccaagaggaagctgcggatcttgcagcgcgagttgcagaacgtgcaggtgaaccagaaagtgggcatgtttgaggcgcacatccaggcacagagctccgccattcaagcgccccgcagcccgcgtttgggcagggctcgctcgccctccccgtgccccttccgcagcagcagtcagccccctggaagggtcctggttcagggcgcccggagcgaggaacggaggacaaagtcctggggggagcaatgtccagagacttcaggaaccgactccgggaggaaaggagggcccagcctatgctcctcgcaggtgaagaaaggaatgccacctcttcccggccgggctgcccctacaggatcagaggctcagggtccatccgcttttgtaaggatggagaagggtatccctgccagtccccgctgtggctcacccacagctatggaaattgacaaaaggggctctcctaccccgggaactcggagctgcctagctccctcattggggctgttcggagctagcttaacgatggccacggaagtggcagcgagagttacatccactgggccacaccgtccacaggatcttgccctcactgagccgtctgggagagcccgtgagcttgaggacctgcagcccccagaggccctggtggagaggcaggggcagtttctgggcagtgagacaagcccagccccagaaaggggcgggccccgcgatggagaaccccctgggaagatggggaaaggatatctgccctgtggcatgccgggctctggggagcctgaagtgggcaaaaggccagaggagacgactgtgagcgtgcaaagcgcagagtcctctgattccctgagctggtccaggctgcccagggccctggcctccgtaggccctgaggaggcccgaagtggggcccccgtgggcggggggcgttggcagctctccgacagagtggagggagggtccccaacgctgggcttgcttgggggcagcccctcagcacagccggggaccgggaatgtggaggcgggaattccttctggcagaatgctggagcctttgccctgttgggacgctgcgaaagatctgaaagaacctcagtgccctcctggggacagggtgggtgtgcagcctgggaactccagggtttggcagggcaccatggagaaagccggtttggcttggacgcgtggcacaggggtgcaatcagaggggacttgggaaagccagcggcaggacagtgatgccctcccaagtccggagctgctaccccaagatcaggacaagcctttcctgaggaaggcctgcagccccagcaacatacctgctgtcatcattacagacatgggcacccaggaggatggggccttggaggagacgcagggaagccctcggggcaacctgcccctgaggaaactgtcctcttcctcggcctcctccacgggcttctcctcatcctacgaagactcagaggaggacatctccagtgaccctgagcgcaccctggaccccaactcagccttcctgcataccctggaccagcagaaacctagagtggtaagtcttgctctgagatttgcccagaactcatgctgatttcagcagacttttgatgccctatgcatccctttttcttaactttctacacagtcatgaaaactcagaccagggccctgggacagtcacagtgaataattctgtccaggtgtgtttgctgaggtggaagcagaggcactgaccatgcattttagcttggacagtgaatctgagtctttctactatttccatgcatatcttaaaaaacaagttttaaaagtatttcatgtaggtcaccacgcttcttgggaaaataatattcataaatgtcaccaaaaacttctggactaatccccaaagatagtgaactgagctactgagtgtagtttttgtctgatcaggtgaaacacttaactctgtgtttcattcaggccaaagaaaattgacaaggatatcatcaaattaagttagcctctactaataagccaggaaaatgagtgatgtgaatctatgacaggaccctgaaacctgtagatgtggttgtggccagtcaactgggtgaggaatcactgagcctcagtaagttaagccagaccattgcaatatttgtgtggtcagtgtaaccaaggtgcagtttgatgtatgaattaaatgaaaaccatactttgagctaagcagatggtttcttcagtatcataggcacctgagtgttatctccggagtaggtacctcctaatggatgtacatgtcagttggtacaggttgacatttcaggtatgttttcacgtgcctctggtttgggtcatcacactgacatcttgttctggttatggcagtagacaggagtttatttctattacatggttaatcgaacttgtaggctgcttttactcttaggaggatcagagtatcttacagaagacataggagttgaagctagcacttctgaaaaggtctgggctttctcttagcttttccagagagcatggggaatttcctagttcagtgtgccaggggtggttgtgctatattgggggaaagtctgcattttattatagtaggtagccttccgatttcatcttgaatatcaaatactcttcactgtacctcaataactttctccaccacgactgggagctttatgtttctactctgcattcttcactaaggtattttggaccacaaaacatactcctctctgattccctattcacgaatcacagtctggatttttgaagaccaggcattccttttcatgaaactctgctttttgctgatgatctggaggcaaatgtgtatgcaaaatcgccccaatcagcctggcattttgtggctaggacagggcccctgggcattatgcacctgctgtcaggcataggcgcaccacctttagagggggaagcggtccacctggaaggggatggtggtcaagggcaggtgggaaatacttctttctgaaggcatgggccagatttctctttctgcccagcagttagaggtctactgaataagagatggtcccccgtcccatccctcccagttgcttttgaactcctgaagcatagctgaaacagccaaagtcactttaacttgttccctgactgtccattcaccctttctagtggtagattagcaacttctattggctggttgtcaaaacagtttgtgtcccgatgtttgaaaacggctcttgtctagaagagaattaacagggagatcaataacgacaggtgacttttttttccatttgccagaacgatgccatttgagaaaccagagggttaagtggtgtttttaagttagtgaacatatccagaggtagaaacgaggccagcctgttgtccagtctacctcccacctttaaacaggttttcagacacccgcagagcagagccagggaaaaatcccctgccggctttgctctctgaatcacatgagactggtgggaagtggggtgggtgtgtgtgtgtgtgtgtaggggggtaagggtgggtaaccaactggaaattatgggatcctagggacttttgagctttggttgagtgcttgcacgataagcaaagttttcttcttgtacagattgttacgctggagccttatctgtgacacccaaacatcagctcattgggtcaaaaatcacttgattacctgcaatagatattttgtctacagaaggccagacatcttgatggagtgagtcttttggctgggcctttctgtgtttgatagataaaagccccaccagctctgtctgaggttctaccaaactgatgtagcattctcttttctggactttgctgtgtctgtccagctactgcacaacgctatagctgcacactctcatgcttgctcacacttgcttacacttgccctcacacatgccctcacacatgctcacacttaccctcctatgctcacacaggttcccccttgctcaccccactcacacaggtctgaaatggcatgttcagcgttccagtcacataaccaacccctggccctcagacccacactagacactgagattgtttctgtgctgccctaccttcccacagagttaagcctttcgggcctcctgtggcgctttcttcatccttgctgaggaatgagtgtgtatgacttggtgtgcaggcagggggtgacagtatatctgcttagtagggatcagacacttgaaatttgctcagaaatagttgcattacacgcccagtgtgcaatggctgaaattcaggcacattcatgcttactgttctctgagatctgaacaaaatcaaattgcactgagcaaggatagtgctcaatcttttgttctttctgacaactaaaaattaaccagcggttgtttacttccctatataattctgtttaagagaatctggaccattgagacaccaggcttaaaatgttgtattaagatataaaagtaccttactttaaaaatagatttttattgatttatttcaaaattgttctgtcagttatatgtacaaaaaaaaaaaaaacaaaagaacgctgggcacggtggctcatgcctgtaatcccagcactttcggaggccaaggcgggtggatcacttgaggtcaggagttcaaaaccagcctggccaacatggtgaaaccccgtctctactaaaaatacaaaaattagctggcgtggtcgcgggcgcctgtaatcccagctacttgggaggctaaggcaggagaattgcttgaacactggaggtagaggttgcaatgaggcgagattgtaccactgcactgcagcctgggctacagagtgagactccgtttcaaaacaaaacaaaaaacaaaaacaaaaaacactggcctaattacctgtggggtgtataaagaagtgtaatacaaaacccttggcttcatggtgcttactgttttttaaaggccattggaattttgtttccttcgctttttttttttttttttttgatgttgactagttttgttgtcttttttttttctgagtgaaaaacgaactcatacacatagtaaaaaatccaaacagtttaacatggttttatgtggttttgaaaagtgtgtaaaaattttagtttggggtaaaccaaactaaaatttaaaagcctagaggggcactttaaaaaatgcatctgttggtgaatacttttaagtggaaaattcttttctagatgagaatgttgaaagctcagatttgtggggttatgagctcaggttgcatatgctgttttctgaagatggggtacccttcttctctcaggtacatggagaggatctttctggcaagggctcagcagctttgagatctgggaggaccccgagtcatttattttgggttctgggtatgactgatctgtttggggatgaggaaataaacactcagaaagtcaaagggaaccaaggacacactcatgggctctgcttctctagcttagttttctcctctgaaaatgtgggtattgtatgggaatgatctcatggggtcatctagttctgtctgtgactatgtaattgaagacatctgatttaaagcctagtgtttgtattagggtatcagaaaatgcgacaagacttcttaggtgtgggtttccggcactgaggccaaaactgggcacttttacttttgtgcttttgcttgagaccaattgattgatctgcctatcttctatctctttgccataagaaaggctctttgtaatttcatactgaaaaagtatcatcaaaataaatcatcagtaccatacctaagattatcattaataattagtctggtggtagagacagctggtaggatgccagaacattaacctgaacagtaaaagattcattctgtttaaaaacaaaaagcagggcattgtcccccctcagatactgaagtctagaaactgaggccttgcccacacagagccaaaacatcacttcaaagaccttgtcttatcaaagataaaagtattcagccagcttaaaacattttcaagtaaaggtgaggtatacagacaaagagagattgattctaagcgttgctacttatcatgcaaatgcttagactttgcaaaacatacagctcaagactcacccgcttttaggtactacaagaaaacattaaaccagtcagtcggtgtttttagagaaatatatttgaggtgttacataagtcattttcagaatttttgtttttaagtgctgaattgctacagagtcacttttctgattttgttggcacatacctgttaaatgcagttccagattagattagtactggctagtttatttatattcctaggagtattgacaacattgtttaggcttattttattttgtcaggtctcaatttagttatctaaaggtagaattttaaggtatttaatggaaagaattttatatcttggtggaaaaaaaactacagactttggataatcaggaggtggttcagaattaacttgggaagtcttctaaagcatgttgtgatcgcagcctcagggtagaaggttctgtggattttggtgggagaggagaccttgggatggtaggtttatgcatatggtactctcaactccatgacaaggccttgctgtgatttttcttttcctcactgggtagaattggcatcatgaaagatgtatttttcagccatcaggggagctcattgttaacaaaagtcacaccaaacccaactatgaactctttggtaatttgaaaagtggagtggcagctgcctgtttgggattttgtattaccagttctaagatggttgcccttcctgtgttaacttaccaaaccaagtgacgatggtgctacaggcagtcccaaacaacatggagcagaaacaatcagcatctccttcagacccatgggtctggtccatctgactgtggagggctaccttggtgatctggaagaatctgctgacctggtcccttgaccttgtagtcaaatttgactagctaaagttctgccagacagctcttcattttctcactgggcccccttcattcaccccaactttctggtgaagacagcagccctgatccatttttccaggagtaaactattatcttaaatacagttcaagtctccttggttgacagacaccataaatatatatgatctcattaggaagttaggcctctgtgcttcctattaaaaaataacaaaaactaggccaggtgtggtggttcatgcctgtaatcccagcactttgggaggctgaggtggatggatcacctgaggtcaggagttcgaaaccagcctagtcaacatggtgaaacctcgtctactaaaaatactaaatctactaaaaatacgaaagttagccgggcatggtggcacacacctgtaatcccagctactcaggaggctgagacaggagaaccacttgaacccaggagttggaggttgcagtgagccgagattgcaccattgcactccagcctgggtgacagagcaagactctgtctcaaaaacaaaaacaaaaacaaaacaaaaacttttcgatagcttccataattaacagtatcgaaatctgggtctgggacaggctttagagctcatttccttttttttttttttttttgaggtggagtctcgctctgtcacccaggctggagtgcagtggcatgatatcggctcactgcaacctctgcctcccggattcaagcaattctcccgcctcagccttccgaatagctgggactacaggcgcatgccaccatgcccggataatttttgtatttttagtagaaatgggttttcaccatgttggccaggatggtctctatctcttgatcttgtgatactcccatctcggcctcccaaagtgctgggattacaggcgtgagccaccgcgcctggcctcatttcctttaatatccacattttacagaggaggaaagcaagggtggaaaatagtcaataccattacaggacccatggttacacccttcaactaacaaacttcctcagtggataagctccttactcgcctttgcagatccacctcagctttgaacacagtgcatgcttttaaagcatttgttaaaggaatgggtgaatgaatgaaggagagaaaaaatccctgctgcattatctacccataaaagaaatacagaaccatctggaaggtgaagaacaaagaaagggaatcaagccctgggaatgcaagtttgttgcttattcctgtgactgctgccacagggataagggtgctaggcttgggtttaggagacttgggtgaaattccagtctacacatggctagcaagctctctgaaaaatggggagagtaagtgtgacctcatggagtggtgagcgttcaattatgtcatgtttataaaagtgcctagcactgtacctggtacatagtaggggtgtagtagtagtggtttccttttgttcagttgcagggttggggattactttaaggcttagactcaaagcgataggaatgaattgcttggtcagcagaagtgcacactgcacaccagcctcaagggacaaggtcaaccacgacacgtttgcaaagtgtttgtgcggggaagaccactctgatgtttcttacttaaaggcagggtcttccaactttgtctgatacggaatgacttgttacaatcatttcacaggcaagccaacactcaggcttttgactaacttgtctggcgtgtttctcaacaactccattaagaattcactgttagaaatctgatcttttctcctctgttgagctttacttgggcattttattgatttgatatcacttagtagaaacccattcaacaaaaggtatctcttcaggccactagtcaatacagcattttttatttgctgagatttttacttctattttgccccacatcagctggtaagttttataagtaagcaaaaagtaggagctatagacaataaggaagcagaatgaacctctgcaattcatatttatgtatgatttcacttggagtgggaggagatgttttttttccccatctttgaataagtagaaaaacatctcacgtaacctggggtggtggtggtgaattttcagctgaagggaatccttcctcgtgaagctcactgctatcctgttaatctagcattttacttttgtggtaagattctgggtggaaagggaaaatgaaatgatacagcatctcaaacataggca[450 bp omitted]aatctctcttggtatgctgctgagttggtgggacctgggcaattacaagggaggtcactgcacccccaggcagttcccagcaagtgttttttccaatttcactgacattctttccgggctcaactcaatttgttttcaacttctctatggcaattgatgactgactgtgtaattcagcaggatctcctgtgaagtgcttcttccccagttgaataggagctggtgtttgtctaagcctctgcttatgcatgaggtataatgctttttatatgttatataatgctcttacgcgttagctatctgaatgatagatttaataaaatatacctcataatattatggggaaaggatgacgactgttatagagaggaacttgggagtatcacttctgtaatccttatctaacctgaatctgttagcaggaaactgaaaaggcctgtgtatgacaatgagataaacaattttaatctcttagcaatgtcaagtggaaaatctaactacctgccagtagtttaagaaatggctaagagattttgttgggcacaaataatcctgagacccagattgctgagccaagggtaggaaaattggttttgctatgtgttacagctgggaagtgagaaggtcactgtttgacaaactactaaaaaaaccttatggattaaacattcgccagtgtaggggacattttgaatgtgttataattgatattttagtctatatgcggccgctgaacgctttttcttttacaaaaaaaaaaaatttatgaatttgagacagagtctcactctgtcgcccaggcaggagtgcagttgtgtgatcacagctcactgcagcctcgatctctccagctcaagagatcctcacacctcagcctcccgagtagctgggactacaggctcgtaccatcatgcctggcttattttttattttttagtagagacatctcttgctatgttgcccaggctggtctcgaattcctgagctcaagcgatccttccaccttggcctcccaatccgccttggcctcccaaagtgttgggattacagctgggagccactgagcctggccttctctttttcttaacctttctccttcatcatcatcatagtcatcacagcattaaacactcattaatattgaccatctggctaattgcaagtagttgaggagactcaagacctcctctgagaatgttttttgtgcttaacaagtgaacgtgcttgaaagacttgtgactctcagatccagcacttgacctcattgggcctctttggacttgggtatcctcaatctgtaaaatgggtatattgatagtcttcctacctcatgtggtctttgtgagtccaaataagacgtgtatacagtcatttggggacagtgaattatttcctgcctaaatgagtttttaattatgagtacgatgactttgcttttttacaaaaagaggatggacaagggcaagcactcactcatgaagagtattctgaccttgttgcttgaaaagaaattgctaaggactatgttaaaagcaatctctgcgtccacagcagagccagttctgaggtggacggagcagtgaggtcgggttgggatgaggagatattctggataacgccccggtttcacttcagccgcagcatcgtctcctcttgcctgtgtgaccatctcggccattgtagactgtggacgcagcctcctccggctgtggtttgcccattcgtcagtgggcatgcagatgtaacagacaccagggaaggctggagtgagcaaggagggggccccaaagcaggggtctcatgctccctgaacagggctgccagctgctgaatcatgatagggagactgcactgcactctagagtttgagggtacttaatgggggcatggacttttccagtaccttgagtggttttctcttctgtgtcatggaaagtgaa[450 bp omitted]tgtggaacagggagtaaaggaactggatttgggcaacagcctctagggaaggagtctggggtaaaggtcttgaggaatttgctccctctgttagaagtggtagatcaaagagactgttctggatccagaggctcacggaggctggaatgaaagagggcacccctgccccagtacttgatttggagcgttggattctgcacaaattgatgctcagcagttgcacagtgcagagcccagtcagctgcactgttgctatgctctcgggaggaccccgattgaccagaaggacatggtcaggagagctcggcaggggtttttctgcttagtacacgttatagagtcttagctatggaagagctctagggggaggggaagaaccctgaggtgtagtcctgggttgagtctaaactctgttacttcctatctgtgtgaccctagagaaaactttctgctcctcagttgcatcatctgtgaaatgtgactgataatacccaccttaaggctgtgagccttaaacaaggtaatgtgggaaatgcctagcacagcgtctggacatactaaatgctcgatacaatagcatggacctcagaggcagctgtggtgtcatttgttagtattttatgccgaacctgcgacctccaccattctctttgattgggtgagagtgaataagggtgtctgaggcagtgttgctgacttcttcccttggaagaggagaagtcatggggtctgggagctctttgacattgaggtttgtaggaagtgtgtgctgggggaggcttgctctgctgagcacagaagcaagatggtctgctggggagtgtggagcccgagccagccagacctgaacccacaccctcactctgtcctagaccttggcgtgggctgaacatctctgagtctcagtgtcctcatctctaacatgaggataatgagcctctctcagggggtgctgtgaagatgaaaggagataatgcagctcaagtaccgggtgcagaacaggggtggaatagaggacacccctccaccagttgtgaagagcgtttttaagtggatgccctaatcgccttcaccaattggctcgagtcacgttgtcccaagtacagctaattgtcgaagatgatgacaaaacaggcagcaggatttatttttccagggaggttctttagttgcaggagaggcctcactttgttactagggattggaacttgaagtttaaaaaaacaatcccctgtattcagctgccggcaagaggtgtcaggttacacaccctggggaccagcctctttttattctgttttgtaggtggaaactggctgaggtcatccagacacaaaatgcccagcatttggggtgtgaaagcctctgtcccttccctcccttccccttgttcctctgctttcttggtgcatcttttagagtcactgtagctcataagagagccaatgaaatatatacatatatatctctctatacacacacacccacacacacgtgtgtgtgtagaacaacactactctgtatcggtgtggcttttcttaccaaggaggtctctggacgtgtgtgatttaattagtcttcgtctcttctctgtgccgcatctggtgccaggccaggcacgtgcttattaacacaggctctctctgagattaaggagatgttttatcttactgcacacccagtgaggcccgtcacgtgtccattcacagggactcaggtccaggtggctctggggtctctgaagtacactgtgcgtcaccctggcctcctcttgaagtgagccacagagaacctacccaggacttcccaagtcacaaggccatactgtgcccttgtcatctgggctgggatggtggagtggaaggaaaagccagtcaggtgactggacggagctgatgaaccccgagcacaccagctcacttccaagtcccaggagggcctactggaacccatgcaggatccgggctggatggctacaggttccatctgagcagcacggactggcgtcaccacagccctgggcatcctgcctgccaaaccctggtctctactctgctacacacaggatgtgtgaaatggaactctctccttcctttcagctgtaatgggtggggggcagggggagcaggtagcctgcagggttgacccctgggggtttgcatcttttctgtccaggatgatctattcaaaccttttctagccccaggacccattaggcatctgtacagagcttccaggctctgaatgtgcagttttgagacgttgcccctttctagacatatgtgtctcaggctcagcctgccctaacacctccccaagccccagtttctttctgccctttgcaggatgaagggactgatgtctgggaggattgaaaccacgaaaggagcttgttagcacgtggcagtgttgacctcaggggtggtctgatggcgaatgtgctggacagtaactcccttattgccccaacctggaaatatacacagaatggtaattagtttcgatctcagggtaaagccatatggagcagcgtctgggatgctgtttaccttgcggtattacactgtacattaaaaatcagctgctctctcctgagagccgagccgtctcccgcctctgcagactgctggttaaccccaagaagctgaacggagccctgcaggttctgggtccttcctggcatcctgtctttggcattttgaactggcctagattttctggtcagtcaccattggcctcaaataccacattcccaggggaaggcaggagagtctcctaggagttggagtggcaaggagccccaaggatccatgttgtgcttgaagggcgagtgccctgaatgtaccaggtggcaggttgctaggaaccttgagcctggcctctgactgtagtttgggaacactgactttgcaaagaagacttgagcaacttcagaaaatagtttatggctgggtgcggtggctcatgactataaccccagcactttgagaggctgaggtgggtggattacctgaggtcaggagttcgattccagcctggccaacatggtgaaatcccgtatctactaaaaatacaaaatcagctgggtgtggtggtgcgcgcctgtaatcccagctaatcctgaggctgaggcaggagaatcgcttgaacccgggaggcgggagttgcaatgagcccagattgtgccactgcactccagcctgggccacaagaacaaaactccatctcaagaaaaaaaaaaagaaagaaaagaaaagaaaaaaaggccaggtgcggtggctcacgcctgtaatcccagcactttgggaggctgaggcaggtggatcacctgaggtcaggagttccagaccaccctgaccaacatggtgaaaccccgtctctactaaatacaaaatattagccaggcgtggtggcgtacgcctgtaatcccagctacttgggaggctgaggcaggagaattgcttgaacctgggaggcagaggttgcagtgagctgagattgcaccactgcactccagcctgtgcaataagagcgaaaccccgtctcaaaaaaaaaagaaaatagttcagtatgaccccatgaccagatgtcataaaagggaacataagttccccataaaggtatttaaaagtcagttgcccaaaggataggatggaggagtcctggctcatcaatatttcttttatttctttttttttttttttttttttgagacagagttttgttcttgttgcccaggctggagtgcaatggcgagatcttgactcactgcaacctccgcctcctgggttcaagcgattctcctgcctcagcctcctgagtagctgggattacaggcatgtgccaccacgcctggctaattttgtattttttttttagtagagacggggtttctccatgttggtcaggttgggctcgaactcccgacctcaggtgatccacccacctcggcctcccaaagtgctgggattataggcgtgaaccactgcgcccggccaatattttattttattttttgagatggagtcttgatctgtcgcccaggctggggtgcactggcatgatctcagctcattgcaacctctgctgcccgggttcaagcgattcttctgcctcagcctcctgagtagctgggattacagacaggtgccaccatgcctggctaattttgtgtttttagtagagatggggtttcagcatcttggccaggctgatcttgaaccgcgtgatctgcccgtctcggcctcccaaagtgctgggattataggcatgagccaccacgcccggccgcgcccggccaatatttcttttgaaattcactgggagttataattttactaccagttcaatatgaattaacaggtggtacggctgtaaaaaatactaaacagtcttaggatgcacaataataataaaaataatagcagcaatgatttcagaagtgcctattatgtgccaggcatgttccgtcaaatactttatgtaatttttgcagggcattcattattttcctccttttagagatgaggatgagacatataaattgttagtcccaagcccacagctgatcaatggcaggactgggattttaactcatctgaatctcccaagttcctaccctgtcctctctgccacccatcagctgtcgcctggagaacagaggaaggtggctttgaatttagttctgggccttgtgctttagggggactggggactaactgaactgaatgcagaggtggatgggtggagcaatggggcctctgaaccacagccctgggaggtggctgagggaattaggattggttgttgccgtggaaatactggaccccgggggaaagagagtgtgttcacataggtcccctggagtaccgttttagtctagttaaaaattttctacttgaggaggtggaactaagagtggattcttttccttataaatgaatgggcctttgtttaaaaaagggatgtaatagatgcaactgcagcaaaagtgagctcctggagctgcctccttaggctgatgaactggaagagaactcttaaccctaaagggcaggaaaaggttaaagctcctcattgctgcagacatagcagggcaataagcccctgatagcagaaaaggggagcaccccaaggcactcactctgtaatccgggtccccagggactcagcctgcctcccacagggagaagggcagatctgcccacgggaaagagggtttcagcagatacagagcatggatctgcacgtgtccagatgcctcaggccacccagagagagcatcgtgggcctctgtgctgcgtggggcttgctaggtactgctatactgtgaagcacccaggcagcctggagctgcacggcctgcgcatgagtccaacaggtacaagctgttgtgggcttataatgtcagcacctaagcaggaattgaatgcaatcgagttgagttacctgcctccaggtaaattaagttaaatcctcatttaaattaggagacatgggtgagggcctaaaggggccaggacacagaatgcccaggctttcaataggtgatattctcaataggtgatagaggtgaagggtgtggcacctccctggaaaggagcacagctgcggtcaccaagtgaggctgtggcctccatcgtaaaggccatgtggggcggcaagtgaccgaccacagggcacggtaagtcagcagggagcgaccaccaggattccttaccaaagttggattcctcagtctctgctatgctaccctcagagattcagattcaattttttgttttgttttgtcccgctctattgcccaggctggagggcagtggtgtgatcttggctcactggaacctctgcctcctgggttcaagtgattctagtgcctcagcctcccgagtagctgggattacaggcgtacgccaccacaactggctactttttttgtgttttttagtagagacggggtttcaccatgttgcccaggctgatctcaaactcctggcctctaagtgatctgcctgcctcggcctcccaaagtgctgagattacaggcacgagccatcgtgccggcccccgattcactttttaggaggggacatctgtgtcatttccaggtctggctattttgaataaagcagctgtgaacattcgtgtacacatttttgtgtgatgtaagccttcatttatttgtgataaatgctcaggagtgcagttgctgggtcgtacagtagttgcacattcatttcatattttacgaaactgccacactgctctccagagtggcttcaccattttacatcccacagcagtgtatgagtgctgcagcttctccacatccttgccagcgttttatttagtagctaagtagctacttttattttagccactctggtaggtatgcaggtatgcaaggccatctcattgtaggttctttctgtgtcttgttttgttttgttttttttgagacagggtcttgttctgtagcttgcccgggttggggtgcagggggcaatcatggctcactgcagccctgacttcctagattcaagggatcctcccgccttagcctcccaagtagcgatttataggacaacaggtatgcagcaccatgcccagctaattttaaaattattttgtagagatggggtcttgctgtgtcgccaaggctggtctcaagtctcctggcctcccaaagtgctgagattatgggagtgagccaccacgccagccttcattgcagttttaacttgcttttctctttttttttttttttttgagaagtcttgctctgtcgctcaggctggagtgcagtggtgcgatcttggctcactgcaagctccgcctcctggtttcaagtgattctcctgcctcagcctcccaagtagctgggactacaggtgcccgccaccacacctggctaatttttgtatttttagtagagacgaggtttcactatgttggccaggctggtcttgaatttctgaccttgtgatccgcctgcctcggcctcccaaagtgttggggattacaggcgtgagccaccacgcccggccaacttgcttttctctaatggctggcgatgttaattttttcactggcttatttaccgtctccttctgtggaatgatctggcttagaaaatgaacaattccacagaggtgctataaaaacgggcagggtgtcaaaagccttggcctcctgtttgggctttgcctctcagggcttcaggtgaaggtgtttggtcatctctgaggtcgcttcctgctcccagtgtcctctgactccaggatagagtcatgccccttggcgggcagcccggtgggagctgtggtgtgtaggaggcccggacggcggcccctgcccacatgccatcacctcccagctccgtctccacaggagcttacccaggctgactcacaggtgctgtattatttaaggaaagttgtttattgattgttggggcctggaaataaaaagaaaaacaaagaagcagatgcagagtgtctccttgccacctccctctgggcgcctccgagatggtggctgaggaccaggccccactctgggtgaggcttcctttccgccactggtgcttccctttgtctctctgcagcctgggcctgtgctttgggtttagttttgcaacatagtcatgctgaaggtcccagagatgcttcccctttttattgtaattaagccaaaaaagaaacatggggtatgtaatttagaactactcataaccacagagatggaaggaattttctctttaaagctagcactagatttcaccttgcaccctaggccacttgcccatgtccttgccatcttttaactcctgtctcaggagggggcagcagaaagtagtcttgagagttaatgggattgctactagtttgagtacctgcgggaggatttggtctccatcgagaaacaggggaagatgtcatctgcttaagaaggtatttatgtttgtttttctgcccggtgatatacatgaacccggtagtgtgtgaaataaagcatcttagtcctcatttcagtgaatcagaagaaactaaaaggcatggttatttctccctcggtatgatgaagtctatataatatttgcaaaatctcctttggtgaatttgtataaacaatctatcacaaagaaagtattgttttctatatgggcttaaaggatttttggaaaatgggcagaggattttcccatgtattccctgagcctggggaatggaaatcatctcatggagacagatgaccacaggctttccacccagtccccgtggcccactagaattgtccagcatgtttcagtggttatttgattgggctcaagaccaaagttggaactgaatcaaatgatggtttggttcagaatatttttccgttttggtacgttttgaaaacctaggtttgatgctggttgcagttgttcaacagattttttaaaaaaaactttgagtacaacacacactgaggccttttgcgggtggaggtagggaaagcatcaggataaatagctaatgcatgtgggacttaatacctaggtgatgggttataggtgcagcaaaccaccatggcacttgtttacctatgtaacaaaactgcacatcctgcatatttatcctagaacttcaaataaaataaaaacattttaaaaagaaaataaaaagagaagatttttagaaaaaaataaagaaaaagattttagagccacagaatctctttttagagtatgggaagaacagaaattctctgggtagagcaatttttgacagaagatgatttgggtttatatgagatatacaaaactattcttacgcatttttactgcatgccacaacttgggatttcttagtattttccacatcaaccacactactttaagtcgtctggttagaagtgtatgaacatgttataagctcagaaaatggcatgtaaaagcaatagagggccaggtgcggtggctcacgcctgtagtgccagcactttgggaggccgaggtgggcagattgcctgaggtcaggagtttgagaccagcctggccaacttggcaaaacctcatctctactaaaaatacaaaaattagccgggcattatgacgggcacctgtagtcctagctactcaggaggctaaggcaagagaatcacttgaacctgggaggcggaggtttcagtgagccgagatcttgtcactgcactccagtctgggcgacagagcgagacttcatctcaaaaataaatacataaaaataaaagcaatagagtattacagtgtgaatcaggaaatcttgcacgttttgaaggtttcaaatgacttggtttaataaagaaagaaaacttgtaatacctagaaaattgacgttgaatgggaaaaataaaacaaaatattgctatacaaaaacctcttgttacattcctgactcaatctgatatttgtgtttggtttatttgaatacataaaatatattatggccattggtgagtagttagttcattttgattcaagttacttctccagatggcatcattgttataaaatttaatttccgtgaacttacattcttccaggatggttgtgtgtgttgatcttctggtttcttaaatcttctgggtcagagttactatacttgcatttgtgcttcgcaatgaactagaataaatactttctattaaaaccagcagaggttttgctaaagagaatgcacgcacaggccttgtctttttggtgcaaggtagagggttttatctactacctgcgactaactagctttcagaaaagagtgaactaacgctttacccatggagttcacaaacgttcatggtgtactggcagtagggatacatgtacaagcatagcttagttcctaccttctagggattcgaagtttagtagaggaggcagattgtaatacctaatacctattatgcttttattatgtggtagtcattgaaggagaagttaagtgacatgtctaaaatcatagtaatagaagagtcaggctatgaaccaagatattcttagagtttctcatcgttggcatttagggacagatacttttcagttgtgtggggctgctctgtgtactgtaggatgtttagcagtatctctggtcagtagcacctccccccatttgtgacaaccagatgtctccagacattgccaaatgtcccccatggggagaatcgcccctgattgaaaagcactgctctagagcctgctcttgtgcccaccactctgtactgtcttcccagatgagtgaatgctatgggagagaataagcatgtttacagtgtgaagtcccaattcctgctgacagcagaggacagatgccaacactacctagggtggtggagaagagaaatattctcagatatggtgccattggagttgaattttgaagggattcacgtagtcagagaaaaaggaagactatctggagtaaagggatgtgtgtgcacaaaagcatggcagcaggaggaagcagggcaaccttgaggatgacaggtagttttctatagaccctttaatttactcttcagtgctgttctcttgtttcctctgttcaaacagcaagccagggttacagcagctcttcatgtcattcttacttcaaatcaaaggtgttgtgttagtcaggatgagctaggttatgttgcagtaacaaacagccccagaattggcagcagaaaacaagaaaggtttattttctgctcatgccacatacctgatctgggtcagctgtggtctcatggtgctggttactgtacagagggaatgagaacatggtgaatcacatactgacttgtaaagctacattccagacaagcaacacttaccacttctgctcacatttaattggccaggtaagtctgctgtcctcacctaattttaaggggccaagagagtagagtcctaccatgtgcccaggagaactagaaatatttggggacagcactcaggtgtaccatagatgtcagaggctcatacctgaaatgttcaagcacacacaactcattgtctgctctctgagagcctcctagcttggctttcaagaagggccctttgccatagacggtcaagattttaaaaaatatcaattatctgagtaagtcaaggaaagtccttgtgggaccaggtcacaagccctcagtttttagagtcaggatgttggggtgggagtgatagaactgattgaagtcaatatagcctggatgtggtagattgttttatgtggaggggtagttgttcaggacactgattgttatctgaacacccaggatgctttctttggctgtcactgtagtaaaaagaacagttttaaagcctgagccaagtgtcaagcagcaggagggtgtccttcgtgaactctgaatttatggggctgagtctgagagcgaagagatgccaacagtagcgactgagaacattctggatgattttagtaaaccccgaacaaattccttatacaccaaggagcattctccttgttagaaattcctccagaccacgactctggccctggccctggggtgaggagatagggtgcctggccgtagtggatctaaaacgggatgacaccggaaacctgtggggaggacgccgtccttgtcgccccttgacagagggggcacagaggccttagagaaacaaaaataaaaatagcaattgtttgccacttccctccctaataaagtgttctctccaaacctggtttccactctatttctgaactgtttcgccccatggtgtgtaggaagccagggtaaatgtgggagtgggaggaaggggacacaggcagcaactcaaaggaaggcagaattagtagccgtctgggaaccgggggcgggggcattctagaaatgcgaagaggtcgaatagccagctgggtccggagtctcctcacctctggtgtcttagcggagcatgagtgtgtatgtatgtgtgtgtatatgtgtgtatatttatttgcgcatatgcacgtgtgtatgtgtgtgtgcatgcatgtgtgtatatgggtaagtgtgcagtgtgtgtttacgtgcatgcatgcatgtatgggtgtagatatgtgggtgtgtagataagtgtgggtgggcacatgcgtacacccactggaggggtgcgatggaagttgtgtgcagctgcgtgagcgttactgaccatcctgtggtttgctgatagctgcttaatctgggttgtgtgtttcctccctccccaagcagacactcagggtgctccgtgatgcaccgggacgctaatattttcacacctgcaatctgtattgttcttttctccttcggagagcaatattgcccttctgggtgcttaagcaggaaacacaggaccagataatttaagaggagccttaatgctcagggccagaacagacagacgggcctgaacaaggtcacaggccgtccagggagtgcagggctagggcaatgccagcccacttccttccagccgagcgctcccttcacggtgaccaccttcccttcaacgtctttgtttcccggctgtaaaatgggcatgttgcatacagctatgtaggaagtgtttgcaagtgcccaggctctgggaatttgagtaaagaaggccctttgtcagtggcgcacacagcctcggctttcttcaccttgtcagttgtccattcaggtggagtagctatgaacacccacttacccttcacgtatcctaggatcaggactgtgcctgcagtgaccacgaaggctggggagccagatggctatggacctcacgagggcctgccagttcccaggaagggggtctgggctgccaggacagggggcagcagcaggactcagagagaggggttgcctcgcagtgagccctgcccatctctcgtgcggtgggaaggtggtttaaaccctgcccttaccccatgctctgaggtctccggaagacacaggtgctatatataaaactaagactattatctcactcttgctaagtttccaccctcgcggcttactgtacaccaccggggagaacatttcctgaagcccttctcccggagctctgaggccagggtgagggacgccttctgagagagaaaaccttccccgcagggaggccttttgcagaacagggaggagaataaaaatgtccaggcaaatgcccaacctcaccctagtgagcttcccactagctgagctggggaccaacatggtaccagcctacagggaagcccctcatcttcccccttttgccttttaacatggagtctctgggtcagggatggacacggtggtgagggatgctaagtatgagcagacaccctagtgggttcagctcaaactccagaggggatggggatgggcaacactcctgaggaacttctgttcagcactcgtcatcgccaggacaaatgatgggaggtccaggttgggaggtttccatttaagcgttggttccttgcaatttccctgggtagttttttcaaacaacccatgattgtcattttcggtcggacgatccccattgtttgggactgtccagcacactgaaggtcactgagcatctgggcatctgggccttggagcactatttgccattgtgcaacatacacaacacacacacacacacacacactctctctctctctctctctctctctctctctctctctttcaaaacaccctctagggctggaggcaggtactgcatctggttaggaaccactgcaaggaattatttaccttggcaacatctcaagaggatatcgaactggagtcaaaggattttggggaggtggagtaggaaggaggtagaggatgttaggctgagaaatgtcctgtcagcttggacatggtgttggccaaatttttttaagtgaagaattttcattttttttgtcctatttatgagcacccaattgactgagcaccctcagttaattggagaatcttgtgcattttgtttggctttgttttcattctttcttaataagaatgtcttaataagatgtctcttaataagcactattacctgtggggccagcttcatgaatgcagttgcacaggccgcatgctcagaagggccctgcttttggggttgaatgcctggcccattgctgccttgaaattcttaataattctttgagttggtgtttgtaagtgaagtccagtgggacaatgaagcatgaattctctgggctccagtcccacctgacttccttctccccacccctggcaactactgactcttctgatcccatcaggggcctgggtgaaggttcagggagggatagagttggcgtcactggtgtcccaaggcagggtgtggtggccatccctaccccaggctggcagggccaaaaagtggacaactgcatgagaatccagctcactccagatccaaataccaagcgtgtcccagcatgagtgtgtaatcgctttgggtctgcccaggcaggtgtgtgggaagaggggacctctctgctcctggcccagcacctggtagaggacggcagtagacgcttaagagtggccagagtcaaggggcgggatcccagcatcttgtgagactctgcactcattaaacagcaaataagaaacactgtatcaagttgagagaaaccctgcagaagaaaggaaggaaacggtttattttagtacgttttatggcacttttttcctgctttttgaacaagggcgctgcatttttactttgcactgggccctgaaacttacgtagctggcccctacttgcttacttcattgctatctgcagtttctgtttattttctgtctcccgtttctaaaaagaaataactagttaaaagggctcaccatgaacacaggtgcttccatttgtttccccctttctgttcttctgagggacattatcaccagccaatcaccagctgccccaccccagacttcttttccaatgctacctgttagcacggcaccttctgaaggaggccgtgagtcaggggagaggagacaggggcagggaagacagatttatctgtcactgggatgtggctgaattttgtggtgggtgggttgtgaatcttcccattagggagtgatttcttcccaggtagttatgagctagtgctggccccaggcaggatgctgtcaggatactagacagggaaccataaagcaaggttgcaagaaatgaggctctgctctcatcagcaagctttactaagggactctcttcaagcagggagatagtgctgcaccaaacaagttaagcactgtccttgggcaggagtatcatgccgtaagacatggcccaagagagaatgacagtgaggaaacctaattgcaggtcaggtgggcctgtagacagggacaggtgagggctaggccctgcccactgccgcttctcaccgttggtccccagtcatggaagtttcatatttagacaaaggaaggtcagggaagtatcacgtcttctgctttacctaggaagttcttgttggggggaagttggatgtcaggagccactgtgcctgcctctaccctagtcccctccacagcctgctgcatagtttccaagtgtcccaggaccgcagtgacacccaccccacccatacattttaagtgttagccacttcttgtctgttactataaaatgcacatcagacattcctagacccatcggagacctggagaggccagacactggacatcctcctaccactgggccagacacacccacggcagcccagacaggcagcccagggcaggggaggccatctctgtttctggatgttgctagcctggtgcctcgccagggagggggtgcagccagaataaaggcatgagacatactcatgctaaaaagtcacttgttgtttatctaaaatccaaacgtaactgggcatcctgtactttttctggcagctctaacccagaaggcagttttgtcacagcctttgtgaaatgggtgaatccagaaaggagacagctggtggcccagaggcctctggaggtcccctattgaggggccagacgtctggggctctgctgcccactgctgccacctgcttgctgtaccatctggagttgttctgaggcctggtgtaactcgtgttcaccagtgtcttcttccgtctcccttaggctctcccccagaatggaatacagtgaggggcctggcagaatactggcctagggcagcatggcctgccaggcctgcatcagaaagctgctcaggcttgctgcctcacgagttaagatgctgtcagctgcaagtatcagaaaactgcaacccagtagagttgaacaataaagaaaacacattctttcaccttgatcagtaagtcccagcacaggcagttctagcattggctaattcatcagcatagcagagttactgaaagacctgtgtcctctgcatctctctgccctgtctcacaacgtgttgactcatctttcctcgtggttgccagatgggtgctacagggcctcgtgtcctgtgtggaaatgataatatcccttggaggaaaaaggggatggctcttcatggtgtctaaggccgagacatctttttcagaaggctcccagcagatatcccctgtgtctcattgaccagaatgtctcgagttactcgtgcctaagtcagcctctggcatgggagtggcttataacaattagtattgactctgggagtagctccaaagagcatacatttgggtgggtctcagttaggtcccttgagctgttattctaccaacggtttgaggcaggtttgatttattttttgttctttttggtttttaacaaaaacttaaacattacagagaaagaagctaatgataaccatgactaaataatgataaccacgactaaatgaatgatttaactcattctaggtatttacaatcgttgtaaatccaatttggtctttgatcaattgcctaattttgttttacataattgcaatctgattgtactagttttatcttttattgttttaacgtcatttcatacagtaatcaactgtgtggtctgattcctgagtgtgaactttgagctactacatcatttacatcatcttactcctacctttggtgggtagtttccatattttgttgcagttattgccatatgcagccatgagtatttttgttaaaatgacctcttttcttctccctttagtgacttcttgggaagtgttcccctcagtggtactgctggggcaacgtccaataccaagaatgatgtatagcatatttcatcttcctacactactctctggaaagactgagccaattacggggtcatctgtaaagtctaagtgctgcagtttccctacgaccattggattttgtttgtagtttgatattgtcttactgtcccttgaagttgtaatttgtaattctttagttttcaagagggactctacatgtttccttgtgatgatggccttgagttactcatgtgtacactgcctatttatccccattgagcccccactgcccgaacatgttgatggcattttatatagtaagctgtcagttacttaatgtacaaatattcttccattccatgtttttctcttaaaattttactttattggccaggcgcagtggctcacatctgtaatcccagcactttaggaggccaaggcgggcggatcacctgaggtcaagagattgagaccagcctggccaacatggtgaaaccccgtctctactaaaaaatacaaaaattagccaggtgtagtggtgggcacctgtaatcccagctacttgggaggctgaggcaggagaattgcttgaacctgagaggcggaggttgcggtgagccgagatagcaccactgcactccagcctgggcgaaagagctaaactccatctcaaaaataaataaataaataaaaaataaaaaaagattgtactttatttggcaataatgtttttattctgaattattctactaggtccctttatttccttgtgaaattgttcttaattgcgctggcctggaaatagagcccatatggtactggagggtgatggtttttcataatttttcttatgcaaccacccttagtgatgagtccctagaggattgaactgtgcctcattctgtggactggactttttggaaacccctttttgagcccccaggaagaaatttggctgagagctgatgcctggatgctagccagctggctgctggccatatccagccaccccagtcccctggccatctgtgcacctcggcaacagagtggcgactgacacacccaggcccagaaagccagacagactggcggctggaaacttcatggaatccttgtaattagaaatggaaaagacctgttagctcgagtggtatcctcctcctcctcccacaggccccaaccagctttagaaggtgacatataatttgccctgtcacctggagcactcaactgagttttctgggtcttatctgtgaaatccaagagctggaccaaatcagtgttttttaaccccttttgggtcttatgccattttggaaagtggtagaaagccacacaccctttttccagagagaggcacatttcacaggccatgttgccctttcaggacattgataacaagaagcctgtctagatcctagcccacagtcttcaggtttggaacccaaagacttgttgatctctgaagtccctctcagctcagaaaacccacattctagaaagttttctgtcaagaaccctaggtatggaaatggataaaagggagtctcttgtacttaacttggaggaaaccactgtccagcccaatgggtttcactatcaagtatttttatttattgttttatcatttattattttccaggattgagttcaacttgtggtaccacgttctttcccatcatcttaatctttctaaatttcgtactgcctttgatttaaacaattgaactcttacaggtttgtggagtggaaatgggatttacttggttttgaccttcacctcacaggagggggatcatctttctggcaattcccagcagatactagcctctgcctgctgaccctcagcctcctcttccagccctttagcagcttggaataagaggcaacaaactggttgggttgatgtttatgtgaacatatgggtgcttgggagttggaagatgtgaggggaatcccttctgatggctctacaagtgctttcccagcactctgggcttgcatggttcccagggacttcagagtttctaattcctcaaatgacctgcctgacagggagtcctaagaaatgattcgggcctcaaagatctgtcctcaggggtcaggagaaaacatgcagtataagttgatatagctggagaggggatgcctgcaacctccaactgtggaggccagcctagcctcccggaatggggtggaggcagtcacagatacaagtctccttggtgggaaattgaaggtattcaggcccgtatgtgcccataggcacatctgcatatttggatttgacccaggaagcttggggaaggagggagaaaatcagaagctttgacatcattttttttttttttttttgagatggcgttttgctcttgttgcccaggctggaatgcaatggtgcgatcttggctcaccgcaacctctgcctcccaggttcaagtgattctcctgcttcagcctcccgagtagctgggtttacaggcacgcgtcaccacgcccggctcattttgtatttttagcagagatgaggtttctccatgttggtcaggctggtctcgaactcccgacctcaggtgacctgcccgccttggcctcccaaagtgctgggattacaggtgtgagccactgtgcctgaccgacatcaagttgtatgtttctggactctcctctcttcctctggccatcagaatgttctcacatcaaaaatgtgagatgagggataaaggaattagcacctaaatgttttacataatgttaggataattttgctctgtgggagagtggcctgaatgtggggagcctttgagtaactgacctataacttttcttaggcccttctggttttatcccagttactgatgctgttcttatctcctatctattctggaattcatctctgaacatttaatacatttggccaagcaagagcaatgctgtgattcttttaaaaagtacaagcttttgccagtacttctttcaagttgtaaattttatgaggagtttgttccactgtgcaaaggagcctctgactttaagaaaagtcattccagctcaagatttcaaatgaagtcgaggctgtgtgtagtcacaggttttctcatgtcatcggtagagataaaagcctcttagttttagactgggcacagcattgttgaacgtccattacttactgtttaagtagccaatgatctctgaaaaaagcttggctgtaaagttggcagaatgatgcactgctttgtttcaagccactgtaaactgtctttcccagtgtcacttttatctccagtgcttttgtcacatgtttttgctcatttccccaaagcggaaaaatattgcattccccagaatgacaattttcattgctgcccgctcaattcagtttttcataaatgcccaggaaataaactagctgagttattctccattctcacacatcttcattagcacacacgagaagcttttttacagggaattctcgtgttgaccaggtatgataacctgttgcaatgtgggtagtcttggttatattaatgtttttaaagataagtagtgttattactttattggtcatgtataattacatcggagatctaattattgagagttaacaatgctttgtaattggtattttacggcatgctaaacatttttctgaagtgcttgtactattaatgtttatattctttatttcgtagtcactcttttttcatactgtaaaggtaaacggaattcggcttaagattgaattatcaaaaattttcaggggtctaaacaaatagtatttagagtccgaccctcccactgtttgagatctaggaaaataaaagccttgggcggatgggtttcgggcagaaccgctacgctctgcaagctgaccgtggagttgggcacagtgtcatccaaagaaatgaagattttttttttattagctcttgaacaaaattaattaaaagttgttactcttgggggtgagggggacaaggaaagacaggatttgggagcctgctgacctacagttcaaccctacaaaaagtatacccattttgcaaatgaggaaacccagactgaaacacatcctttctcccaagccgggagctggcggccagcagcgctgagattcttttcgtaagcagcaacagcagcccccttgtctttcccgcctgggggagcgcaagccaggggtgcaggtcagcatttcaagccccgctactgcctctgctgcgggcccgctagcgctggcgaaggcgacaggggcggccgccttcccgtcacgtgaccggcaccgccgccgagcatgccgggagacggcgccccctccccggccgcgggcttccgcgcgtgggcggcgggcagagcgcgcgcgggaggagagaggaggtgggggccgggcagcgacaggggaagaaaccgcggcgaagaaaagccccctgtagagcaggccctgcttcaccgccctgcccgaaatcccccgccgcgcccctgcctcggccagccagcgtcgggcggtgggaaccgggcctgagctgagggcggagggactccggcgccgtccgttcattgtaaacaaatcgagtgagaaatggaggcacgcctggttcctgggtcccttggtgcaggctttcacaccccgggtgctagcactcggtctttctcctgcgtaggggataggattgtgtgtgcagtcaggtttttctagtaatatcttgcactttttttttccttcacccactcagacattccccatttttcctcataatcactttctttcgcttcagcatacacacttagcccttggcaggcaaagtggaatctcgggttcttgtcagacctcaatgtttaagctgctgaaacacagggcatatttggtttagatgttttactgttatgaaaataaaccacctcctgcagttacaccagctcagattttccctcgatagggtcagtgtggattatctattggaggaaaaatatttaattagaaaggaatgaaattctcttagttccttgaggttggaaggagcttaggcaaggaacagttagttaaaggtaagcacaaaaaatgccaggggaccaagaagccactattggaatgcagtatctgttggctgctggtttagcacactgccccaggcttcccggttgggactccactcaggtcctagactgacaaaatgggaaggcaccctcccaatgggtcttcattaccatctgccgaataaagagaataccagtagttgtatttcgtgcatttcttggagccaaatgattggattaaatctagtcccttactgtgcaagcgtagtcaattttggtcatctctctctaggcctagtgccagttgttgcctgcctttgtaaccagatagccacagtgaggtcatcagaagaggataggcagcgctgcagaagggaatcctttttctgtacctcaccatgatgaaataggggtagccgtcaagttgaactttccctttttttttttttttccgagagggagtctcactgtgtcgcccaggctggagtgtagtggcgtgatgtccgctcactgcaacttccgcccccctggttaaagcaattctccctgcctcagtctcccgagtagctgggattataggcgcccaccaccacacccggctaatttttgtattttttagtagagacggggttttgccatgttggccaggctggtcttgaactctagacctcaagtgatccacccacctcggcctcccaaagtgctgggattccaggcatgaaccaccgtgccgggccaagttgaacttttctcttgggggaataatttccctgctcaacatagacctggtggaattttcttgtctctctcttccctggcattttctctggtcttaggcaagcatttcctgccttttctgattccctctctgtgtgtgcatgggacttaggggaggaaggaggagggagttttctgttaagggagccgtgaatgagcaggaaatggctatttggtaccagttattctgcagaattagggagtgctgatgctgacaaggagtcagaaggattcagtcatcatgacatctgcagtcacaactgggtgggttagtgagcgcccctgaagtgtgtgtactcatttcaggcgcagccagcagcagaatttgggaagactgtcccacccctcctactccctgtgtgctgacagtttgctgtgtgcgtctccatggctctgtggagcttaagagattaagtccttggagaaaatgggtaaagtgaagttttttttttttttttttttttttttttgagacggagtctcactctttcgcccaagctggactgcagtggcgctatcccggctcactgcaagctccgcctcttgggttcatgccattctcctgcctcagcctcccgagtagctgggattacaggcgcccaccaccacgcccggctaattttttgtatttttagtagagacggggtttcaccgtgttagccaggatggtctcgatctcctgacctcgtgatccgcctgcctcggcctcccaaagtgctgggattacaggcgtgagccaccgcgcccggccaaagtgaagtttttaagtaggactgttgttaggaagatgttagcacagttagaatttgtaggaattctactgttggggtgtcactttctgttctgttgaaatgatacttcttccaaaagcaggagttctgagcttatatagcagacagccttgctgcggctcacacagaccctgcgtggctagcttctggtcagagtgccaaaagcatttgaagtgcctggaggtgtgttagcattagaatcagtgtcattgggtagctgggacattgtgagaagtcttgtccacgtctatagaaacagtttcagactgactgcttgctggtttctcattgaaggcaccgtgtgctccatgtagtgctctacgtaatctaacatccagagtcaaagcaaaagctgcaaatgatgacaaacccagatccagaaaaagacacaggccttgacaaggtggtgaatttcttctgagcttcccagcatctctttttgtgttctcttcctctcttgcttgaattttgtttgggcccccactcccttctcattctgataaaggtagaggggctcagaaggtggtgttctgcaggcagtgtaacctttgggaagaagaagcaggctctggagtcagagcctgagtttcaatcctagcctggccaatcactaatatcattctaggcaagctattttctgtgaaaacacttttggcattgggtttatgtgggaactcagcaatgtgtgtaaagcgcctcacatatatattaaatcgtattaatagctgtgatgatggttaatactgagtgtcaacttgattggatttaaggttgcaaagttctgggtttttttttttttttttttttttttttttgacggagtcttgctccgttgccaggctggagtgccgtggcgtgatctgggctcactgcaatctccgcctcccggattcaagtgattcccctgtctcagcctcccgagtaggtgggactacaagcgtatgccaccatgcctggctaattttttgtgttttagtagagacggggtttcaccatgttggccaggatggtctcgatctcctgaccttgtgatccgcctgcctgggcctaccaaagtcctgggattacaggcataagccaccgtgtctggccagttgcaaagtattgatgctgggtgtgtctatgacggtgttaccaaaggagattagcatttgagtcagtgcactgggaaaggcagacccacccttaatctgggtgggcaccatctaattagctgcgagtgcagatagaaaataaagcaggcagaaaaacgcgaaaagactagactggccaagcctcccagcctacatctttctcccttgctggatccttcctgcccttgaacatcagactctgaagttcttcagttttgggacttggaccagctctccttgcttctcagcttgcagacagcctattgtgggacctgtgatcatgtgagttaatacttaataaactcccctttatatatttatctatcctattggttctgtccttctagagaaccctgactaatagaatagcttagtgtttgtctgtctttctttctttttctttctttctttctttcttttttaattaatgaagctctgctgtactgggtgctatgaagaatatcccagaaagggctattctcaaaaagctgacagtaaagatgatactgactaacgttcattgaatgcttaatatgctccaggcattgttctaagtggtttgaatattttggcttatttagtcctcctaatgaccctgtgaggtaagtgctattaatatatctattttgcagatgaggaaactgagactccagaggtgttaaatgacttctcagttgtccaagaaaattctagtatgtgaacacagttcttcagagcccagacctgcctggccgcactgttgggctcttaactgctgtagtctacactgctgtagtataggctcacgcactggggaatctgaccgtgtcgtcagcagcccggagggtgcttggcggtgcagagatcctcagagatcatcctccaggtacacagccagagcagtctctgtcctgctcttgcacctttcctttctctatagcattgctgatgtgaccaggaggcattgccttcagccttcctacagaacagatagcgcactgagtactttccttctagatgagacttttctcagttggcctgataggaccttattatcagcatactagaaagccagggctgcttccttatgagaggtagtgggggtgaggggaggccagagggccatggagagttcaaggaacctggggaaaacttaaggcattgttcctgcctgccacctcttccctgtgtccttcatagcagttggtagagtttccaggtgagactggctttctagttctttcttgcactgcccagctcagccctcttaattttaagcaaataggtgcaacaggttggagagggtaccagcctgagatatgaccagggtagcagagctagtcttgtctggagactatcagcagatctgtgactatgcagtcagcaggacaggatgagaagccagtccagagctgagctctagcccagtggcctggagcagggagggctgccccatctgggatgctgctttccataacctcctgcagatcatgcctgtcctcttcctagtctgacctctgccaatagttacctaactttgaggttggcaacctgggaaaaagagtcttccatttttctccagcctctgatgacttagcaacgcctcattcatatataaatgaacaattcctgtcaccttggcctctgtcttttccagagatggtttagttggtttagtctggggagaggcaaaatgaaacgtgaaggcacacactttccagtcttacgattctgaaaggttggtcctcctctaattggcccagtgcctccatactctgatttaagagaggtttctcatccccctagcagtcagcatccctagccctgcccttctggcctctaaggtcagctctgctcagtccagaaatgagctgtcgtagctgctttagggatcttaaggagtctgtgacctttctcatctttcacatgaacagaaatttcctgaatatccactctgtgccaggcagtaggctaggtgctgtggaaacaaaagataaatcaaacagagcttctgccctgaaggtgctgtccaatttgggtgattccccttggccccttgacagttacactggtgacatttaggggacagaaaacaagatttgaaccggttgggcagacagattcaaagctgtccttcagtctacagtgctgttctgccccggggggagtgtccttccatctgtctggagagtgcagtgcataggactctgcctctgagttgagtggctcccagcctgtgggcagccagttgtggctgtgaccgggctgcccccagggggtttggctcctcttggggaccccttatcacccagatgtgagggcacatctgccagggcaggccacagaactgtggtgttcctagggcagctcttatgtggagagttctgggttggtgcagaggaccctagagaattgtctatttcactaatgccacctggggcaggtccccactgtcttcaccactaatcgcctcccttctctagctcccatagttgtggtgaggaaaagtggcttcagtgctcagcagagtgcttgggactgcatcaagcccagttcgcctatcaggtatgtttgatttcagcttattcctcagaagaaatggccagctattgtttgcagagttggagaatcacgcacaaagagattccctcacctgacctctgacacccatctctccagggatgatgagaaggggaaccagggccttccttgctgatgccagggctgtgtctgcatcacagtgctctcttgtctaaagggggaaattctgtttctcattttgcagcactgtgtattcatgatcttttcagatttgcttattggtgcagaaaggggaaagagtctaaagtttcttgaatctttgccagacactgtactatgcctctgaatgcatcatgccttaatcacgcctcacagcaactattgctactttcatctttcagacaaggaaacaggttcagaaaggctaaccaagttgtgacaggcacctagcctgaatcagtggatttcttcctggacccaccaacatttagttgacgcttgcccaggtttctgctttggtgaactatattctattgctctcagataagaatacctccaaattaacatgaatccatttgtttggtggttgttgatatgatttgttcccaagaggcctggatgaatgaacttcgtggttgtgacctctttttaattagtgatgctgtacctgtccttcctgtaggaagctgacatcattgagtgtgagctgtgtgctgggttttttcctgggaatggggacaggttgtgctaaccccccggcccctagtcgggtgctgcagaggacactcaggcctcaggggatggcttgggctacatcacctctgcagtgtctcagctctgagattctcaggccttagtaagtgtgatgagacacttaggaaatacttggagccctaaccagatgtaaagactgcgtgtgtgtgtgtgcgcgtgtgcgtatttcctcattgctggtgctagctgtgagttctatggagaaagccagccatcttagcggttgcttggtctccaaggggaccctgagaaatagcagcagctagtaatgctccaagctagtaattaatactccaactagaaattatgttctcagaaaacagtagaaaatacaggggccgggcatgtgccatttcgtctctaagttttggccttgtcggaagtggaagccggtgtccaagatagtaaaataagttgctatctacgtgccagggatgtacattataactaaaactagctaccagggagcaccttttatgggccaagcatctgtgttgagagagagatacatatacacacacacacacacacacacgtagatctatatatgtgtatatatatgtgtgtatatatttcaaattaagtctcacttaatcccataccaaaactatgagatagatattattatccccatttcacagatgtggaaactaaggcttagtgagattaagtaattggtctaaattcacccagctagtgactagtagagccagggttttaatccagcatagtgaattccagagattcccaggtaggggcattaatgggtgggtaatgggccaagctgggtgccccgggcaagtagcaggaaggaactgaatggaagaagaagcagcatagcatgtaagtgaatattggagggctgggagtaattagtcttttccctctgctctgcctttttcttatcctcttccctttgctggccttgcatccgtttcctccccctcctccccgcttccctctcttccctcatcttactgtcttgccccctgggtttggggggctcacagtgacattgtgggccctgccataatttctccacttcccttcttgtcttctcccccgtgtcctctccctcctgtccttcttctcttccctcttgccatctgtcttccaattctgctgcacaccgactcttgctgcggctgccagaggacagagtgaggatggagcagagccacgttctgtaggggagggggaggccccacaggtagtgtcaggtctgcggcaggtgtgagaagagagagaggatggcggggttcaatgctcgggcagctggcctgggtgggagtgtgagagatgcctggactgcttgccctgtcagtgcagccaagattatgttggcatctgtggagtcatgcaggactgccagtctctgggctgaaggttaaccaaccccctttgccaaccttccatacattaactgccataaaatgccatgagtgccagtctcactttgcacaattgatttatttaaaaccaaaatatggaccttcagtcttttattattggttttggcctagaatgtcaatcaagataattttgactcttgatttttgtaatttatcctgttcattatccctcccagctttcatttatttatttatttatttacttatttattgagacagagtctccctctgtctcccaggctggagtgcagtggcacaatctcagctcactacaacctccgcctcccgggttcaagcaattctcttgcctcagccttctgagtagctgagactacaggcgtgcatcaccacacccggctaatttttgtatttttggtggagatggggtttcaccatgttgcccaggctggtctcaaactcctgaccccaggtgatccacccaccttggcttcccagagtgctgggattacaggcgtgagccacggtgcccaataccttccagctttttgaaagagttggaagaatgaggagacctaaattcaaatactgccctggttaactttttaactgtggaccttgatcaagccagatcaaagtttgatttacccagtggttttcaacaggagtgattttggccattaggggatgtttgacaatgtctggagacatttttggttgtcacaactgtaagggtggtactgctcctggcacatagtgggtagaggccaggatgctgccgacatcctccagtgcacaggacagcagagaattacccagttcaaaatgttcatattgctgaggttgagaaacactgatggctaagcctgagtttctttactatgaaatgaatataataatacctagctccttgacttggaggctcaaatgagataagatgtgtaaaagtacctgataaaactgcaaagtgctctgtgggtacccagttcatcagttgatcagttgttattgaggacacgccataccaattggtaatgttgctgtcactaattaaagaagtcatagatagaaaggttgactaggatcagtctcagaaaagaaccttctagggtcctaataaaagcaatttccaatgttcttaagggtctgttatcagtagcctctaggggtatagttgttctaacagcttcaaaactgttcaaccatactttgacacagatttttctttttctgtcttttcatgcaccttggtgaaatctgaacacattctttatggcattcttcctgattttgtatcctgcatcaaaagaagaaatgagattggtttgttgaaactttttcttaatgaacacatgtatatttttagtgatttctatctttccctgtaaatgctcacaaatcacttgttaggtaatccagccctatgtttgccagtctgaagcttccagaatccaatttggcaaaatgttaggcaaatagttacccatctttagtcctctgacacctcttaaaggttattagcaatggttctgtgaatgcagagttgagttctttcagagctatccttgaagacaaggtgtgctgtgagaacccattgtgggtagggccgcatggatcatttgaattctcttttaaaagtgttgatgtggagctttttgagtaaacttgagttatccaggaaaggggaataaggtacaaatcaccttccctctgacccatggtgtcagcacaggcctttaattcaaaaacgtgggactggctcctatgaccacagcagttttaaaactacagattgtgatcttcaaatggggatcaatttagatggttacaaccaatagattttaataaaatagaatatgatagagtagaatagaaaataacagcattcattgcacaaagcaatggtaagtactgttgtgtgaaacttttgttttcagttgtatgtgtctgggtatatgaagaatatactgagcacaccataaattagattgcttacaataaaacatgtcagtagggggacaggcagtgatctctacggacccagtaggaagtggttctaaagtctagaaattaaattctaaagcagtgactcttaggcaggggttttcctaatatctgtgtgcaaagagctgcccatcatcgctcgacagcagtttagaccagctagggaaaggaagggcatggtggagggtctgactgcttccagaagcccgaagagatctcagctcagtgtcttgtgtgttctgcttctgagtttttggctgtcactattcccaacagaaactgcagtcctgctcctgagaaagcagagctgggtgctgtctgctcaccgaagttgaccagaagtggctcttgtaatgtgctaccttcaagggcttctggaccaccctggaggacagagcacccaagccacggctcacatgcctgccttgctccctgagcagccgaaccttattaccatcacacttgaagcagctcatcagggatttgtttgaggcaaaagttcccaggcccaggaaaaagctgaaagctgtggacttaggagccagatgttgagattttgttgtctgctgattgttggctcttgtcaggaaaggaggaggaggagaaatgagagtatattcacagttgcatgggggagttttttacccttttctttttttaaagaagttggtatgttcttcaaacctgagtatttatattttgagcactaacaattctacatttgaagaataaatcccctgcgtgacatgctaccttcagctctcattcttgggactaagctgagtggtgatttgggggtggctttcccttttagtggccggctcagaaatagccagcacacttattacacagactgccaggctctctggaggaagacagaggctttggagcccaagtttagcgtcagctgttctgtggcagtgtagggtgagaattggacctggtggtttatgttaagaagtccagggctgcagaatgggaatgctttctttagaagtttacccccttaaaaataatttccactttcctatctatttaaaggggcttttgaacttgtgtttatgaaatgtcttcccgccatttcatgtgacttgggacacagcagctgggatgatcttccttttacccaaatggaaagttgggttgggctagggcctatggaaaagctggagaagtttagaagccaggcaagcaggattataaaaaacaagaaccaggggaaaaaaaaaacccacatgattttgagaggcagcctagtgtaatggaaagagtgtaagctttagagtcagatgacttagagttgaatcctagctctgctccttggacatattgctgaatttcttccatttcctcatgtataaaacttgaaagttacagggttttgaaggctcttgcatgtagtaggcccttgataaatactgattccctcccaggcgttttatctttgttttttctggggctcttaacttttcctcactggacctttgtaggcacccatttggggttcagcaggtacctgggagcccagaggaaaaagagtgctacagactccaggtgggccctgggtgaccactgaatccaccttcatgatcagggcccacgcaacacagagctgcttccagagctctgggggatttgctattagcttggggtagtttaaaattgaatccatcacaatgacatgatggggagacataaacagaacatttgggagcagagcacagctgctaaggtggcatgatagactgcttggcattacagcattgttatttattagggaaagttgaaatgggtcagagaatgaagttttcctaaagacctcagtcttaggactagcagtctcttttcattgttcctccataaaaatgttttgctctgctctatattgggccaaatgcaccagccaaaatactgttttgcaaatttcaggggaggggatgcggctgctcattgtgggccctccccttcctgctgttgactcaggccagtctaaggcgttctgtgctgcatttgggggattttctggggccgattttagaatgcttgcttactgtgcatgcagagtccccccagccaggccccaccccagcacggctcctgcctctgtcatctgaagcctcatgggctgaggctgggaagagaatagaagacactggtcatatgcatgtgcccagagtttgtttgaggaagagattatacatccatatttccaaagagaaaaaacagaggtttttttttttttaaatgtggcaaagtgtacataacataaaattcaccattttaaccattttaagtgcacagtttagtggcattacatccattcacactgtcacgcagccatcaccaccatccatctctagaactttttcattttctcaaactgaaactacccattaaataatccctctcccctctctcctaggcccctacaaccattaatctacttttctgtctttgtgaatttgcctattttcggtacttgggataagtggagtcatacagcgtttgtccttttgtgtctggcttatttcatggagcataatgtgctcaagggtcatccctgttgtagcatgtgtcagaatttccttcccttttaaggctgaatgataatccattgtgtgtctatatcacattttgtttatccagtcatctgccgatggcacttggcttgcttccaccttttggctattgcaggaaactagttttgacgtgttgagatgcaggcctgatttccctgcctgcttgtgaggtaggtggacacgttgaattgacggtcctgtgtgtgagtgaagtgtgtgcgactgtgtctgagtgtctgtccttctcagttgacgtaaatactagggttatgaaaagtcctgttttatatctgaagaaactctccctgcccactggcttgtcagagcctcttgatgaaagggtaaacaggaggtgagtgcttgacgtaggaggagtgagttatcctgcctcagcctcctgtcctggagagtgtgtttactgcaggctgctgtggggatgagaggaccagtttgggagcctgacagccccagatcaggaccagtctcagaatttctttgttgtgtgactttggctaggtcactttaacttttctgagcctggttgtctacatctaagaggattttgggatccatattaaatgtaacatgtcaaaagctgttgcccggtgcctggctgatggtatgtattcaaaacaccttctcttccttaaagaaacgcttatacactgttggtgtgagtgtaaattagttcaaccactatggaagactgtggcgattcctcaaagacctaaagacagaaataccattcaatccagcaatctcactactgggtatatacccaaaagaatataaatcattttattataaagacacatgcatgtttatgttcattgcagcactgttccataatggcaaagacatggaatcaacccaaatgcccatcagtggtagactggataaagaaaatgtggtacatatacaccattgaacactacgcagccatagaaaggaatgagatcatgtcctttgcaggaacatggttggagctggaggccattctcctcagcaaaccaacacaggaaccgaaaaccaaatactgcatgttattataagtgggagctaaatgatgagaacacatggacacatagaggggaacaacagatactggggccttttgaagggtagagggtaggaggagagagaggatcaggggaaataactaatgggtactaggcttaatacatgggtgatgaaataatctgtaaaacaaacccccatgacaaaagtttacctatgtgacctgtacatgtacctctgaacttaaaagtacacaaacacatatgcatgcacacacacacacacacacacacacacacacacacacacacacaaataaaaccttccgacaaaggaaaaaaacccacaaaaaccttctcctcctttctccacccggatagtgagcatcttgccagggagacaccttgttgtatttacctataggattccccttccctgggcctaccacagtacctggcccgcagcagcggctgctggttggatgcttattaactttatcctggacactctctgggaaacaaaggctgctccacaataggactttccaaaaatgttctgagaaaacacagccccagtggaatcagcacagagctttctaagggggtaggctttgaagagaatattatttatttggatgggtaaattctggattgtttgaaaaacaaaaacataatactggcctcattacttttttcgtcattgcccctttgtctgtgggtagagtgcttttgagagattattggttggaactttaaaaataggccagttgtcagatgtcttggcacgaaaacatatcccagtggctttctttaggaattttcataaagctaaacgtctctccttggagagggctgtgttgatcaccatctgctgaatactctaaagaggtcggagagcaaacttgctcccaagctagtggaactagccagtggaatccagatgtcagtaaagtggggaagcacttgtttgttgggggggaaaatggagtggttggtaatgggagcaaaaagagtccaaatcattttttctggacccttctcccaattcccatccctatccctacccatctgtctttgactttatcagtgagagtcataccagcgtccttgggtggttttgtgggtcaggcagagagaagggtacaaagattgttggtggattccaaatgccaggtgaaaggggaaggagaaagtgctagcataaaagctctgcctgggacccggcaggctgctctggcacagctgactgtggcagcagctctgtggtctgggcagcccctgagtagcctgctaattgtgactggcttcattagcattttgggcagtggccccgagcagctgggctgctgctgtcaagagttgctttgcagatggaagacctccttttctgtcctctcctcttggccctcattactatctaatgccaaagatacagagtgggggtgactcttggcttgggttctgtgggaccctgaacacacgagacaatcctgatggggggcggtcaggagtgggggtggttacattctgagtttcccggaacagctctgcaaaacagctccccaagggatgttgtctaattcgtctttgcatttccagtgccagcatggtacctgccatatataggcagctgcagtttaaaaggctatgctcttttctggaaccctccagggctgcagggatctcttgtatgataatgtcactatttgccatttcataggggcttaatcattgctgaaccctatcagaagtgtgaaccctatcagaagtgctaagcccatttgttttttcttgccagaggcttgggcctgagacttggtatggcttctactttgggtgtatttctcctaaggaaaacgtagggcaattgggagctttatcctggtttctttttaaaaatagttgttacagacactcccttggctggtcctggcaaagactcttgaggttgtaggagctgctctttcctcctccccagacacctggggaagttggtgagctccttgaggaaactcggaagcagtatctttttaatctttttacctccatccctatggtcttgagtagagagccacacacaaaaggcccctggacaatgaggagcaatggcgatgctgcccagctagagatccttcccacagttggtatctgtgtggcccctctgtgccaagcaaggccacaggagggcaggagggcactgtgtctctaggtaagtgctccctacagtgctggaactgctggggctgcagtttcatggaacccctcagttttgccagcctcaagttgacaagtgcaaaagcagatgtggtttctgagctcattcatgttcctttacagcgggcagcacccttggtctcagtggaaaaagctgttccagggacagagggtagaggctgttcctatgttggcctctgagctggaggctggaaacaagggatcagggtgtgatgtgggagggcagatggcacagaagactccaaaccctagtgttcccctttaaggcccacttttggttgtttcactgtggacagtgggtgagatttttgttttcatcccgaggatggaagccatagactcatgactctgaagagctctcttatgaataacttacggttctatatctcatggtggaaatatttggcagcattctgcactatttctgccttctcttcttgaccagattttattttgttccactctgatcttattttggcccaagtgtaaatgacgctatagaaagattccttttttaaatattcctttttgctcactgactacaaatatacagtactagagacccaaggcagcaaatgacttgtgccacatcagtgaggcaggacgttagtccctgccagcacctggtgatgttactccctggaggttccagattatagcatcccagcctgaggcttgaagacccaggggacttctgttgtcacagcacagtcaaatcctcttggcaataactcactctccctgcacgtttttctctacctccagttctgctctgtcccctcccattgccagataagtcagccatatgtggcccccagggcacagtggcatgtgcacacttggcaccccaggacaagccttaggaaaaacggacacacacctaaaccctttgggatgtcctttttcgacattgtgcacagctacacatgatctttcatgaaagaatccagatgggagacatgtggcaggagatctccttttagtgccagataggtacagagtcctctggtctttaatgagttttacgttgtgttatgtctgtgctgggatggagggcacgttacaccgcacgctgacgcagtttcagggccccagaggatgcacagaggcagggcaggagctttgggtttttcccactgagctaaagggagtttgggggctttgatccttttgaatttcccccatttccccaaaggtcaaactctggacttgacacttaacaagaaatgctcctgggaaccccaatctaataatggtatctcagtgaaccccagggaacttttccacttctttttgaaactgactatggcttccctttcaatctatactagacatgtccaggaatgaaattaggcccactgggtgactagggagttggagacattcttcagccagccagagcctcactgttgattcaagagcagatgcttctgtgatttgccccctgcccatccacccccatggcctcattagagcagacagaactggttcggaagcctgctggcccacatggctttcccttgggttctgctgaagtgccctggtaagccttttagggcggggggtcgctttatctgccattccctttcctttagcaacttgccttgttaacctggggttgctttctgcaataatgtctcaggttggaatcttcatcatccccctcctcttctccctcactctttctcgtttcctcccccatcctcagtttcttgtcttgcatcacattcattggctcagaaccttcctcgtgctgccccacagctcaccgcggcacccagcagccagccgcttcatttccccagctccagagcttcatggatgagaaagtggaattttttttccttgtacaatgttgtggagcttttaattagttaactcatgtgtccattttataaacaatgaactaaacacctgttacatgctgaacattccagcccagcaagccctggtgcctgcccttgaggacgtggaggtgtcactggtcacagagacatgcagtcagatcacagagtcgttgggtagaggctgcagggaggcctgtgagggcagggtcatgccgtgtgggtgcagacagggaagaacagctactgccctggagcctgctgggaggcccagagctcatctgtggaggctctgtgggagaggggacagtcaataacatctttactgttgagttggacttcagtggctggacagggagggaaagatgattccaagttgaaggtccacgtgagcaatggccaggaaacccgagagaatgtggcgggaccgggaaatggtgagtgggtcaatgtcgccaggacttaggggcaggggtggggcagagcgggcatgcgtggagccagggtgctgaacactgagctcagcacgagctgaattttgaagtgccacattctaaggaaattaaaacatcctgtggatggcaagaggacaggttgagttttgaaaggggcgtccgcagatggaggtgtagggaggtagctctgaagacagggactcttggatgaatctcttactgtgttgttcccgttgaagggctgtttccctcttggggcagaggccaactccttcattccccagcttggcttaaatgtctactcaggcattcaaagggaaaaggaaagcaatggtttttcctgaccccattccactctccccatgtaggacctgtgagttggctgattgtgggttcagcatctgccaccctgggaatgttgacccaggggtgtgaacggtggagcgctggaggcaggcaggggccctccatgatgggcagagcagctcagtggccttggcagatctggactctggtcccacctgtgtgcctctagggacgtctttggggccctctgtacttgggttttgttacctgtaagttatatatgagtgactgcttaaccttctggagtctccatgcagagcaaatgaaagaacatatgaggatatcatttgaaaagcacaaggcctgagatctttgcatgcaatcatctgcatttcggtagctgacctttcccagagctggttcaccagtgttctctattgtggaaaggaccctgtgcctgagaagaagggcttttaagagaccccagttctagaacaagtctgatttcaggtttgtatgtactgcctctgtgggtccccttccctggttaaagaaaaaaaaagtgttgctctatcctgctctgctatgctcattgaaagaatggctgctctgtgaatccaaatgcaggccttccatgcaggctttcgagggaggatggtggggtgcacaggttgactgctctgctccctggctggtgctggtctccttctggaagcatgcactaggctggccagctggacagtgagtatctggtaacagatgagcaagtgcttctcctactttgagtttcttgggggtgattctacacttgctttcacatatccgtctggtaacacctggactggtgccatttccttccccttcgttttgttcctaatggccccaacgtcagtactgcatgcgaaaggtgagagagaattcttggtgggagagaatcgggtgctgtgaagaggctatttttctactcacggaagttcatttactctttggattggaaatttccctgacactcagaaagtcagatggtttgtcagtatggaacatgcctcagggaattagcaggatatccataccttctttgactggaatttaatatttcccactttggcccagcaattgaacaaaatctctttgtaatgaaggtaccttgtggtaccttcatttctttaaagtgaagtttggtaagatgaaagctgtgttctgaggcacagatgttgtaagatgtttggtggttgattttgagtcctcctccagcctgtccttgggtagctggctttgccattttctcagatgaagaaaggagagaggcatagaaaagagggaatgatgtgttgctcaaactcagttttagaatggagcatcaagtcggggggactctgagttcagctagagcttagattagttgcatgtctacactccccttcccccgccaccgtctccacttcacagatgtcttatactacacagcaagcaggagggcctttgacatgggtaggcggtcatggggcatagcatggtggagaagaatgggttcttggtacatatacatgggttcaaatcctgtttctgatgagttctgtgactgggagcaagtcatggcatctgcctgagcctctgttttcttaccgatgaatccaggtcatcttagttcctgcagtcagctgcctcacagggctgttttgaacatcataagaaataatggatgagaaagagctccatcaactctacaggtgttaggggagaaaggagagaaaaggaaaaggagaaagaatcatgtaggcagtgggttcctttatgctgggctgctcaaagcacgaagggggaggtgttgcagagttgggattccccagccctctctgccttgggacagttgtcacacattcccagggtctgtgtcttccacccaggtttatgcaagcgtggacagcacagtgacaggttgcagtgctggctgcccctctagggcctggcttccctcagagcatcatggtgtaaagtaggagggaaaaggcaggtgtgagtctgtgggcagacagacctgtcttgggcagagctgcttcggatgacacaatccagggtgacacaatccagtctgattgctacccactttggtaggtagaacgtggccaaatacagctagactctccctgtaaatatacacctcctcctgaggctcaacttgcagagaaaaagggactagagatggagaacaaaggctggaggtgccccagatgctggagtggctgccctgcctgtctcctataccactttcagcttcttttatcttccacagctcctccccaaggaagtctgaatctcattcactaaaggggtcccctctgaagggtactgtcagcccacagcctctcttcataccaaacaccagtcaatcccaggtgtaatttgtttattaacaatcataagtgtcacttatggaagaccttgtatgtgccaggcaatgccctagtgcagctaattcctagcacagtccagcaagggaagcagcctcattttacaggtgaggaaactaaggctcagaatgaatgagtggctttacccaggtcacatggtgggcaaaatgctggagctaggactcaaatttctgcttgctttgctccaaaccctttgctctatgttgctaccttgccttgcactgccagtacacagaagtcccttcggtcattctctgttctcaagaaccctgaatgacctgctgaatgttatttatattttcctagctcttttgggccactttgaccaatggtgtccagtggttcttgccaagactgcactttggaaacatgtgggagcttaacaaataaatccctgtgctagactacactccacaccaactaagccagaatctcggggcggggggggacccaggcaacaatggttgtaaaactcccaggtgataactgatgtgcagccaaggtcaaggaccactgcattgccctcccagccttcagctagtggtggtcctttgactactggagatgagatggtggcagctgcctggggatcctttaggaggctgagaaattcttcagccaggcctttaggtggactgctgacattgcttctacactgcttccacatagctctgagcctttttatgtaatgccctcattcagcctatgagcttataagcagcgtctgaactcccagcttggactcctgagtgacagatgctggagtacaggcatttgttttggaggaggcaggggtatcatctggagagttggaaattttgttttgcagggttgccaaaaacatggccagctagtagacctgcatttgctcccttttttagtgcccaggctgaggcatttaaatgttgttgcaggtgggagaggatgaagcacagatccaaatctgcacaatgcaaaaatatgcaaattgggctttaaaagaaaatgtttatatttaatttttaaatcaaaccttttacctcaatataggtatttttctgtatgccccaggcgattgcaggaaagcagcctggcatagggaaatcctgggttagatttgggctctggatttatcaaattttctgcacttaccaactctgtgcccttgccagggtggttgtgaagaccaacttagagaatggacacacaagctgtcttgcataatggtaggctcagagaacacactcaacacatattaattgctttccctgccttctctgcccaattttacagatggaggtgtctgcaatggtaaactttctggctaaatcaaagggaaatgaagtgtaaccccttaagagcaaaagggctggttctaggtgggagtgttattcacaggctaggaagaaaggaacaatctggcctcggaaccagcaacactgtctgtggactgagaagcaccccacgttaggtcttctcaccagacgactgggtttgacatggtgagaagaggcaggtggttagttttctgaccaaggcgctcagctgaaaggctatcaaggatggcatgaataatttttgccaggtgaggggaggggagtttcagagagcatgcatctcaaagtcttgtcagggcaatgactggacctcagaggctgaccacttcatagctgcggactttttcttagcaacgtgaaagaacacatccacttagggtagtcacagggtgtgtgtgttgggggtggcagaggtcttgcattcacccaggatggggctgaacattttcccgtttgtcccagggacagggtagctctcctgtgccctatgggcttcaaggcaaaagggctttatgaatcctggtgagaaaaagcgtttaaaatgtctcttggccaacagtaccttggtttagttccctcgatctgactttcctgagttgcatcccaactgggctgagcctggtctctgaaaagtccctatcatcaatatccatctctttccaaacgcccttgctgaaaagcctggggcccccttttctttccttcttgtactgtgggatatttgctttcctttttcataagaatcgtggataacttaatacaagtaatcattagagccgactcttcacatcggttcaccagctggtcccggaaaaggaccctacctaacacattcagcattgcctcctctcttggggaaagagctgacacatttctgtgcctcctgctggttctgggatgccctcaggcttccctacctcccccctctctgccaaaagggacttaggatctctaagctgtctttcaaacctcaaggaatttcaggaactcgcttgctcttttggggtcatgctgatttgggcagctgggtgtgccccgccccatccccgccccagcagtcacgtcatggaaaggctggggaggtgggtccgtgctcacgtggtcgcgggcgctgcgctgcctggaggctcagttctgggctttcagggttgaaaacccctccccaagcttagtttgaggccatctgaggccgctggagagttgaccctgctctcacaggtgatgtgttaggatcgaggtgtggttggttccgtaagctggtcggaggcgcagacgctgggccaaagtgtcagcagcagtaggaaatctactgggtgttgaggctttttgcagttcccttttctccctgccctctccgcctggcctgcgctttaactcttcccgggtttgctgcagggttgggagtgagggcagtttcactggtgaaaaggacgctttcagaagccagactcctaaccttctccccagcaaaatcgaatttagagcaataacctttaagttgagttttaaactgtgacatgtccattacagatcattggataaatacagaaaactataaagaaatgaaaatcacccgtagtcacccttttagactttttcctaacattaaaaatactgcttttatttctgcaaaatgtaattttaagtatagtcttgaatgactgatgaggaaaaccttcttttatcgtctttcttctttcaacatcagttcaaaagggaggtagaatatcgacttaggttagtccccacaactcagcttttttgagactatcccaagaacacagcatttcagagccagatagtatttttgagtttatgtggttaatctttccactttctggactgagacagaagtgacacaactttcttggggtttccaaattagctgcagagctggaaccagaagaactcaaagagttctgcttctgaagtcagggtcctcccaaaactccaggagcatggaatatcagagttcacttttaggtcagagattttaaataagatcaaaagcagaaaagggaagaggggagacagggagccacatctgaaaaggggcaattttctttggaattttggtacattttaattcctttttacagatggaaacaaagtgacatttttaagaattctgaatagacgctgtcagccattggaacaaaacacctgcaggaagagatactgggaggcagggagctctatcttagagaggcacccagttctttgggatatgagcgccagtctctgcacaagttgaccccagggactcccctagcctgagtgctggcgtcagtgcttccccgcaggcctgccttctaggcaaccatgtggtctcttcctcatcagtagccctccgcagaggcgtgctccctgagatgcccctctttctgacatccactctgggcctgtggttctcttgctgggagtattgatacctctattgtcacttcctgggaggccttctcttcacacaggaaacctccttcctgacagcagagagcggcctagaataagcctatcatgaacaccgttgtcaagaccacgtaaaaagctcaccaaagccttatcccagtcctggctccttttggaatagataattctccctttttctctctggccaggactgataatgataataataatgaacacttaggtagtgtttagtgctagacactttacattttaatctacacagtgtcccaaattcatttcacaggtgaggaaaccaatggggcacagataagcttgcctgaagtcacagctatgaagaacagagccagaattcacactcagcctggctccagagaccatgttcctaaccactagactagactaatcagcctgctccaggggctcggcctctgccctcagtggcagcactctatttgaggtctgcagccatctgcaggggatttgattttcctccccctttagggaaagcaagtctggggtcactgtggctcctttgccctctcctaagtttgcatggcagccagttttcattttgtgtcgttttattttccataggccacatttatcatatttaataaccaaatgttatttggttattggttattttgtaaaattcttcacatgaataacattagaaaaatagtctttgttagcgtccatgtcctggtttggtatttggacaaattgtggaggtgtggccagagagtatattctggagttggacaaatctatccaaatctagactctactattgactggcaacatgtctttcttttttttaattccttcgtttcatggttttcaatgtattcaagtaatgcctgtacaagcttgatatagcacgttaaataatgcacgcgaaatacctgtacaagtgaaataatacaagatgcatgaaggtgaagctcctcgtctcctccttcagtcctgtccctctcaatcagcattagccacgttctccagggcagcctgctgagcctccacatggttgttttcctgcctataacaggaggcgaacgccctgtgatgtatgtaatgggtgctctttcagtggtagtcattgttatgaggagggaacacatgtgcattagggctgcagtaagttgcatttttgccatgggaagagaaattctccacctttcccgtcagtttctctttgcttctccatcttgcagcctctggcacagcccagagtccagtggtatccggcagaagcagtgctgtgcagctctgagctgggcccttaaggggaagagggagtacctccagcaatattcagggtggatgtgggttccagggcttctgatcctggggctgggcttgtctgagattcacaggaggttagagaactaaggaggaaggggagaaggctttaacccacccctctgctgtctctctctggaggaaacctcaggcagctctgtgtacttccccctctgcacacacacctcttcctgccttctctaccctgacaccaaggtctctccccagccctggtggcatcgtgcctgggttgctaataatagagaagggtgaatctgccaggcagtgaatcagaaggctgtcccagctctgttcttctgccctgatcctggcaaattcttgtgggctgattcggtaaatatccttgtgagcagaataagtctttgtgtgttctggaaactcctgctgtccctgggggtaacaccctcttggaaggatgatggggatgcctttggcctcaagatcttaggacggcgtttcaaattgctccaggcttccaagctagcctgggctctgggaggagggtttgcaggtttggagaaggagctgcttcccaggtgctcaggggatggaagtgagaatagggagggtgtggagggtacaaagagactgtttagttcttgcgtaaaagacaacacaatatggtccttccagttctttttagagctcaaaaggtgaaataagaataaagaacagcgatctgcagttttcctattatccaaaagcctactacccaattcagtggattgttttggcaacttgcttggataaacttatttagaaattatttcagaattcctccaggcagttaccctacgtcctttttaagtcaaggtgtggtataagtccattaacgaattaaaatacttccagatttctgtgttattctcaaggcacttttgctagataacaatacctcacacttggacggtgttttgtggtttgcaaagcactttcacatctgttttctcacttggttgccataataaccctgggagccgggaagggcatgtcttgttattatccctattttgcagatgaggaagccaaggtttttagaaggttgggtggcctagtcaaggtcacaccggtaggggaattggggggatggaggaaactagagctgtttttccttaaccatcttgcctctcactgagatgaaacagcaggatggttcctgggacccaggatccctttgaacgcttggattaaaataatttatgagttctttgtgagtgtgtgtggacctgctggtagtggcttttcttcattagaatttgcatgcaagattgacactaagatggctgactttcaccatcccaaaccaaccctgtttttgcaccgtgctgtagtggtatgaattaccttgcaggtaattgtggcttaggtgatggtacacaaaaggcatcatacagcagccagatgttcattttactaaatggaaaatatgactcagaacacgggccaatctgagcctccaagcaggcaaattagccattgaggatgaagtcttcacctctggagaggagagaatgtgggagcacagagcccagagtcaaatgatttggttgagatccccccactttggttatttagacttgcttatactcctctgaccagactatgggatcttctacagaaattctacagaagtgtgggcagaattacaagtaaggtgggttgaggaagtgcacaggtggaagtgtagccgagaggatgcgtttgaggagcaagaggctgggactcaagaaggctttatgcagactcgaatcttacattgataacaagcatttgcgtagcacatacgagtttcatcctatgaaggattccataggattctcacagcagcccaaggatgtgagcagagcagtaaacaatatccctgttttatagaggaagtagaaatcgagaagcaggaaggttgggtaatttgcccaaagttccaccactagtaaatcgcagaactgggactaaagcccaggtcttctgaccctcactgggcccagcgttctttccaatatgtcatcctgccattttccccttccttcctcctccccacagctccttgcaagttcagcctgctggaggtaagggaagtgatcatgagagtttttccagtgctgagacgttctggaaaaaacatggacctgtatctgtgtcctgatctgtgcttcgtgattggactgtcttgacactcgtctcaggactctggggagtgcttgtgcaagtgtttcccagtgtggccggcttcttgaacgctgctaatggaaagttgtaagagttctattttcctgtttcaagcgagcgtttcccccttggggttatagcaaccacttcctcctcagcacccggtgggtcgtggtaaacaccagttacagcagagtatccccttctgacaacctcattggttcctttttttttttttttttttttttttgcctgtaagcacatacacacagagttctgaaggctaggtctcctttccttctggtttagagttttcagagtaccctgctgtggccttggaaacagaaaacccacacagaggtcaaacgcagttctcgtggagtcaccttgtcatcctgctttgttttggaaggaactgggtcggaggcagcacagtaggactacagcatctttaacccttggtaggatggctggatccgctgaacgcttgtgggtaaacaggaagctcacagcctcagtggatcattaagggtgatacagaatagacacgaaaatcttaagtgggatgggagcagagcaggacttggtgggtagatagtgaggaaaaggaggcaaatagggatggtgaagaaatcgaaagggaatgggggatacaaggaaagggtcaggaaagggtgagtaaaaggtttaaagagaggtgctaattttagatacttaaaagtattttaagtatctaaaacttgtggctgggtgtggtggctcactcctttaatcccagcactttgggaggccaaggcgggcagatcacctgaggtcagaagttcgagaccagcctggccaacatagtgaaaccccgtctctaactaaaaatacaaaaattaggccaggcacagtggctcacgcctgtaattccagcactatgggaggctgaggtgggtggatcacgaggtcaggagttcaaaactagcctggccaagatggtgaaaccccatctctactaaaactacaaaaatcagccaagtgtggtggcaggtgcctgtaatcccagctactcggaggctgaggcaggagattggtttgaacctgggagttggaggttgcagtgagccgagatggtgccactgccctccagcctgggcaacagtgagactctgtctcaaaaaaaaatgtgtatatataaatacttaaaaaatatttgtaattgctggtttggggttactagaatctcttctgaatctgtctcagtttttcttacagcttttaaaatccatggaactctatcaccaggagatgattgtggtatggagctgatcaccccggagttagtggggtggcaactgagatcggggggaaatggagcagtttgaggatatatgggccgtgaaaacctcccagctctgcccccagccatgccatgaaagtcatggggaagaaaggcccccatttgtgtgtttgtgttattaaatagaacagtaacagagcaggtctctgagcctgcctggcagaaatctttctgtagcaggagtgtcctgcaactctctggtggatttgcaaaacagtacagatagaaaaacttaaatgggaaacaagcttgtcttgtcctactttgtggagatagataataaagccgaaaggccaagaagtgtaaatatatagcatatatctaatgtatatggtatatgtacatatcaatctatagctatgcaatatctacactatttatctatgtttatacgatgactctaggcttcagaagacctgtcaaagatttccatacatctagagaatttagaaggatccctttataggtgagagttgagactttttggctgcaggttgggatttggtggactagttcctggtaccaccacctagttgccgtgattatctttagactaaccaaggcccttgtgttagccttccgtaaatcatccccacccctaagcaagacagcacctataccttcacagtttctccagttcatccctgttttattttatttattgttttttgagacagggtcatgctctgtcacccaggctggagtgcagtggcacgaacatggcagcctctacccctgtgttcaagcaatcctcctgcctcagcctcccgagtagctgggaccacaggtgcgcgccaccacacctggctaatttttgtgttttttatagagacaaggggtctcaccatgttgcccaggctggtcttgaactcctggcctcaagcagtcctcctgcctcagcctcccaaagtgttgggattacaggcatgagctactgcatccggcccatccctgtttaaatgggaatatccagaagattgtccttgtcatacactcggtgcattttagagtgtcttcaccacttgtcagaaacaggattctggttgggaagggccatcattcacagtgtggcaggtttttgctttgttaattactggaattggggtacagaagccaaatgcaggttctccacctgggaccttcttcctgtttgtctgcccacttcacacctgtcttagcagctgcagcctgaaatagtgagatggctacattgcctgatcaaatctgggatttatgtagtgataacacctcccaggagatagatttcttcgccctaccccagtgcttcccacacatgcccatggaccagctctttatctctggcatgaagattcctcccacttccctgttgctgagatccttaggcctttagagggcaattctttcagcagggattgcagctccaggttagagtgggagtgagaagaagccatatgcctcacaccgaaagacagccgtggtcttgtcgacctaatatctgagccaaggtggaggacagctgcccaggacacacttccaagttgccttggggagtgctctgtttggcctttgttacaagcaggttttcaaaggcaaaaggaacaaggaagtgggctgatacaaagttgtttgacaggaatcctccctggtttacagagataacattggatagtgattgctctacactgttgaactatggagtacgagtgatggtgtcaagcatatgtcattttatggctacttagcatcagttagtcttgagcccacatagcaagtggcttcaagaggtgattatttagctcaggcggggagtgagacgtgatcgctgtcacacgctgtcacatttcggtgcctctctgggtttgataattaaagggggcttggattctcagataaaaaatttttatttctcagtctaaaatggagagttttaaaaaaatccatcttcctctctcacttggacaattacagcagcttcaaaatggatctttcttgttttcaccctttctcgcctgctttctgttccccaggtgtacacacagaagcagcgtgagccttttagaacataagccagactatgacactcctcactcaaaaccctccagcagcttcctatctcactgacataaaatccgaagtcctaagaacagcctaaaaaactctgcaagaactgacctcatatgtgatatattctcctctttgtttactctgttccagccactttgctgttcctgctggcctttgaagctgcccacacacctgtctcaaagcctgtgcacttgaccgctccctctgtctgcagtgccataccctctgcctgtgtatggctcagcccctcacttcctgcagaaagaccatggccaactaagccagcacacccctctccccgcctccctggggttctcccttttcccctacctggctttatttatcttcaggatgctcatagctgcctgatgcaatatgtctttatttgtttatcatctgcctgtccccacttagaatgtaagctgctttaaggatagggacttcgttgtgttcactgctaaatcacctgcggctagaacagtggcacatctgtaaatatttgtccaacagtgaatgcatgtgtgcatgcatgcgtgaatccattagcaacagcatttattgggttcttttacttggcatcacatttgtagcaaggagtacaaagatggattccacggtccctgccctcaggggctcactcctttgatctgttctttgtggaagggtttcccacatcagtctcttttctgatcctgttcttacccatgttgtttgaatattgggaaggcgcctccaccctaggagtctagctgctgtctgtcatccgaatggtcctccactaatgttcctgggcttctagagatccttggggtcttcacggagcagtcaacccattcagggaacagttttcagtcctgagctcacagaacctacaggaagaaagccctatttctcccttagctgaagggacattttggagagtgctgtgttctcagatcaaatataggaaggagcactgaaggtgtaagatatggtagcagtttctttatgttacttgtttatttggtgttctgtatattttttacattgtaaaagcaaactaaccaggctacagaaatttcgaaaataaaaagaataggtatcatcataaccctacgatcataatgatgaaacagcttgattctatgcattattaattaattggttaatttgtattctaccttattcaaaagatttgtggatacttacaaatatgcatgtagtgcaatagaatataataactgagaaatgagagcaaagggttaaatcgttgatcaaagccagtataaagttaatgtgcagaaatgcgtattagtacaactactcttataaattggtatatttcttcttagcctaagtctgtatattttccgtagctaattctgctccctgccccttaatcttatagcaacattttccacgtttctttcttaaccctgatagttaaggactgaacgatccatcccaaggatgtgcctctaatttgtttaatcatcctctgttgttggaagttgggctattttcactactattgttattagaaacaatggcataattaacatcttggtgcatgtaactttttccgttttttggagtatttccttaagtagatttccagaggtaaaataaataactgaaaggttgaaacatttttatggcccttgcagaatattcctgggctgctttcccaaaaggtcatgtgtcttggggatgcctcccagcagtgggttggcatgtatcacaccttactctcctcctcaccaacactaggattcactattgaaatttttttttttttttttttttttttttttgcggcggagcttggtggctcacgcctgtaatcccagcattttgggagggcgaggcaggcggatcacttgaggtcaggggttcgagaccagctgaggcaagtagtgaaaccccatctctactaaaaatacaaaaattagccaggcatggtggcgtgcatcttctagtccaggctactcaggaggttgaggcaggagaattgcttgacccctggaggcggaggttgcagtgagctgggattgtgcagctgcactccagcctgggcgacagttcgagacaacatctcagaaaaacaaaaacaaaaaaaaaacaaaccaaaaaaacattttttttgttgctaataggcaaacatatattattatttcattatatgtatgttgaattatatgtatgttgccaggttatctactggcacctgagattgtttttacccatttgtttgagttctttgtatataaaacttaacccttcaagcatactttattttgtaaaatattttctgcagtttatttgacttctgctttggtttgcaggtgtctttgcttttgatactttgagttttcacgttttggatagtcatagttcttggtaattttctctgttatttacctagagacagtagtccaagttcattagcctggcagttgaggcctgtggtgatgttggctttgttattccagaagactcaccttctgttctcttaggaccttcttgttgggaagctgaatcagtggtgcatctagcatattttacaccaggagtacatttttttttttttttgagacagagtttcgctcttgttgcccaggctagaattcaatggcgcgatctccgctcactgcaacctccgcctcctgggttcaagcgattctccagcctcagcccaggcgcccgccaccacgcccggctaatttttgtatttttactagagacggagtttcaccatgttggccaggctggtctcgaactcctgacctcaggtgatccacccgcctcggcctcccaaagtgttgggattacaggcgtgagccaccatgcccagctcaggagtagattttttaaaatactcccctcttctatagtaacaaaattatttcaataattaagaaataaataataatgatgatgataatggccagaaaataatttcagacagttaaacatttctattattgaattttgtgtatatgatgccagcaataaaaaaaggggggcagggagtaatgaatttaatgacgctaatgcttattttgaaaaaggggaaaggttacactttcatagtggtctgtagcagtaatgaataaaaactatagtttctggttttgagtcttctgtaaattgatcagacttcgtaaatactgatctttccctattcatcatgatcaatagacaaagccgcatttgttggtctatcttccctcaaagctggtcgcagagcactttttattcctgttaattttgaaaaatttcttttggttgaaacagcagatatacaaataggataaatcttaaacataaaatttggcagaaattcacaacaatcccatttcacagtaaattccagacattgcaacaaagtcctgttcttcagttcttcaggattgattaacatctcattgttgaaaagtcagaaacataaatagaaactcccaagtggtctggtagaatgagaggatggaatagcccaggttctatttctttgtctttacaatgactgtgcttccagcctttatttttggtctggtcttcaagcttaggaacacatcgtaccacaggactcgggggacgagccaccccaaagtgagtgccactgataccgaatcctgtgaacttgctcttgaaacatgggtagctgagtccacgggtgtcaggggctggctttgcaactattaatatgagttatttgaattaacttccatagagaatgtaatgtttatgaaaaggtaattagtctgtgtgaatttgaagcttacatatattattaaaagtcaagaataatgcagcaattgttcagaattagacaaaaggttgttgggggaggtgttggattatgtttaaatcagaatcgccagctcatggtcatggtaaaaagcccatcagtttcagtattgttttaaattccttacagacaattttccctctttttgcctccctctggggcaaactgctccgtgccaggcccttagtgctgagctgagccaagctgttggctgtgctgttggctgtgctgttggctgtgctgttggtgcttttttgcttctaggcttttgcttatgcttttctcaatcctgaaataccaacctccacttcgcacgcgcgcgcgcacacacacacacacacacacacacacattttcctcatctttttaagacttagcttaaatgtcaccttttccatgaagcttccttaatttttaattttttccctttttctcccaaagtaatagcttcctcttctgaattcctgtagccctatcccagatctgcaggagaaagcactcacagctgtgcccagtgcatccagggacagcactgatgtcagaaaatgtgggtggtctgattggacaaaggagtccaggagccagcccaggttacctgcctgggtcctggttccagagctcctcttgtttgcctctctccctgatgggctggccctggttgtgggacctcactgagtctggatgctgctgcctctggttcttggcctctgggtgtgaggcaacccttacttaacttacctttctgcttcagaaaccccgcccttaagccagaccccacagtaagggctaggcattctgagcactcttccgctttctcaaccagactcttgggtcttggcggggttcccacatgtttatgttagcctatatttatcgattcccaactctgggaaagcagtgtgccaggtagggcctaggggttcagcaatgaactggccatttccagtcctcaaggaatgctcactctagtgggggtaacactcatgtcatcaccagatcacgtgaatgtcctctcagcagagaagcagatgcgtgtgtgaggtataggggagaagcgattagcctttttgagtgcattgggcaaaaagtgcaaagaggaggtgataattgcgcatggtaaagaatgaagaagagttctctcggtaggttaggggaagggtcttccagccagaggggccagcacaaaaggttcaggagcatgaagcagtgtggtgtgtgttggcaaacacaaccagatcagttttgcaacagcccagggagtgaagggacgcattggtggggagaggcgagagcccttgagagtccatgtgtggtctgtggtctttgtcctgcaggctttagggaagccacagaaggtttaaagcaggggagggacatgatgaaattggcatgatcagattgatgttttagaaagatctgcaaggctgatgagtggagagtgggttgcaggaaggcacacccaaggcaggacaggctgttgtgatcctggagagataggaagagcaaggggtgctagccgtagggagagttgtcagggtggtaaattaggaactttagtgattgactggctgttttggcagccctgttccagaatcgccttagctgtccctgagggtagatcttagggtctcccatggaatttgtgatcctcatatgttcagcatggtcccattagatctgtggggtcagtgtgctggggcatgacgctgcacatgctctatcttcccagagcccctggagcccctggacaccagggagccatgtccgtcacatatgatgccttggtaaggagctggtaagaagcaagatgacctcttgctcctgagagcagcaagcacttacagcttctccctctgagcgcctctggcttgatgggagctggcagaccttgctgagtcttgccctgattgggtggcctgagtcattgctgccacgacaggcaccagatcccaccgtgccatgtgctcccttctggtatcacagctgctcgctctccacatgtggccttaaggagggctttggggcagatataggactgatgcctttatcatttaaacctctctttatcttctgagaagcccattggtagccctctgcggtcatgtctgtcatttctttcatttttaggcaggctggtggggaagaccgcagatggccaggagcttttgggtcacccctcaaaatgcagttggccgctacactgtgaaatccccagaggccacagtgccctgtgatttactcctagcattttgagtgttgagtttcattgccaggatgctaggcttcctcctggccccaccacaggtgcttccgtgagtgtctcctcgcctcacctgggctgggccgtggctgcaagtcccaaacgccaaccatcccgggttctaaattgtgttgtaactaattagaggcagaggttggtcagagtcaggtactgctcagccacgaccacagtgatgttccacttctctgggtggggaggtggtaccgcaggcagggccaggttggtggggctgggtggtttagaaatcctggcttccatctcagcccccgccggtgaccaccgaggtagcttttgtgtgatctgtcgtttcctccgctactcatctcatcagagaggcccgttttgtcttggtgttctatttcatctttcagacccgaagggccacatcttacttgcatggtgtgtgttcaggttttcaagcatgtcccgtgttttcctacctagtcctccctacagttttggggatgaggccttgctgtgcattttcatttctgtttgcagagggagaaacagcagctcagcaaagtaggtgacttgcccgcgttgacatggccagtgagtagactacagtggaggtctttggctttcctcagcactttcccctttgtctctaaatccagcggctcaaactcaaatgccaccaggggccgggcaggtgacctgtgtcagcgggacccagtgacaggggaagagaaggtcccatcttaagtggctgctgctcagccccaggcaggggccgctgtccgggattacaggcccaggatttcaaagagaagttgggaattcggatttttgtgtggaatctgatttttaaatgttagcaactaatttagaaaaaaaatgtagccaaacaaggtgagtctgctggcctctgccctatatcacctggctgctagtcactcacccacggcctttcctcctgactcaggtttacagggagcctctgctggctggctatcctgttaagggaaagggggaaaggaaagggaagaggaaacagttctaggagcttctggtccatttgcgtcgtgctggccacacactgtgtaaatagctcagctgcccacattcccaaggcaaatactttccatgcgcctctttggccaccttgaatcccggggctctttggcagtttatcggctcgcttccttttccgaagattcaaatgacgactgcctgaaaatattttcttcagctgggtttttccttggtgacttcactccgagacagatgtgccctaataatagcattgaaagttaaggggaataagtcagccagctggttctgttccctagaaatgatgttaacagttcctaaatgtgagctctccccagagaccttggaggggctgagcctgcaagaggccgtggtcattgtgagagtctggagtccttctccctgggacagagtccccaaggctctcccctcgtcccaccacgatacgtgtactgcccggcacacagcagatggacattgcaaaggaggtttgctctctttggagatggtcaggggctctcgttcagctcctgcctcctgagcctagaggccccaagcttagtgagacctaaatcctgactgcacaaagcagaccattcctccaagtgcctctctcatgcctgtgttcaggctcactgactggaaggactcccagaagtcatttaagcccgttcttcagcctctatcattccagaatacatttttcagataacctgcttgcattccctcaataatgtttcatttcctctaactcagtaggaaggagatgaaacaagtctaagagaaccaggagccttctgtaagctgtgcaggcaagagagtgacttttgtgggggccaagctttaagatctcttagatagaaaactggaccagcctctacggatgtcgatgctctgtttcttggttttgcttctctgtaaatctgagggagaagacaggaaggacctggggtgcagcccttctttgcctgtctcataggagatcctcacctcactttgtgaaaacccatgctgtctgtaatgatcccaaaagctgctgcaaaatacctcaatataaaagacatgttaacctggacgtggtggctcacgcctgtaatcccagcactttgagaggccgtggggggtggatcacttctttggtcacctgaagtccaggacttcaagaccagcctgggcaacacggcaaaaccccatctctaccaaaaaatacaaaaattattcaggcatggtggtatatgcatatagtcccagctactagggaggctgaggcaggaggattgctgggttgcttgagcccagaaagttaaggctgtaggtgagccgtgattgcgccactgactccactccagcctgggtgacagaacaagaccctgtctcataaaaaaaaaagaaaagaaagaaatgttgaatcattgtagcctaaagcaagaagtgaaggaaacagtttcagggtgtccctgctcccggtgggcgggagaacctggctgcagtagggcgtgcaggcttccagggtaggagtttgggcaagaccccaaggtctgccccgattgggacacaaacctaggagcgcacctttgcctctgtttgctgctctggtaataggaggcgagactggtgcctgcctttctggggccctgggaggctcctgtcacgtggggaaagtgctaagtaagcacccactgccactagcagggcctggttgacagagatgcacggggaagggcgatgagtcaatctgtttatgaaaatcacacatatcgtcacacataccgtcaagatgacccgggggacagctgagccctgagagctgatgagtcttgctcatacttgggggttctctggtgtccctttttggcaacccgtttcctgtgcttccagaggtctgcacgtgaacagatgcatgactgctgaaccgagacacagggtctctaccctgaacagctctggtcaggagagggaagctgggtgactcatagcagaattcagagctgcgcattggccactgctggggcagggctgcagatgcttctttggaaagcagcttggggtttctggttctctctgcgagtctgcattctcacttgctgagtgccatttagccacaggcacatcagcataatctgtcagaaatatgaattgcaccagtgtagcttgataactgcttataagccgtcatgtggtattcaagtcctccctcaaaagtttccttgttggaaattccttaagtgggagttcccaaaactctggctttggatttagaccaggatgacccccttaaccaaatctcttacaaggtcttttttgcattcccagaaactaattaaaaggcagtgttttgtccattaatgttcttggcctagagaggtaaacttttagcaattggaggttgaggaaatcttgtcccttctactatatccagtagtatcctaaggttttaaaatgtataacctgaagttttttcaatctcaggaatctctgaaaaagaaccaggggttactaaagagctgttcacacagaagtaagtgtgtttcctttagcagggctgtgcctgggagagctttggggagagaagatggcattttagattcttgaactttctgcagaaaacttcgttttagattcctggctttgtaaatgtcatcctccagcatgggatgaagaagtctgtttccacttgtggccacctggcagagctgcctgtgtccctgttgctcagctcagtctcccggggaacaggcagagttacttatttcagatcccaggtccctgggggaggtttgggtggggggattttcaggaaacacgagagcctctagtggctctcctgccaggctgcctcatcgtccgtgcactccctctcacacccgactagaaagtagctcctgggcattttggagttccagaaagactctgtttctgtcaaggaataggacttttcattggggatccacttcctcctggctgtggcctacaccttctgccctttccttgtggaaaggtgggattcaaggctgggattagggatagaagaggaggtggtcagaccctactgctaacatctgctgggctcatacagagctgtctcccatacagttcatccgatccataggctcttgaccttgagggggtcagaccagacagtatacgtgagaggtatgcaaaatgtatctgcctctgttgagtgctcttgtgtatgtaccaggcactgcacacagagaatttaatttaaccctgaaaacaatactttaggatacatggtatttccattttatagatgaggaaactgaagctcagagaggtttggtaacttgcctagtgccaccagccaggagtggcaggatctaaatctcagtttatctggctataatgttacctgttccacatgacaggaaatgaggcagcccagcagagtgatgaagagcttggatccgcagccagcctgcctgactacacatgtacagaaccttgggcaagttgtctcatgactctgtgcctcagtgttcccatctgtgaagtgggacagtgacagcacctctgtgatgggttgagagactcttatcacacacacatagcaaatactcagccctgtgtctggctctggtaagcacacgagctatttcttgaactggcactagaacagctcgcatgctatgggctgcgctcctgccctgccttacctctctgtgggctataaaggaaggattaagcaactctagctccccagaccaggaagctgttcccaagaaggtgtgttgggggtggagatggggctgagtcccctggctggcgcctctgagagagcggcccaagatggactctgcgggtgctcggaggttccagaacttcagtgccaattgtctgccgatcagtgaaggcctttggtaaatttccaccctctgtaacttggccttgttgttttgcatttaccaaagtaaaaataaaatctctggggaggagtggatgagcgcagggcgggagaggatctgctgcgtgttgcaggggtggcccttaaccagctgggcagagcccaggcgccctttcccagaggaaaggctgagcccttctgtcctctgggctttatccattaggaagtcagcctcgaaaggctgcccatccgcctcgtgctcttccccagcccctttggccactccctgtttcctcctattgttggtcccctcctagcctccgggcccagcagcctttgaggcctggagaggcccctggtgtgagctctgcgaggcccctggtgtgagctctgcgaggcctctgttcagcacagcatttcctgtgccttcttcctctctcgcctctctcctctagcccttcattatttttagttcttaagaggatggaatccaggagagaggaggagggaagagccaagttaatgaccttctcaccagagatggagcatttgctgggccctgcccaatagggagggttaggaacatttccattttgggtgaaggacacctcgattcttgagtaaccaaaaaaagactctggtttagcaagattgcaggcccctttgatgccagctcctatagagtgtggatgagggaaggagtgcagacctgaaagagtcgctaaggaagagcattctttgctggtgtctccagtgtccctggctcctgcaggatactggggatgcccacgaagagatgtcccctgcctgccagcaagggcatcacagattgagggatgggagagtgagcaaacagtgactaacctgagtgaaaggttgccctccaaacccttgagtgaaaaagacccctggggcctggggccagccaggctgccagccgtggggtcctggagagaaacccaagcagaccaaacaggaaattcccacaaatatgccccctcttgttacttggagaagtctctagaaaaatccaggtgtgagcaggtgaacataaagcagtgtgagccttggtgtaggtgtgctttatcttccaggcctgggcccttagcatgtgctgggtccgcagggtcctcttatcagccagatgccgggagtattggattcctgccggctgtgcagcctgggggacatagagaaggttaggacagatccccagttccccaggagccttcctgccactgggagacatggtatggcacacaagaatcacgaagcaccccagcttcctttcccttccctgccccacctgcaggtctgctgtgcaggtgccctgctgggaagctctccctcctcccttctgcgtatccacatcctgcatctccctccagcttcagggaggattccaggagtggcgtggggctagagtggcctgagagacttcagggacaaggtagggccagcttgcagattccaggggatctgctggaaggagaggtaggatgtggatacacagaagggaggagggagagctttctgggcagagcacctgcacagcagacctggaggtggggcaggtatgggatggcttgccctgacggattggagtgggcacgccagagagtgagtgtggggccgtatctgggggtggctctgtatcccggagggaccctgctccctcttatgggtggtcagggagccttggtgaggccctgggctgctcctggagccctgtccttgccgtctgggccttgggcaacctcctttggcagggtttagggcttatggtggaagaggaagagtggccatgatggagggcccctgggtgccagtctgggtgctgcccttggcctagaaactaggcctctagttgcaacaggaagaaggcagctaatcaggagacagctgggcagtcactcagggttttcctggttttggccagaatgtgctgctaggggtcgattgaccatggtggcgtccctcaaaaagagtcagccaggttgggagctccagccttcagcccgaccaggtctacgcactgcaaaccagggacccggcagccctcgcagcctgattgggtgtggaggggacagagcgctcacctggagctagtttagctagctagttcactgagctggttcgtgtagcccctgcagggggtcccggtctgcaggggctggtaaggacccatcatcctcgttctcctgccccaggcccagcagttgcttctgaaggagggacttcaccaacccgacagcgctcagtaatccctaccctacgctcatgggttccataaagggcgggggagaagaacctcgtgcctggtgagcagcgctgtggaggatgttcggtgccatccagcctgcgggaacatcacacggcgggtggagacgggggatgaaataaagccttactcgggtcttttctgaaagtgcttttgcatttggcatttagggggattttcttgtttgttaaagggggaaaggcagttagtcttacatccagacttttatttttagctggagctacctgtcctgccaagtccttgggcttaatttttccgatccttggtgtcttggttttgaaagcccttcccctccttccctcccagctcctttttggcaggggcaggtttcgcttttggccccagccaggtttctaaccagggctacaggagggagctattgagccaggggcccctacctgcctgggcttgtacccagctgccgccaacccagctgggccctgccagggggaatacaatgaacaaagttggccaccgcctccactctgcagcctaggagaagcaccaggcttttccccagtgaaggaaataatgatcactagggaaaccctaactgcttttttagaaagaccaaatgaagaaggaaggaaaaaaggattttttccaaacatggaaaactcaatgactctcactcagacttttgcaagagcaaaacaaaggctttgacacagaacaaattctcccctggcaggggcgttcttcatccactttcgacgctttgttagatgtgccttccccgagcgtgtgtcagtaaggacgttctgggaacagacttggagggaggggagagtaggcctttgttcaggcctcccccatctgaaaggtcactcttctgacaaagcccttgctgtttatgtgaggctattttataaataggggggaagcagatagccccaggtccgagagagatgatgggagcccagtaatcctgttggctgagacaaaatccttggaattaagtggcacaaacctggaagctgtgtgaccttttgcaagttactaaacccctctcaacatgtttcatcatttgcaaaatggagacaacaatatcagtgttgtgagagttacctgagctattagcttattagtatctaacactatgttagacatgtaacgtgatctctttgcacacacgcagcagagttcggctggcaataccgttttcggagtgttagagggtccagggatcatttcccatttctgatattttagagatttcccctcatctcttttacccaacaacaacaacaaagggagactctttctttacgattatctaaagataaaagccaagtgatcaaactatttaaataaaaagagaagtgctggaggaaaaagtagcaaattgagggaacaagtcaggtgaaaaagaggctaagaagagaatgtaaaccccctctagaaaatgaaatttgccaagcaatcttattattcaccttgaaaatatctttctttggcagtgcctagcagagttccacatacatgaaataagatgctttgggaaatcattcttctttttgcaacgtcagtgacttgaaccagaaactgatattgactcacttgggctctgactctttccaagttacacatctgggggcctaaggaactgccccatgagttcccggagctgcgatgggcatgggacgggaagctttgtaagcaattaatcacacagttagcctcatctgatcaccactggccacgatcaggccctctgaaagtgcctagttggatgcttgccaatctgctatgccttggaggaaaaaatcatttcaatttaagaaaatagacacagaagcaaaaaaccaaagtgagcctggaaggtttgcctgtctgtgacagtctacagagcagctgtttgtgcctgtcacctgctcaggctctcacggtgactgcatggggagggcagggtgtgtgcattgatacctgccgtgcccagtgtacaccgaggtttgcccatgctgcagctggaaggctgcagaacaaaggttcgttccaacctctacacttgaattgcattctgcgtcatcatcctgccttctagaacaacatccaactccgtgggctgccttttaaaatcttgatggagggggagaggagtatgtatgttgcttcagcccttaatttgcaaggtggtgaaaccactatgggcctggccaaatcagcaagaagggggctggaggaagggcagctgtcttggggtacactgggactggaaggagctgccttcctgaagtcctccttgcttctctgaagttgtcccagcacagctgtggcttccgggagaggaatgtcagggccctgataaggaaatgaagtggagcccgcacctgcccagaatgtgaaatttcttcagcagcctctgaccgggctccagatgggcaagtgcagcccctcccacacctgctgagtttgatctccctcctcctggatgctgtgaggcttggcacctgcccagccaggcactcaggaaacctgctgggggtctctgagcgcccaccagggtaaaccaaggtccctttcttgtgttaaagagaagaactgggatggaagcgtgcccagggctctttggaagcacccaggaggggcaatggaaggcttcctgggaagagggtttctgggttgcattttaaaatacacacaggagttagctaagtcctgagcatcctcagtcattcttctgcaaagtccctaatagcagaagctgacacccttgcgggcctaaggtggcgtggggacaggtgtgtggagcaagaagttgcctgcagaactccacaggcctgagagaatatgagcccgggtgcgctgcagatggtgccatgtgtggatgggagtgggggtcaccagggctgccagtgacctgcagtcctcacgacatacaagtgtctgcccccagcgtcacaaccctttcttctacccaccccaaattgcactgagaaatataacattggtttggaggggcgggaattggctggaaagaagacaggaagcagaccccagggggcatgtgggctgagctgaggatcagacagtgctggccctgggtggcttggcctcctgcggagaaggctgggctgggcagggcaagtggccactgactggctcagacagcactgcagggacaggaagcaaggccagactctgaacaacatgcagaaggctgaggtctggttgcatcctcaccgctcctgccaggcctttccaggggacttctctgagccccaaaaagagagccacaggtgccggtggccttgagccctcccctgccctaggattgaggagcctctggtcattggctgtgagcaggccacagaggcctgcaggcctggggtcacctgctgtctcctaacgggggccatttcctccccaggaggcagggcccatttcctggctgagcagtcacagggcatgagaagggccccgagcttggtgaagttctgctttccccatcatgacattcttactgaattttggacaagggacccctcattttcattttgcatgttatgtagatgatcctgatgatagctaaagcattttgtaagtggggtggccagaggcccacacatccccacagcctagagtagggtaaacctgggtctctccttcccctccttcctccctcttcttcctcctgccctcctcttcctcctcccctcctccccacctcctcttcttccttcttctctcctcttccctgtcctcttcctcctcctctttcctcttcgtaccctcctcctgctctcccttctctctcctcttcttcctccctcctccctcctcttcctcctccccctcttcactcttctcctcttcttcctcttcctccttcctcctcttcccctgtccccagcagtccttttttgcctgccttatgaacgacaaaggctagacctggaggttatgcccgtttgccctctgatttgttgaaggcagtgtttccgtacagcatgactgaggatgcctgatgggaaggacccggggaggatggcgtcacccaggaaccgttagcatcacgggagggttgggacttgatccagaaaaacacacagaatcagaccctccccaggcagccccactggctcggggcagctccaaggatgggctggaggtggggaggagtaactgcttgcccaggaaggctccacacccacctgccacagaaccctgggtctgttttatggctctgtgtgttgagcaggaggagatcattctgtgtaggccttggcccccagggagtagattcccatctgctcttcagaccaggaacttctgggaaaaggggaagaggaaaagggagacaaaatgtggcatgccctgagcttccccaaggcgagggcttcctactcccaggtgacgtggggagcagaatcgggagctggggcaggcttctctctgttgcaggggaatgtggctgctgtctgccggctcctcaagctcccttcgcctctgacttcctgtctcctccaatgcaaagatggttggggttttgttgtcagattttttccctcccactacaaatctctctccacattctctgaatattttagctctttcaagtcgggtgccaggggacaaaaccacaccagaggtctccaggcctctcttgagtttcaaagaatcactcccctccccaccaccaccacccctccctcaccctggtccggctgttttctgatcctttctttccacatttctctgagtgaattgaagctccatctttccctgcgcttctggagttcagcacgagactctcttacagagcagggtccaggttgcaacaggcaggggtgacaaatgtcagcagcaggcactgcccaccctgcctgcagaggagcagctaagcaaagctcagaccagtgctcttgtaaccaggagtgcagccacctagggagttccccagctggttcgcatccaagcctgtgaggccgggggttacctgaaagacctcatgcctggtcttcagttggtttaaccaccctgcccagaatcaaagtaaaagccgtgtgtctccagcccactccactgccctttacctacccaggggcacccctgcgttgtggtgctttcctttccaccgaagtgtcctcaagaacatcacaagtgcagaactccatccggagtctagaagtgtctggctgctctgatctgacacatgggagagcttaaaccttgtgtcatctgacagctgcaccggaagtggcacctgagcagccccagggagggatgtatctggggtttcggtggccagctttaggggcaccaggggccctgggctcctctgctaacggagcagccagaaaacttcactgggctggcaccctggctgtccaggggaaccgccctggaggaatcttgctcttgtccttcctgcccagtcttctgcctcttgtcccctcatcctgctgtctcgagactggaaggggcactcggaggtgggccctcactcgttgataggcacggaagtgggtgaactggctagaggctccccatgtgcatggtacctactggcagggcatagaatgggatgactttggagaagtaacttgctgagcctcagactctttcatctgtaaaatggagaaaacactcctaactagaacataggaacaaggccataattctctaacccgggcctgtcacatagcgagagccccataagtggtaacaggtatgagtgtacacaccgtgccatggtactggtgcacgcctgcagaaatgggccctcctatctccccgagagatgacaaaagcaatgccggccagcagcaagtccccctgcacagtactactcagccagcttaggaagaaacccagcacatccactggctaggccgaccccacatctgtgtgtgaggaagtaagggtcacagcagagctggccacctgccccaggtctgccaaagagaggctcacagccccaggaggccagcagggacctgccacacatagggagctttgggagcactccgggaggtgtccacaagggatgtctcgattcccctgatgactgggaggtgatgcaggagcaggtggccagctctgccctgggcaggggaccaggtaccctttgccacaccacgttcaaggcatttgaaggccacttttgtatttcctagagctgggcttgagaggctggagacctgggacggggtctgatttcagacagagaagagacagaggctgctgtggagagctcactcttgaatatctcccacaagggagggctggaggggcacgggataaacccctctgggtgggattcttctgggttgtcctcctttcttgccttgttacctgtcttatctgggggatgaggcctggagtccatttctgaggactggggcttcctccagccagtgcttggagggagggctgttagcctgtccgctcctggaaagcggcgtgtgcctggagtggatttggttcctgaggcagatgctgtggtctccccgaccatcacaaggacattgattctctggaatctcctcccatcctttagttcatctctgctcctaggggctaggctggagtggttggggtcaccctgcagccctccttccctccttcccccagcctggacctggaaatggctttttctgtttactgcttggcagtgacattaggcactgcctgggtgctgctatttaaaaaccatggggaaaccctgtgtgctgctgctggcagagagaaaagaggtctccagtgcaagtgcatggcattctcacaagtggaatattccacggccctcatccaggcagagcagccttgggactgggggactctcagggccttggccacgtgggacctattttcatggtgaagaaatggaggaggtgtgggcagaggggagccaagcggtaaaggtgcctggtttggtcagagctcagcgatgtgagaggcttgtggatcctttgaactgtcagaagacccccaccctggagcaccccctcctttctagacccctggtctttagcctctgggagaggtccaagaactggaagtttcttagcttcaaatggccttgcagaggctaagccacactgtctcgcccagcatctgttcaccttcctgggtcacaggctccctgctcactgtgtcttgtgggtctctggagagctgcaccccaacaggatgggcatgaccctgccccaggctccgaggtctttattgttcagaacctaggccagcaactccacctagcacaggactgaccattcttgaagtaacttcagagacacctgggtcccctccttgaacacagagggctaaagaccctcccacagacaccctggtacccacatctcctgacagctttatctcctgggagaatgggaatctatgtgtcgctctttttacaaacaaggactaagaacttgttcaaggtcagtcattgaggaggaaaaggggagccgggactcgggcccaggttggcctgcctcaacgccccacgctctcccgaggcctcgcctgctcacctatctccctctgtctgcagcccccatgcccatagcaggtctggttcccaaccactcccagttccagtccccgggcctttgtccccacactcccgctgccagctgtagtcttctctttctctccactgagtctggcccccagctgtctctggtgggtgcagcctccgtaagctccctccttctccacagtgagctgccttctagggtcctgggacccttcctccatgcatgctcatttgcctcctcctgtatacataaaatataaactggcacgctgcagctgggagagtagccctctctagtcttcctcggaggggccattgctgttgggatgagggaaggtcactttccagggccctagagtgtccatccatccaaggagcctggtataccagctgtctgtccctcaccggacacaggaaactgaggccccaggagggactgtgaaacagtgcaatgtgtgttctcccctgatagggacatggcatgggttagggcgagccctggattgagacactctgggctcccctcctcccacaccacccctgaagcctgtcagcccctgtcctctctgagctctgctgcagggatgtgacccacgggtggtgaccggctgtgcactctccccctggacccaccgtaatggcttccccctgagcaggggcgtccccacgagccactgctgggctcatcttgtgtaatgaggtttttccattgttgccctcatgcattgtgtgccctgattgtttatgcagccttctgggtgcttagataagaaatgcctccgctggctctagccttctttggcgatctccatcagaaggatctaggaaaaacatccttgtcagtaaagcctcggcccttttgtcacatggcctcatggggcgctgccctctcttaagaatagaattggtcttggcggtggggtgagagtttctgggatggggataagaattaccaggtttagtaaggaagaattcctctccttaaatagattttaacttgaaaacctgatgacagaagcggctgagtctcagcaaagagagaaaaaacaaaggaggccgatttcaccttgacttcaccttggggacccagcagccgccgctgacccctgagggctgcagctgggcgcttcggggcaaggagtgggaaccacatcttcagtgtgtccccctgtcaggcagtaccaccctcatctcctctgcaagccacatggcttctgctctccgtggtttagctggtccaggatccactttctcaggaactcacaatgcttctcattcaggttctcatcgcccccctgaggacgggtgtattttggggacacttgatcttcatctctgcagcctgttcttattaaagttcacttaaggatattttttctaaaaatatgttttttttttgtttttttgttttgttttgtttgtttttgctggggaagaaaagaattttattaattttatttattttcaagtagttgtataaatgaatgtttaaatcccagcttcgtcatttacctctctgaggctcaggctccaccagatggaaatagaaaagaattgacttgcatgctcattgagaaaataaaataagatgctcaatataccttagttctcctttctgcccaaagggcctgctctccccaaacacacatgcacgcacacacatgcacacgcacacactcatgcacacatatgtgcatatcacacacgcatgcacacacatgcacacatcacacacatgcacatatcacgcatgcacacactgatgcacacatatgcacatacatgcacatatcacacatgcacacacacgcacacatacgcacacactcatgcacatatcacacatgcacacacactcatgcacacatgcacacaatcacatgcacacatgcacatatatcacatatgcacacatacgcacacactcatgcacacatatgcacacacacatgcacacacacgcacacacacatgcacactcccagtcctggctgttttcactgaagaaacatcctgagagggcggagcgcggtgcagaggagagagctgtgggcttgctccctcctgtgtgacctgaagccatcggtgcaggttctgttctgaggaatttctttaaagtctctcttcaaaccactcgcaggcaagaggtgcctctggtgcctccgcatctacgaattgaatatgaactaatgtggtgcggctgggtggttgtgtcctctccagccttccttggaggggtcgttgctcttgggacaggggagttcccctgagcattttgctcaggctgtttgttaaatggggtaaagccacctcccaccatgtgccgcataggtgatggtggtggcaaggtcctcagagcccgtcaagggcccttcccatcttgtggccacaggcaatgagggcctttgctttgaatttgtcctaaccagaaattagtggttgtctttctaatgtagagctttttgtttgtttgtttctagagcaaatcatggaggaagataaaaaacatggtgcactggtctcccttcgtcatgtccttcaagaagaagtacccctggatccagctggcaggacacgcaggtagacacagctctcccagactttcccagcatggtgctcagccctctggggaggtgccctggacgctgcattctggggatcaaagctccagagcaagttccctccaagactttctagtctgaaatcacagccacacttgcaggctgcggccttaccaatgccttgtaaatgccatagacaacggacctctctggagtctgtgttacccccatcctccaaaacatgcatcctcccctccctcggtctctggctcttatctctgtctcttccagtctctttctttctgtctctcttcccgttgtattcaataagacagatgaagccatcagtctttatagcttacctgccatttgtcaccctggacaaagaggcaaagctaaccccttcattgagcacctactgtgtgcctaaattgccatggtcctgggggttgcggcattaatggagatgtagtttctgccctgagggagcctgcagctggtggaagatgcggccaagccaccccataactgcagggcggtgtgcggtgttgggaggaaggtggctaggagctgagtccaggcagtgccggggagaagggacatctggagccgaggccccagagccatctagcccacatgtaggaccctctggaagcactgtcatctggagacatgtcaggggctgcctgtggacttggccttcgtgacttcaccagcctcctcaggccagcacaaggtcccgcatttcgcttacctcgttggccacactggcccaactcaaggcacatggatggacagcctgtgtgaatacttacttggtctggctcagaagaagtgccacccaggtgggctgagccttaggccccccagcttctcagcctgctgtatctccccaccttggctctgaatcctgtccaatcagggtttctctactgaggccaggagacaccttcgttgccgagaagcagggctgatgatggaggtgaggatgaaaatagcaacactaaggaatgactgggtcgtggcacctcagtctctcacctagctctgtacccttccagcagggaacactggtgaggaggagtctggagtcaaggaagctggggaaccagctcagaattacagttagtgagtggggactaggtcttgaacccactccccttaaggtgctcagtccatagcagggacatagacacaccttcagccccaggcttagccatccccagggaggcccagaccctgtgctggggagggtgcctctgccagctacctgcagccggagaccaggaaccttctacacttgctctccagggagtttcaaggcagctgccaatggcaggatcctgaagaagcactgtgagtcagagcagcgctgcctggaccggctgatggtggatgtgctgaggcccttcgtacctgcctaccatggggatgtggtgaaggacggggagcgctacaaccagatggacgacctgctggccgacttcgactcgccctgtgtgatggactgcaagatgggaatcaggtgagccaggcttctcgcagcccacatgcctgcctcagtgcaagccacatggcaggtgcacagcgtggcactcagggcttcccggaggcctcacaggtgcaagggcaggctgaggaggctgttggaccaattagagcctccccatccccaggcatctcccattatttgcagagggttccgggacctgggctttgcccatgatggcccctttccttctccagtgagcagaagccaggggctggcggaaccagaaaaagggcaccggctgggttctgaggccccctagagagaaggaagagagagctgcccttggttcaggtgggatcgctgggggtgcggggagccaccaggtagggaggtcgcaggatggtgacttcctgctgtgtgagctgcaggggagatgggaatcgaggtctttccatttccccagccctggtgagtgggaagagagagtggctagtagaacatgctggtttcccaaaaaagacctgtatctgcctaaaaggaggaggaagcccctgacggaactcaagaaacccacatggcaggtcaccgcagggccccaggtgagcccggagcagtcactgggcctgtgtgcaggactggctcccacccccaggttcctgacaggggctcaggctcaccctgacacctgcccaggggataagcctggagaggactccagggaagaggagagaggaagagggggcttgaggaggcagggcagagagcagacagggatgcctgaggccggctgctgtgatctcggggctcagttttaggcagccgggttttctcattacctctcaaactgctgcccttccaccctgagtcatccacagcacggctccttctcccctgtgcaggcttggtgaacctccctaaggctgtcggcccccatggtgtccagcgtgcggtgctcatgttgtggggctggccctcactgcagcacccgggctggacggccagatgccaagcccccccatgcttccttgcagggctgtctgggaggccaggcacggagactcagagctcagagcagaaggctgtgtccactgtgactggtttaaccggattatttctcataagagcagattgagaaagaggggtgtgtgtgtgagagagagagagacagagacagaggccaggagagaagagagctaagccagccagcatttctttccttctttcctttcttctctctcctcctgggagttctgtcctaaaatcacaccctgccactgactgttgtgttctctcgccatcactcacagggaaagaatgggggatggagaagcacaggccccactgtttgctcttgagccatccctggccacctccctcccaccatccaagttccttactatctttagcccacagggacctgggatagggcagggaggagaaagaacatgcccccagccagcccgaggcctttgcttttcccgagtctgatttctgacccaggatggcatccactggtgcaccagaatgtgtcctctcaggggaggcccagcccttccttccaacccagacagcagcaggacttcgcaggtgaccacatggagaataatccaagtggtgtccactcagacctggccaaaaaagtacggcctgtgtgaagaacactggctgggcatttctggaagtcggctgtcccaaagacacagccagccaagcacagggccaggctgccccagaacctgcctgctcctgctggggacaggagccccgcttcctgccccagggctgcccccacccagccgcttgacttccgcagcttctctctgattgcaccctagtgctctcaagagagatctagagtgaccgtggctggtacccatgtaacccatcttggcaggcagagggaagaggatgagagaggagtatgtgtggaggggaagaggaaggtctccccagaagcagggtgcacccagcccgatctttcctgcacacaaatcctaaggacccttcttgttccaagggctatgctagatgcttccattatttatcccattgcgttctcaccgccattctgggagatgggtcatgttccagtgtaagcaggagggttctgtcaccaggaggttcagtgactcatcagggccacccagccaggcagcagcttggtgcagttctgcaccaggcttgcttgactgcaaatcaggcccccagctgcagcccagcccttcccaagggggctgtgtgggacccagcttccatggcatttccctggggtgccaggctagttccatttgggccatggactgtgccttcccccaaatgcgttcatccagaacccttggctgcagggcctctcccaagactggctgctcatggtcacctctagaatgtggcctttccatgacagggtgaggaggctggagcccagggttacctcacatgctgagtcccagggcaagagagtttgagacatgtcacagagaaagggaagggccggtcaccaaacaatgctgggcatggcgggggcagaagggtggcactaaggagaatgtgatgcagttgctggtggcgtctgcacgtcggggcttcttgggactctggctcccgccgacatgtgctcagtggctctggggcatgctctgagatttgtgacttgtcctggagagtcaacactgtcttcctgacattgggaccaggggcctggggagtgcaggtgagagcccgcccctagcacctaggagctctgggtggctttcgcctgccacctgttggctccctgggctggcctgtctcaaaggagcacttcctccacctgatcttgagtcccctcctcccccagcgtcctgtgagtgggcgagcaggtctctgcttccctgcatggcttggagcttcgactttgtctcgggcaggcaggggagtgtggggaggggctgagcctcaccttcctgtgggcatcccgccccaccatccagctggcaccccctgtggacatctccccccagcctctttcctctcctgggcagtgagtgactgcccgctttgagccacgggggccctttttggagaaaggccatgtgaaaagggatttcacattgaggtctgcttcctgtttaagggggtgctgagagctctttgcagaagtgcagccacccaccatgcggtcccctacagcgccctcaggagtccctcccacagcctggctgccccttttctacacagtacacacatggatgcacacgcagcccctgcctcaatgcccccgtcaccactgacctggctctgcatgtgaggggtgtgctctgtgcgtgtcctgcatgggtgcacctgtgtgtgtgcagtggtgcacaggagtccgcgtttatgtgcatgtgtgtgcatgagcacatgtgtgtgtatgtgcgcacatggttgtgtgtgcatgcaagggcccaacccaaagctactgacttccccctccagccctcatcacctcctggaaggtcctaaccagccaggcctaagttcacacccaaaggatttgtttttttcttcccttttctttccgtgcaaatttcaattaatacagtggtttctaaagcctgtcatttttaagaggctgtagtttttgtttagtctgttctgggtcccaaaccagcaacttggagaagttggtgggcagtgttggaacaaggcctgggagacagatgcaggaagagtggagggccaggtggagggcaggcgggcggggcctctgtgggcagctcccgcccacacagggcaaaggggagaaaacttccccatcctgcaactgacactgctgatttctgcctcctcaagggctgtgggcagcctctgagcctgttgtgtagggagactggggctctaaaaggagagcagaggagcgggggtgggatgactcaccccacctctgctctggagaaggtagaagcgcagagctgtgtgctgggggaggtggcgtgtcccggcagctcagggccagcgattcagcccccggctgctcaagtgctctgctgtccctgcccctgttaccttccccagtgtctaggtggtccccgccagttcagctggagctgctcgtgtggaggccagggccgtgaggcagttgagttggaagcattttctcaggctttttggactgggggctcacctatgaggaggcctggtgtcgatggggtggggtgcaccaggcatgtctctgggatgagcagaggctgagggagccccctgcctttcccccacaatacggccttctccatccacactgggaccccttccaaggccactttctgacctgaactttgtgctccagaagatttcacctctttggaaagagccagagacacttatgggcaggctcagccttcaggctgcctgagagcagcagagatggggacttgaggacagaccacttctcccaccaggacaggttctggctttggaagccctcgctttatggaagggccgaggcagccaaggggatctagtggggccctgagtagaccctgcccccagtcccctctcttagctccaccgtagcagcaggatcaggaccagccacccccgacaccccctgctgccctgcctccgtcttccttcttctgctggttcctgtgggggtctcccgaggaggagctccttgggctttgtgaggccagccgatgggcttggagtgaaagtgaaggcagtccgattcagtgaggctgcaccttttctcctggatcaagagccaaccccaggctgggtggtggtgcacacctgtaatcccagcactttgggaggccaaggtgggaggatcacttgaggctagaagtttgagaccagccggggcaacatagcgagactcccttatctactaaaaaaattgtctaaaaaaaaaagaaaagaaaaattagagccagccccagctggaacagagtctgccgtcccctcggaaagacgtgccttgactcagggcactgagctgactgcagctgttgggcaacacacgccccaaaccttcatccaccaggcaggaaaggagctgctggtgagccctgccccaggcctcggccctcatgtcgccttccctcccacgtaggacctacctggaggaggagctcacgaaggcccggaagaagcccagcctgcggaaggacatgtaccagaagatgatcgaggtggaccccgaggcccccaccgaggaggaaaaagcacagcgggctgtgaccaagccacggtacatgcagtggcgggagaccatcagctccacggccaccctggggttcaggatcgagggaatcaaggtgaggccggcgagtgagggcagcctcgggccccacccgtgcccacctcagggggcttggcttctctcagcgccctttggaagctgtaagcttctccaggcacaggctcagaatgtgggtggcccgccccaaggccagacatttggagacatcagcctattcctcaggcgggatggctgtgtagggggctcaggcctcagagcagagtggcttctagccctgcccagctgtcagccctctgccgaggactctccatttagcccagacggtgcctggcaccgaaagccaggcgagaggcacctgcgggatgcctgtggggtagctggttcattctgccatggctgcaaactgggactggcagacaattcggggaagggaggagcatgctgaccgcctttgatgttggagccagggtctctgagaaactgcattctctctgctttgctcttcgatctttttttggaaattttaaaatatttattggaacagaaatagaaacataagctccaaagaaacaacatgacaaactttataagtaaatgtaattttcccctaattaatatatttactttgtgtttgtggtttacaaaatgatggctctttcccttctatccctttgtacctatgtgtatctggcaggaaagttcttagctctggctatgggcacacagaagcttcctatacatgattatgttcaaatgttgatttactttccccagaataaattggggaactggcactgtctggattggtgactgtctggatgatctccctgtccctgggcccctgtgtgcacccttgctgttaaatttgcaagagccgggctttggggcgccggcccctcagggtctcagaagctgtccctcttgagcagatggcagtccctgtggggttgtcgggtctcccattctctgtccagtcatggtctgcatcatctccagtgtccagcctggagtcagggttgggcagccgatggtcctgatgggagggtcccctgagcctcctttcagatggcatttagacgtagcttccgcagctgtcaatggctcgctgcccacggtggcatgtggggaagtttttaccttcccccgggacagctgctttgcgagctctgggctgagaaaggcatttgcccccttctttgtcttttgaaaccagcccttccctcttttttgcatccagctctgagactggatgcaaattccgtacccatccgccttctccttaacgctcgctttcctttctttattagaaacaatccactttcccttcacctctccctctcgagcaggatgtgctcctggtctctgtctattgtccagccgtcagaacagccgacagcctgtcttcccactcagagagaagccagctgtcttcaccatcacctgcctgccccgcccttagctaagaggctctgcctggggtgcactgcccacagcccccggctctcggcccctcctgcacccagggctgctccctcagccccaggtcctgccagtcctgtcgaaggcagccacagtgaggacacagctgaagtactctccagcctgagggcagacacggcccactgttgggactcctggtggagcattccctttgtccctaaagaacagatttcctcataggtcagcaaagccccacatgagggcccaggacagcctgaacagagatagtgctggggccaagaagatgggagtggggtgggcgagggagcagagatgggcagggctgtattggatcctggctttcagaaaacgtgaaagaagagatggtagattataaaggaagtcaagctgagctcagggcgggagcaagtctctcctccctgtgctgaggggaggtgcctctggcgggcagggacctccgggcaccggttccagggcccgggccccagagtgggaagtcgaggccgaccctctctcttggccctgctgttgcacccaggacaggccagccccgggtcatgctcctccatcctcagcctggatgcccttcacacctccgggcctttcctaccactgttcactcgcctggggatgtcagcgccaccctctgcgttctcctgtgtctgggcacagggcaggctcccctctgctgtgcacgccacctccatgcgccatacgtggacacctgggtgcctccactggccctgccccaggttcagatggggctcgcctgctctgtggtgttgggtgggtgagaacagtttctgcccgagggtccctgctgaccccctcctgggtggggtgttctctttctcagaaagaagacggcaccgtgaaccgggacttcaagaagaccaaaacgagggagcaggtcaccgaggccttcagagagttcactaaaggaaaccataacatcctggtgagtctggcacctccagagagggtctctccagccagccagggagggacaactgtgtctactctggaggtgcccatggggaggacaaggcacccccagggacagcacaccccagcccgagttcgtagggctctgtagagaggccactggcagagacttttgtggctctctcactctgccctttcaaaagtcaaaggcacgccgggcacagtggctcacgcctgtaatcccagcactttgggaagctggggcaggtggatcacctgaggtcagaagtttgagaccagcctggccaacatggtgaaactccatctttactaaaaacacaaaaattagccggacatggtggcgcatgcctgtaattccagctacttgggatgctgagacaggagagtcacttgaacctgggaggcggaggttgcagtgagctgagattttgccattgcacttcagcctgggcaacaagaatgaaactctgtctgggaaaaaaaaaaaaaaaaaaagtcaagggcactgaagttagtacccaggaaggtttgtatccatcctggccccaggcttctgcttggaaagtaaagaagaaggcgatgtgcttgtccctggcgtgcggcgggtaggcggggaagcttggcggacactcactgactctcccttagccatcggccccatagctccagagagcatttcccatgccctgagagagagaacagtgcccgccgtctgccaggtgtcatgccaagcgtgcagcaaatcttcacagcagacctgctgtgggtagacctgcttgtccccatcttgtgtgcccgaggtcacgctgctccctgccagcaagagctggcgagctgtctccgagtccaggagtgtgggttgtacaagttcatgacaaagttctgtcttgtgtgttgctgctgcagcggctcgcagactggatagatgctctgcccacagggaccagagcactgacccttccagctgagtcagggaatattgtgccactgtgccccaagtgcacggctccctgggacagtcagagatccaggcacatctgggacacgggccctggagcccctgtgaatggcaccttctgaacagtccacagcagctgcagagcaagtgggggcggaccaggcagccgtttctccaaggagactcagtaccggctggaactgggaaatcttccttttccagctggggaggcttcccttggctcctggcaagctctgaggctgcaggcagggggaatgtgcctgactctttcgtagcccaagtcctccaattcctgagtcccttgcaggggaggatctcagcccctaagcagtggccaccatggaacatgcctcctatgcctggggtttgttcctggtgctgaagactccagggggctgctcggctggcccggccagctgtcactcttttccagcaggcattgaggaactctgtgtacctgtgtatgacgagcttcccaaggcagcccgggggtgagacccacagagctggcttctggggaagatggggcaccccccaaggccagcaaagcttgacatgggtttatagggctccatggagagggcactgggagagatatttgtggttctctctcttaccctgtcctttcaaaagtcaaaggtactgacatttatgctgagaaagacgccacagcagccctgctcgcaggaagctgcctctagatgtccggcgtttagggtaaagcacattcacgggagggaccactagaggccgcatgggtgttctgacactgcccttccccacgcggcgcttaaaaatctggtcctctttctattcccagatcgcctatcgggaccggctgaaggccattcgaaccactctagaagtttctcccttcttcaagtgccacgaggtagatactgggcttttgccctcttgagcagaatgctgcgcgtgccaacaggccttctccttctccttccagaagcccggggcatcgggcattttcagggtggtgcagccagaggcaggccatcagggaccagaccctcgctgcacgggggagctgcgtctcaatgcttcctggggtgaccacacgggctgtcctgcctgagacccctggctattgccccctttctcctcccttgtccttccagctccagagtcttgtccattctgggcagtggtggcaggactcatatcccacacacccgtggtctcagggcagaagctctctgagctgctagagtagccaggcacccgccgaccgccacctacatcttcagatgagaccctgaggagggcaggcaggtcttcaggtgccactctcgggcagggctggaatctcccaactttgcatacgttggttggcaggggcagcaggcagcaggtggggaactgagacacctgagagaggctctgggaggtgtcggcaggttccctggaggggtgtgagaccctgacatggggagtccaggtccccagccacatgacacattcacacacacattcacagatcccacactcatcaatcctataccacacacattcacagatcacactcataaaccctacatgcacacaccttcacagatcacactcaaaccctacatgcacacacattcacaaatcacacacattcacacacatgcagatcaatcacatgcatgcacacacattcatacagcacattaacacaagtcatacgtatacaaacacacacatgtattcatatatccacacacatttttgtgtgcacacccactcatacacaaacatgcatgcctttcccagtctcacacacacacacacacacacacacacacacacacacacacagagctgcagtcctggggctggctaatcccatgggtgggtgggtgtgaagcgggatcctgcggctccctgcagctgtgtaggtagttcaggaaagcagcccctctcgtagggactctcttgtggaggtcctcttgtatggggtcttacatggaggtggcctcagcctcagcctatgcccacagagaaggctgcggagccagcaggaggaactcatagggtcagccctgaggcagccagcagggcggtgcatctttctgcaaactacaccaccaggcctcctcaggcagatggtctaccttgctctgcatgtcattccctgcggggcgcctggagaggatggctgcgaggagggggtggcacacccagagaggagactcaggctttgctgtgcccctagcagggagctcggtccttctcggaatgttctttgctctccttgtcccccagaccctcagctcctcctgtggcctctcctttccacttgatgaagcatcctcctgccacctgccagagccccctttgccccagctgcctctctggacgatgggggtgctgcctggctgcctgaccccaggggccaagcctgggagaacttaaggccacagagctctgtctcaaagccgttcccacccttcttcaacacttctgcttttatttcttggaaaagcattttgttctacactttttggggtctcccttaaggtctagaaagaggccaaatcagcttgggtctgttgttttccacctgcgaagaggaagccccttttttgggctcagcctcgccaggggccccacctgccctgcactgctggaagctggaatgtcacctgagccctttctgtgcccccggccttcctctggccccactgaggtgatgcaggggtatgtgtggccatatttgggaaagcgcctcgctcccatgcagaggctctgagctcacccaggaggggcaggctctttggtgcccactatccctgggccaggctgggaaggccctatagggtctgcccacgctgaatctgcaggggttgtgctgctggggtgggggtgctgtgtgcatttgaaacaggttcttcaccacccccgccccgggatagtttggacgctcctgggcaccttccccttcactgtggttccctgcagagtgtttgggaggagtcaggttctaggaggcggaagggcgaggccccagattgggttgtggtctagaaagagtggaaagtttgcccaggtgcagtgtgattcatgcccgtaatctcagcactttccgaggccaaggcaggagaatggcttgagcttaggagtttgggaccagcctgggtaacatagtgaaaccctgtctctacaaaaataaaaaacaaaaagttagccgggcatcgtggtgcatgcctgtagtcccaactactcgggaggctgtggtgggaggatcgcttgagcctaggagatcaaggctacagtaagctgaggttgcaccactgcactccagctggggcgacagagtaagaccctgtctggaaggaaggaaggaagggaagaaaggaaggaaaagaaggaaggcaggaaggaaggaaagaaagagggagggaaggagtggaaagtgtgcaggccagagtcagggggtgaaggggtgcctgctgctgcccacacagaagggtggtcgccgaccctggaacccgatgccctctgcccaggcatggccattcttgggccggctctgctgcctgtctgaaaatggggattggaattgcaggcacccaactgtccggcctgagcgagcctccccacctggtcacccaggccccgggccgcagtggggagggcgaggcccgggcttcagctcacccttcacccccatgttctcctcaggtcattggcagctccctcctcttcatccacgacaagaaggaacaggccaaagtgtggatgatcgactttgggaaaaccacgcccctgcctgagggccagaccctgcagcatgacgtcccctggcaggaggggaaccgggaggatggctacctctcggggctcaataacctcgtcgacatcctgaccgagatgtcccaggatgccccactcgcctgagctgcccacgccctccctggcccccgcctgggcctcctttcctcctcctgtgcttcctttctcgttcctaacttttccttcacttacacctgactgaccctcctgaactgcactacaagacactttgtagaagaggagatgagagtttctagtcattttcctaacttcagggcttggaggtggtgtttgcactgctttttgtagagagggtcacctactagaagagaaatgcccagtcttagaggtgggtcaggtgtagagctggagggggtccctggctgctgaggggaccctaccagatgagccctgcctctgggagccccctaggaagcaccagcctggacctaccacctgcggaggcctgctgccccctggcggccagtgctgttagagtgctgccaagcacagccttatttctgccggggcctccccaccggagagcccagggggccggccgggttcctggtccctggctgggagcagggctttctggtagttggggcacaaaaccatcggggaaccacatgttgactgtgagcaaagtgtcttccgattagcagcctcagggatgccctggtggcctctccagggctgctcaggcaaggccccccacccatctggtatggaaacctgccggctccaggccagacccaggagccaagagaaggctgaagccagcttggctgtgttctctgatctaggccttcccagaggaggcgagcagaagctgtgccacttggaattgcaacccatgagttcagaaggcacactctgccatgctgagctccaagggtgctaccaggggaagatgggatctatagagtctctgggccctggccccagggaggagcacatttttcttgaccctcacctacctggtgctagttggtcaaccctgcctgcatacatgggctcctgtcatggggcccagagtcccttgcagatatagaaataggggaggagctcaggtctgcgccaggcaggaagaaggcaggcttctggcttccagaggtgccgcggtggcctcctggcatcatttgttattgcctctgaaacaagccttactgcctggagggcttagattcctgcttctccaatgtagtgtgggtatcttgtagggtatgtggtggatgccagggcgtgctccaggcacctcttcctgaagtctctgcatttggagattcgtggagaacctatttaagcccaattttaactgaaagccagtgagtctgatatggaagggaatgtaaaatttgcctgacttcttaagaacaaaacccccagctctgtgccccatgctccttggggcttgccacccactcctttgctgtcagaggtacaggagctgggagagtccaggagctagggacacagagggagactatggaccaaggtgtgtgtgtctggaggaaccactgcccaccccaccaccccggggtctctggggaactgtcaacctgcccacgggacatgtacatttccccttttgtgctggaagtgtgagtgacacttgctgggggtggagggtgggacacatgaggatgtataagtacagattttaaaaaaggaaatcaacttacacttcctggctcttgtttaaaacagtggtgagctcctgtgtgggccgacttgctaaaggtcacacacgcgcccggtggagcacgagagacctcgtggcagcatgtgatctggaaggcaggcaggacgggggcgttggggagccaaagtcaactctgggcctctggagctatagtgacttttgggctagaagggaccctggtggtctgtgcttcagccatttgcagggcaggggcatcattaattcagacgtaaagattctatgaatatggactggccaaaagttatccttactccatctgtgaaagaagtttgctaaagcaaatcatgatatgaacaaaaattacaggggacctgtttaagagaacaaaatgttccaagcactttaggcagacaccagctgtttgcaaacaatgtgctaatatgcaaatgatgtgcttattaaaggaggcccatggggcctcttattggcaatacttggctgtgggttacattaaatatgtgaacatagtatgaagtagcatcattttagggttattctgttacttagggtttttgttttctgttttttttttctctttttttgtatttaccgtgctagttctcttctacacctactctgtctctcaagccattttgccactcgcttccctgccatctggcccttccctttgtctcagtgggatagatggattgtgaaatggaatctcccagaacccctgccctggcagcctggaagaccgtgcctgcccagccctcgtcaccacagggactccttgggtcctggcagtgcatgtgccagcaggcaggacaaactctgtgtacctgtgcccaggtgaatgggcgcagggtcctcttgccctgtcctgcggggggccccacgagttcctggcattcagcactgcttagcattctcggaaggtttcttcaactgcttgcttttcccaggcttgcctttagtgtcatgtaagacatttttaagttatatttattttgttgggttttaaaattgcacagaacactaagaccgaaaggctggactcttgtttctccttgaaagctttgcctttgttttgaacttcctttcccacttggtagaaagagcccagaagcagccctggccctgtaagatggactctttcatccttcagttgtatttagctttgagtttctctgcatctgtccaccccatgtgtatataacccagcccctggctctggggtggtcacctcgtcagtgccttttgttctggaggagaggaccccccccgcctgccgagaggctctcttcctgttctgcacccctctccccatgggaccttggagaaaactgaactgttacaaacccctgcacagtgcctgtcaaacagatgcaaaccttcctgaataaagccttggagaccagcgctgtctgtggtgtgatccttctggcccccagccctgagacctggctgaggggcaggctggggagtcttaggaagctagagggcccacatgggggctgttaggggagtgggtgtcagactgggtaacattttaatttgtaaagaatataaaccactctccaaaatgagtcttttcaaccctcatgaaactttgaaatagtagctcagagactagaacatcaaccaagaagcactgtccccaagtaggggggtctccggtgcagcgatcgcttctggggccttactctaagctagactggggctgaacacgcccatcggagttcccgttttacccagatcaattccctgaacaaagatttatagtctgttttacagatgaggaaactgaggtttaaatgaagcaacttgacctaagtggggagcagggatttgaatctagaatgtgccttgattgaaaaccaattttgtcgtcctcctaactggcagtgggggggtgtggggagcagtgtctggagggcagaaagcttgtcttatttttgtcccagatcccaggctctaagcctctgacttggcacacggtagcagcccagggagggtctggagaactagttcatggctacttggctggggcatccaggaaagacctttgggggtgaagcccctgccacacatcatgatggtttcaccatctgctaccgtacacttttcctttagtcctctccctagctctggattgctgggggcttcatttgcagaactcagaattctttatttggaggtggaggtccttccttcttctcctttctcctttcttgtttcctttcctcccttcctcctccctccctcttttcttttcttttctcttctcttttcttttttcttttcttttctctttctttcttcttctttctctctctctctctccctcccttccttctttcttctttttgcctcctcctcttcctccttctctctctctctgtttctttctttttttaacagtcttcctctgtttcccaggctggagtgcggtggcacgatcatggctcactacagcctccacctcctgggctcatgtgatcctcccaacttagcctcctgagtagctgggaccacaggcatgcaccaccacgcccagctaatttttttgcattttttgtatagatggggtttcaccatgttgcctaggctggtctcaaactcctggcctcgaccagtcctcctacctcagcctccccaagtgctgggattacaggtataagccaccgcgcccagctgcatcctttctttatcatcactctgagaagtgataggctgtgagtacagatgatgaaagccacagggcctttgcacctgctctccacaggctggcatgtggtaactatgcttccttcagatttttgtgccttcacttacatggtattgttggtgatgctacagcaaccagctctgcaggtgccaagcaatgtccagcaatggagccctttattgccttgagaagggtgggccatccaactgcagaattccaccctgcggtctgttttctaaggagaccagctgtcccgtttgtgtccttgcaaacctggatggtcagtcaccagttgctttccaggaccactgctggcaccaattgccttagcctgggccccctagaaacaggtcactgtggccactgcttggcagcaagtgtgattgactccttagtctcatgggatgtcttcagagacactgtgtgaactgccgtgtctggggacagtcctcctagaggaggcagggatagaaatatctgtgccagctcccgctggctctgtctcccagtggtcagtcttcccggagggtgtgatttctggggtggcaccgtcagcctctccagtaaccatggagcccctgagcctgtgcacagatgtcacatctccatagcatgtccctgcggtggtggcagcattggtgatgtggctccaagaccacaggcaccgtactggccatggctgggtggctgcagtctggcacattgtgtaaactaagtttggatgggacctttttccagcaaacgccagcaaggcagcgtccatccagcccccagcccctgccggtcctctctgccccttgtatgtcctcgactgagggcttcacccttttattcgattgggcaggaggctggggtcacatgggactgccccccaattctggtctgggtaggggagagaagctgagaataaaggagctccgcagggtgccacggtaggttgactgtggagtgctcagcagtgttggtgagaggagaccgtctccataccagggcacaccagaacaatactcctcgaaccagtctgagaattggcgatgagggaaagaccctgcgagaggcactgggagaggcctgcttctaagcagctgtgggccgggtcagccctgcgacctctcctccccacctctgctagggcaccacaatctctgggaggtcttcactgacgtccagatggtcgcttgtgttaacatggtagttcttcaccttttgggtcacatataccttagataatttagaggaagctgtaaatctctccagaacaactcatatgcatgtacacaaatgattctatgtacaaatttagggacccacggacaccccccagcctccaaagtccattggtaaatgcccagatggtgtatgggcccaggcttgtaataaccctgcccagtaagacatcatggacgagtggccccttcgcctgctgcctctagtgtgtgacatttctgtgcgtcagagacctgcctggcccctggccccctcttttccactcccttaaccgcccagcttctgaacaggcgtcaccttagaaatatggcccacctgatttcctaaatagtctattggaaacagccatgccattaatttatgtttggtctgtaactgctttagtactataatagcagagttgaattgtgtagttgtcacggagaccgcgcggctgcaaagcctaaaatatttaccatctggccctatacagagaaagtttgccaactcctgcctgagaataatggcaaccagtagcaattaaagattgctttgtgccaggcaccataccaggtgattaaagctaagtagcttaatctttataaaaaagtctatgatcagcttcgtcgaccccactttgtaggtaagaaagcagaggcacagagagggtgagtaactcatctaagatcacacagctggtaggcaacagatgcaggctttgaaacaaggttcaaaacctttccctgactctgcgccctattcctgagcagtccaggaggtctccacagcagcggggtttgccccggcaccagcactattctgggactactgagacagccgttgtcaagctgagtcctggtttggggacctggccaggccctgtggagtatggacagctgagttgcagcaacccttggctctagcccccaagatcaactggcaggacttgctctccagcaggactgggggagttggggtggggtggggatatggtttggctctgtgtccccccactcaaatctcatcttgaattgtaatcaccacatgtcgagggagggacctggtgggaggtgattggatcatagaggtggtttcccccctgctgttctcatgatataagtgagttcccacaagatctgatgttttaaaagtgtttggcatttccccgcctcgctcactctctcctgccaccacgtaagacgtgccttgcttcctctttgccttctgccatgattgtaagtttcctgagacttccccaaccatgcagaactgtgagtcaatgaaaccttttttttcttcataaattacccagtcttaggtagttctttatagcagtgtgaaaatggactaatgcaggtggggaccctgggtctctctaaggaggcactgtttttgttctgggctctctgaaacccttcaggggagcacaacctaggcaccccccacaccccagtcctctctcctcacagcagactgactgtgcagaaccaagtttactctttagctcacaggctggctcccatgccctcccacagaaacacggaatattatcctagttcccacaaacacctcgaaacagtggacaagtcatttttcttgctgttttactgcaacagctgtggcccgctcctggcatttcaagtgccatgcatgggcctgagatgacaaattcaacaagcaagtgagaaagggaatggcaaaccaggagtgagaagatggatttcatgctttagcaagacatgagggcttgcagggttttttttaaacaagaaaataacgagttgatgtaataatgacaacaataatacaagagagggtcaaagtgccatcagacacctgtctcagtctgtttggactgccataaaaacacagcacacactgcatggcttaactgaaatgtattttctcacaggtctggagggtggaaagtccaagatcaaggccaggctagttcagtttctaaggagggctctcttcctggcttgcagacagccaccttctcactacgtcctcacactgcagagagcacactcctctgcttataaggcaactagccctattgggttagggcctcacctttatgacccattcaacccttaccatctcctcacacgccctatctccaaatacacatgaagggttagggcttcaacatttgaatttggggtcgataacggtgcatctgttgctaactaacatcctggacggtttctaacttccaacctgtaccttttcaaacttgtgaatgagtaaagcagttttggggggaaaaagtgcaatgctaatttctgtggctttcaatgtggcaacatgtgtttgggttattttaaaaatagcttctgcaaattatggacaaacagtatcttacagagccagtttgctgtcgacagcagccctgtttttatttcaatggaaaaaaaaatgcccaattttagtcatgctttctgagaacacgtgctggagtgagatcaagagggccgcctacagaggcgtctgaaatagcctggcgccgcctgcagaggctgcccccttctggacggtcgggtgcattacaaggtgcccgaagaaaaggaagacgggtcaggagctcagcgacgtccaatcctgtacccccaggaatgccctggagaagagaaagctccctttctttcatggcttctcccagcctggctacatctttgccctggcagaaaggcagtgaccatggcaatgatgaaggaatcgccaaaaccaaaggttagggagggcttcctgtgtgctgggcagggtggtgcacactgtacaccggttactttatttcatctgtacactactagcacccccagttgaggggggtgctattagtgttatcataaatacatgtataaattaggaaacatgctcagagagattgaataatttgaccaagtttgcacagctagtgaatgccagagccaggattagaacccagatatagggcatggcgtggcagtggtcgggttcgcaggcacatggcatgcagtgtgaagagggccgtggtggggcaaacatggggctccacggagtacagaggaggcctgacccaggagagggacaagaaggtcactgaagggaggctttgcagaggacgtggcaccaggagattggaggatggagcagaacatgaaggtcacagaggcacctccagagcatgcttcatctggagtcactccaggcagtgggagcagaggacccttgtggagctggtgaaggggtcagggctggatcacgacctggggagccagggtgaggcgcatggactttcctgcagtgacaagcaggtgtccttggaggctgtcaaggtggggcatgatgagatcacatttgcatgtgatggggtcactctggctgcctgtggcttaaagaagggaagacaatgcgaggagattcattaggaggaggtcaggtgaagcagaggagagatgatggggtcctgaagtgaggtcaaggccatgagcaggagagatgacgatgaggttgcatggatgcccttccactgtggctgtaacatcgtgggcctgggtgtcccgagaatgactggctggtaggccagaagcatggggatggcccaccctgagctgggagcatgggaggacaggcaggactggagggcaggggagcagggaatgagtttagttgagacacatctagttacaggtggctgtgggacatccacatctgaggccaactggacacgtgggcctggagttcaggaaccagacctgggcaggagtcatggggatagcatcagaggattgctggggcgcagcaggcaggcagacacacactgccgcactcagtgagaaatgcagaattgagaagtggatgtgccagtgagtcctgaagtttcagaattaaaagaaaaacatcagattattaacagagattggtttgagtgatgggataatgagtggtttctcttttttttttttttttttgagagttttgttcttattgcccaggctggagaacagtggcgcgattttggctaactgcaacctccgcctcccaggtccaagcgattctcctgcctcagcctcccaagtagctaggattataggcatccaccaccacacctggctaattttttgtatttttattagagatggggtttcatcatgttagtcaggctggtcttgaactcctgacctcctgtgatccacccgccttggcctcccaaaggtttttcttttctaccttacagttttttgcttacttaaaaatttcccaacaagcataattggctttcataatcagaagtatgtacatgcgtaaggattttgttctagtcactgttttgtgactaaatcatccggaatcctcctgacagagatgggctccccttccgtgtccccgagcccttcttttttggcacttattccacactgtgaattgtcatcatcctggcatccccagctgcagcccggggcctggtacatagtggcaacttggaacctgttagttgaaggaatggaaaaatagaacttagagggcctaccacagcccatgcaccccagtgagcaggtgagaccttgggaccacccccatcccccaccacccaggatccatgacagtgcccttgtcaggattagaacagcacctgggcttgggcaggggcagtaacttgctgtttatggagctcacaaattcttagtagaatctgtttataaaaaaacaaatctaactatttgtaaatgctaaaactcatgaaataaggagcaataacaaataatatatcaacacatacatcaatgagcttgttaaaaaagctatgctacttttgtaagggacaatttggcaataagtattccattttttttttttttttttttttgagacagagtttcgctcatgtcgcccaggctggagtgcagtggtgcgatctcagctcactgcaacctctgcctcctgggttcaagcgattctccttcctcagcctcctgagtagctgggactacaggcgcctgccaccatgcctggctaatttttttgtgtttttagtacagacgtgtttcaccatgttggccaggctagtcttaaactcctgacctcaggtgatctgcccaccttggcctcccaaagtgctgggattacaggtgtgagccaccgcgcccggccagcattccagatttttttaagcacatactcaagggcccagcaaaactttccaggtttttatttacagataccatggcccacacgtcaaatgacattggtacaagaatgttcctttctgggacagtaaaagattgaagatgacctctgtgtcattgtgggggctggttaaatacatacctacaccttgtgcagctcttacatgaatgaagcagctatcagcactgagaaggagcactccccaggttgtactgttaactggaaaaaagctaggttggtaacagtttgtgatggcaaggaattctctagtaaggacccttgtatctggaaaggagacccatcggtagattggggaggaaggaggtggagttcctcccacaaaactgggtccttctgttacttttagttttgtaccaaaactctaggtactgcctttatgaaaaaattaatagagtaagataaatagtagtgagacacaatttatcacaggctatagccaaagatgcatagtaaaccactgtatatcaatggtatgttttcctctttcaaacaaagttctgctcagaaggagtaacgtttgagaggccaaagcaggccaaagtgggaggataatttgaagccaggagttcaagaccagcctggacaaatagtgagagccccatctctaaaaaagttaaaaatatctgagcttagtggtgagcctgtagtcgaggctgcagtgagccatgattgtgccactgcaccccagactgggcaacaaagtgagactgtctcaaaaaaaaaaaagaagtaacctctctcattctctagcagcaacacaactgtttgttgtatctatctttttttctctgtccaggctggagtgtagtggtgcaatcatggctcactgcagcctcaacctcccgggttcaagctgttctccagcctcagcctcacaatagctggtactacagaagcaagccaccacgcccggctatttttaaaaaattattttctgttgagatggggggtatcactatgttgcccaggctggtgttgaagtcctggcttcaagtgatcctctcctcttagcctctcaaaatgttgggattacaggtgtaagccaccgtgcccagcctgtttgttgtatcttaaccgattctcttgaaagttaagatgggctgggcatcccagcactttgggaggccgaggcgggcagatcagttgggctgccaccaactggagtgcaggttaccaactggagtgcaggttaccaactggagtgcaggttaccaactggagtgcaggttaccaactggagtgcaggttaccaactggagtgcaggttaccaactggagtggggggttcatcagccccactgatgtcctctgtgtggctgggatagagcaatagagcaggcagagtggtgctcaggtccacttgggagctgaggagtctccagccctgctcaggtctatgagaaaactccagaaggaaagaacaggagcaaagatgagagtgagccaagggtcctgtggtctggatgaggggtcactctgcagagggtgctgggtggaccctctgacttggatagaccattatgggcccaaggacagcagaggccagttctttcttgcaggaggcaagtgtttcttccttttgtatttgtaggaagaatttgtgataaaatggcattaattattctttaaatgaggctgttagttagaactaaatataacaaaagaagtgcaaaacttacctttgaaaactatacaacattattgaaagaaagtaaagaagacctaaataatgaaaagatatcccatgttcatggattggaagacataatattgttagaaaatggcaatatatgtcaaattgacttacaagtctgatatattctctatcaaaatcccagatggcttcactgcagaaattgacaaactgtttttaaaattcacatggaaacaaaaagacccagaatggccaagacaatcttgaaaagagaagaaagttggaggacttacatttcctggttcaaaacttactacaaagctacagtaatcaagtggtactggcataaggatatacatatagaccaatgtatatccttatgggatagaattgaggatccaaaaataattcctcacatttatgttcaattgatttttgacaagggtgccaagaaaattcaatgtgttggccaggatgtggagaacttggaactttatacactgctgatgggaatataaaatggtgcagtcactttggaaaacagtcttgcagttcctgaataggttaaacacagaattaccataagatcttgcaattctactattagatatatacccaagagaaatgaaaatagatgttcagacaaaaacttgtatacaaatgttcctagcagcattattcataatagccaaaaagtgaaaacaacccaaatatctaacaattaatgaatgggtagatatagctggtatatgcatacaattgaatattatctgggaattataagaaatgaaatgttgatacatcctacaatatggatgaacttagaactcattacactagtgaaagaagccagacacaacagaccacatgttgtatgattccatttgtattaaatgtccagaataagcaaatccatagaggcagaaggctgattagtggttgcctaggcctggggggttatgaagaaatgaggagtaactgctaattggtatggggtttctttttagggtggtgaaatgttctaaaattgattatggtga

SEQ ID NO: 557 - DNA, 6431 bp, Homo sapiens
ccgcacggttgtttatggagctttgggcgggggctgagcccgcggtcgtgcccccagcccgctgcccaggccatgccgccccatctgcgcgcggagccgcggctgccgggcctccggggctgagccgggagcgccgggaggaggaggcgccggcggcggagcaggagcgggagccgcggcggcgggcagcgcgggacccagtactatggctgtgtactgctatgcgctcaatagcctggtgatcatgaatagcgccaacgagatgaagagcggcggcggcccggggcccagtggcagcgagacgcccccgcccccgaggagggcagtgctgagccccggcagcgttttcagccccgggagaggcgcctctttcctcttccccccagccgagtcgctgtcccccgaggagccccggagccccgggggctggcggagcggccggcgcaggctgaatagtagcagcggcagtggcagcggcagcagcggcagtagcgtgagcagcccaagttgggctggtcgcctgcgaggggaccggcagcaggtggtggcagccggtaccctctccccgccagggccggaggaggccaagaggaagctgcggatcttgcagcgcgagttgcagaacgtgcaggtgaaccagaaagtgggcatgtttgaggcgcacatccaggcacagagctccgccattcaagcgccccgcagcccgcgtttgggcagggctcgctcgccctccccgtgccccttccgcagcagcagtcagccccctggaagggtcctggttcagggcgcccggagcgaggaacggaggacaaagtcctggggggagcaatgtccagagacttcaggaaccgactccgggaggaaaggagggcccagcctatgctcctcgcaggtgaagaaaggaatgccacctcttcccggccgggctgcccctacaggatcagaggctcagggtccatccgcttttgtaaggatggagaagggtatccctgccagtccccgctgtggctcacccacagctatggaaattgacaaaaggggctctcctaccccgggaactcggagctgcctagctccctcattggggctgttcggagctagcttaacgatggccacggaagtggcagcgagagttacatccactgggccacaccgtccacaggatcttgccctcactgagccgtctgggagagcccgtgagcttgaggacctgcagcccccagaggccctggtggagaggcaggggcagtttctgggcagtgagacaagcccagccccagaaaggggcgggccccgcgatggagaaccccctgggaagatggggaaaggatatctgccctgtggcatgccgggctctggggagcctgaagtgggcaaaaggccagaggagacgactgtgagcgtgcaaagcgcagagtcctctgattccctgagctggtccaggctgcccagggccctggcctccgtaggccctgaggaggcccgaagtggggcccccgtgggcggggggcgttggcagctctccgacagagtggagggagggtccccaacgctgggcttgcttgggggcagcccctcagcacagccggggaccgggaatgtggaggcgggaattccttctggcagaatgctggagcctttgccctgttgggacgctgcgaaagatctgaaagaacctcagtgccctcctggggacagggtgggtgtgcagcctgggaactccagggtttggcagggcaccatggagaaagccggtttggcttggacgcgtggcacaggggtgcaatcagaggggacttgggaaagccagcggcaggacagtgatgccctcccaagtccggagctgctaccccaagatcaggacaagcctttcctgaggaaggcctgcagccccagcaacatacctgctgtcatcattacagacatgggcacccaggaggatggggccttggaggagacgcagggaagccctcggggcaacctgcccctgaggaaactgtcctcttcctcggcctcctccacgggcttctcctcatcctacgaagactcagaggaggacatctccagtgaccctgagcgcaccctggaccccaactcagccttcctgcataccctggaccagcagaaacctagagtgagcaaatcatggaggaagataaaaaacatggtgcactggtctcccttcgtcatgtccttcaagaagaagtacccctggatccagctggcaggacacgcagggagtttcaaggcagctgccaatggcaggatcctgaagaagcactgtgagtcagagcagcgctgcctggaccggctgatggtggatgtgctgaggcccttcgtacctgcctaccatggggatgtggtgaaggacggggagcgctacaaccagatggacgacctgctggccgacttcgactcgccctgtgtgatggactgcaagatgggaatcaggacctacctggaggaggagctcacgaaggcccggaagaagcccagcctgcggaaggacatgtaccagaagatgatcgaggtggaccccgaggcccccaccgaggaggaaaaagcacagcgggctgtgaccaagccacggtacatgcagtggcgggagaccatcagctccacggccaccctggggttcaggatcgagggaatcaagaaagaagacggcaccgtgaaccgggacttcaagaagaccaaaacgagggagcaggtcaccgaggccttcagagagttcactaaaggaaaccataacatcctgatcgcctatcgggaccggctgaaggccattcgaaccactctagaagtttctcccttcttcaagtgccacgaggtcattggcagctccctcctcttcatccacgacaagaaggaacaggccaaagtgtggatgatcgactttgggaaaaccacgcccctgcctgagggccagaccctgcagcatgacgtcccctggcaggaggggaaccgggaggatggctacctctcggggctcaataacctcgtcgacatcctgaccgagatgtcccaggatgccccactcgcctgagctgcccacgccctccctggcccccgcctgggcctcctttcctcctcctgtgcttcctttctcgttcctaacttttccttcacttacacctgactgaccctcctgaactgcactacaagacactttgtagaagaggagatgagagtttctagtcattttcctaacttcagggcttggaggtggtgtttgcactgctttttgtagagagggtcacctactagaagagaaatgcccagtcttagaggtgggtcaggtgtagagctggagggggtccctggctgctgaggggaccctaccagatgagccctgcctctgggagccccctaggaagcaccagcctggacctaccacctgcggaggcctgctgccccctggcggccagtgctgttagagtgctgccaagcacagccttatttctgccggggcctccccaccggagagcccagggggccggccgggttcctggtccctggctgggagcagggctttctggtagttggggcacaaaaccatcggggaaccacatgttgactgtgagcaaagtgtcttccgattagcagcctcagggatgccctggtggcctctccagggctgctcaggcaaggccccccacccatctggtatggaaacctgccggctccaggccagacccaggagccaagagaaggctgaagccagcttggctgtgttctctgatctaggccttcccagaggaggcgagcagaagctgtgccacttggaattgcaacccatgagttcagaaggcacactctgccatgctgagctccaagggtgctaccaggggaagatgggatctatagagtctctgggccctggccccagggaggagcacatttttcttgaccctcacctacctggtgctagttggtcaaccctgcctgcatacatgggctcctgtcatggggcccagagtcccttgcagatatagaaataggggaggagctcaggtctgcgccaggcaggaagaaggcaggcttctggcttccagaggtgccgcggtggcctcctggcatcatttgttattgcctctgaaacaagccttactgcctggagggcttagattcctgcttctccaatgtagtgtgggtatcttgtagggtatgtggtggatgccagggcgtgctccaggcacctcttcctgaagtctctgcatttggagattcgtggagaacctatttaagcccaattttaactgaaagccagtgagtctgatatggaagggaatgtaaaatttgcctgacttcttaagaacaaaacccccagctctgtgccccatgctccttggggcttgccacccactcctttgctgtcagaggtacaggagctgggagagtccaggagctagggacacagagggagactatggaccaaggtgtgtgtgtctggaggaaccactgcccaccccaccaccccggggtctctggggaactgtcaacctgcccacgggacatgtacatttccccttttgtgctggaagtgtgagtgacacttgctgggggtggagggtgggacacatgaggatgtataagtacagattttaaaaaaggaaatcaacttacacttcctggctcttgtttaaaacagtggtgagctcctgtgtgggccgacttgctaaaggtcacacacgcgcccggtggagcacgagagacctcgtggcagcatgtgatctggaaggcaggcaggacgggggcgttggggagccaaagtcaactctgggcctctggagctatagtgacttttgggctagaagggaccctggtggtctgtgcttcagccatttgcagggcaggggcatcattaattcagacgtaaagattctatgaatatggactggccaaaagttatccttactccatctgtgaaagaagtttgctaaagcaaatcatgatatgaacaaaaattacaggggacctgtttaagagaacaaaatgttccaagcactttaggcagacaccagctgtttgcaaacaatgtgctaatatgcaaatgatgtgcttattaaaggaggcccatggggcctcttattggcaatacttggctgtgggttacattaaatatgtgaacatagtatgaagtagcatcattttagggttattctgttacttagggtttttgttttctgttttttttttctctttttttgtatttaccgtgctagttctcttctacacctactctgtctctcaagccattttgccactcgcttccctgccatctggcccttccctttgtctcagtgggatagatggattgtgaaatggaatctcccagaacccctgccctggcagcctggaagaccgtgcctgcccagccctcgtcaccacagggactccttgggtcctggcagtgcatgtgccagcaggcaggacaaactctgtgtacctgtgcccaggtgaatgggcgcagggtcctcttgccctgtcctgcggggggccccacgagttcctggcattcagcactgcttagcattctcggaaggtttcttcaactgcttgcttttcccaggcttgcctttagtgtcatgtaagacatttttaagttatatttattttgttgggttttaaaattgcacagaacactaagaccgaaaggctggactcttgtttctccttgaaagctttgcctttgttttgaacttcctttcccacttggtagaaagagcccagaagcagccctggccctgtaagatggactctttcatccttcagttgtatttagctttgagtttctctgcatctgtccaccccatgtgtatataacccagcccctggctctggggtggtcacctcgtcagtgccttttgttctggaggagaggaccccccccgcctgccgagaggctctcttcctgttctgcacccctctccccatgggaccttggagaaaactgaactgttacaaacccctgcacagtgcctgtcaaacagatgcaaaccttcctgaataaagccttggagaccagcgctgtctgtggtgtgatccttctggcccccagccctgagacctggctgaggggcaggctggggagtcttaggaagctagagggcccacatgggggctgttaggggagtgggtgtcagactgggtaacattttaatttgtaaagaatataaaccactctccaaaatgagtcttttcaaccctcatgaaactttgaaatagtagctcagagactagaacatcaaccaagaagcactgtccccaagtaggggggtctccggtgcagcgatcgcttctggggccttactctaagctagactggggctgaacacgcccatcggagttcccgttttacccagatcaattccctgaacaaagatttatagtctgttttacagatgaggaaactgaggtttaaatgaagc

SEQ ID NO: 558 - protein, 940 aa, Homo sapiens
MAVYCYALNSLVIMNSANEMKSGGGPGPSGSETPPPPRRAVLSPGSVFSPGRGASFLFPPAESLSPEEPRSPGGWRSGRRRLNSSSGSGSGSSGSSVSSPSWAGRLRGDRQQVVAAGTLSPPGPEEAKRKLRILQRELQNVQVNQKVGMFEAHIQAQSSAIQAPRSPRLGRARSPSPCPFRSSSQPPGRVLVQGARSEERRTKSWGEQCPETSGTDSGRKGGPSLCSSQVKKGMPPLPGRAAPTGSEAQGPSAFVRMEKGIPDRCGSPTAMEIDKRGSPTPGTRSCLAPSLGLFGASLTMATEVAARVTSTGPHRPQDLALTEPSGRARELEDLQPPEALVERQGQFLGSETSPAPERGGPRDGEPPGKMGKGYLPCGMPGSGEPEVGKRPEETTVSVQSAESSDSLSWSRLPRASVGPEEARSGAPVGGGRWQLSDRVEGGSPTLGLLGGSPSAQPGTGNVEAGIPSGRMLEPLPCWDAAKDLKEPQCPPGDRVGVQPGNSRVWQGTMEKAGLAWTRGTGVQSEGTWESQRQDSDALPSPELLPQDQDKPFLRKACSPSNIPAVIITDMGTQEDGALEETQGSPRGNLPLRKLSSSSASSTGFSSSYEDSEEDISSDPERTLDPNSAFLHTLDQQKPRVSKSWRKIKNMVHWSPFVMSFKKKYPWIQLAGHAGSFKAAANGRILKKHCESEQRCLDRLMVDVLRPFVPAYHGDVVKDGERYNQMDDLLADFDSPCVMDCKMGIRTYLEEELTKARKKPSLRKDMYQKMIEVDPEAPTEEEKAQRAVTKPRYMQWRETISSTATLGFRIEGIKKEDGTVNRDFKKTKTREQVTEAFREFTKGNHNILIAYRDRLKAIRTTLEVSPFFKCHEVIGSSLLFIHDKKEQAKVWMIDFGKTTPLPEGQTLQHDVPWQEGNREDGYLSQNLVDILTEMSQDAPLA

SEQ ID NO: 559 - DNA, 6685 bp, Homo sapiens
agacactgacaggggcagtatctccacggtcgaaaagggcgtgcagggccggcttggcgtcgccactgccgggatcgccgggcccctgaaccgaagagctttcccccctctttcgcactcctcttttttgtcttccatagcttgtgagaaaataatttctgagcatttttacttttaaagccatctcgtccctacgaggtttgcgcctctgggcatgtagtctacacaggacctgagaatctgagaaactgcagccgcacggttgtttatggagctttgggcgggggctgagcccgcggtcgtgcccccagcccgctgcccaggccatgccgccccatctgcgcgcggagccgcggctgccgggcctccggggctgagccgggagcgccgggaggaggaggcgccggcggcggagcaggagcgggagccgcggcggcgggcagcgcgggacccagtactatggctgtgtactgctatgcgctcaatagcctggtgatcatgaatagcgccaacgagatgaagagcggcggcggcccggggcccagtggcagcgagacgcccccgcccccgaggagggcagtgctgagccccggcagcgttttcagccccgggagaggcgcctctttcctcttccccccagccgagtcgctgtcccccgaggagccccggagccccgggggctggcggagcggccggcgcaggctgaatagtagcagcggcagtggcagcggcagcagcggcagtagcgtgagcagcccaagttgggctggtcgcctgcgaggggaccggcagcaggtggtggcagccggtaccctctccccgccagggccggaggaggccaagaggaagctgcggatcttgcagcgcgagttgcagaacgtgcaggtgaaccagaaagtgggcatgtttgaggcgcacatccaggcacagagctccgccattcaagcgccccgcagcccgcgtttgggcagggctcgctcgccctccccgtgccccttccgcagcagcagtcagccccctggaagggtcctggttcagggcgcccggagcgaggaacggaggacaaagtcctggggggagcaatgtccagagacttcaggaaccgactccgggaggaaaggagggcccagcctatgctcctcgcaggtgaagaaaggaatgccacctcttcccggccgggctgcccctacaggatcagaggctcagggtccatccgcttttgtaaggatggagaagggtatccctgccagtccccgctgtggctcacccacagctatggaaattgacaaaaggggctctcctaccccgggaactcggagctgcctagctccctcattggggctgttcggagctagcttaacgatggccacggaagtggcagcgagagttacatccactgggccacaccgtccacaggatcttgccctcactgagccgtctgggagagcccgtgagcttgaggacctgcagcccccagaggccctggtggagaggcaggggcagtttctgggcagtgagacaagcccagccccagaaaggggcgggccccgcgatggagaaccccctgggaagatggggaaaggatatctgccctgtggcatgccgggctctggggagcctgaagtgggcaaaaggccagaggagacgactgtgagcgtgcaaagcgcagagtcctctgattccctgagctggtccaggctgcccagggccctggcctccgtaggccctgaggaggcccgaagtggggcccccgtgggcggggggcgttggcagctctccgacagagtggagggagggtccccaacgctgggcttgcttgggggcagcccctcagcacagccggggaccgggaatgtggaggcgggaattccttctggcagaatgctggagcctttgccctgttgggacgctgcgaaagatctgaaagaacctcagtgccctcctggggacagggtgggtgtgcagcctgggaactccagggtttggcagggcaccatggagaaagccggtttggcttggacgcgtggcacaggggtgcaatcagaggggacttgggaaagccagcggcaggacagtgatgccctcccaagtccggagctgctaccccaagatcaggacaagcctttcctgaggaaggcctgcagccccagcaacatacctgctgtcatcattacagacatgggcacccaggaggatggggccttggaggagacgcagggaagccctcggggcaacctgcccctgaggaaactgtcctcttcctcggcctcctccacgggcttctcctcatcctacgaagactcagaggaggacatctccagtgaccctgagcgcaccctggaccccaactcagccttcctgcataccctggaccagcagaaacctagagtgagcaaatcatggaggaagataaaaaacatggtgcactggtctcccttcgtcatgtccttcaagaagaagtacccctggatccagctggcaggacacgcagggagtttcaaggcagctgccaatggcaggatcctgaagaagcactgtgagtcagagcagcgctgcctggaccggctgatggtggatgtgctgaggcccttcgtacctgcctaccatggggatgtggtgaaggacggggagcgctacaaccagatggacgacctgctggccgacttcgactcgccctgtgtgatggactgcaagatgggaatcaggacctacctggaggaggagctcacgaaggcccggaagaagcccagcctgcggaaggacatgtaccagaagatgatcgaggtggaccccgaggcccccaccgaggaggaaaaagcacagcgggctgtgaccaagccacggtacatgcagtggcgggagaccatcagctccacggccaccctggggttcaggatcgagggaatcaagaaagaagacggcaccgtgaaccgggacttcaagaagaccaaaacgagggagcaggtcaccgaggccttcagagagttcactaaaggaaaccataacatcctgatcgcctatcgggaccggctgaaggccattcgaaccactctagaagtttctcccttcttcaagtgccacgaggtcattggcagctccctcctcttcatccacgacaagaaggaacaggccaaagtgtggatgatcgactttgggaaaaccacgcccctgcctgagggccagaccctgcagcatgacgtcccctggcaggaggggaaccgggaggatggctacctctcggggctcaataacctcgtcgacatcctgaccgagatgtcccaggatgccccactcgcctgagctgcccacgccctccctggcccccgcctgggcctcctttcctcctcctgtgcttcctttctcgttcctaacttttccttcacttacacctgactgaccctcctgaactgcactacaagacactttgtagaagaggagatgagagtttctagtcattttcctaacttcagggcttggaggtggtgtttgcactgctttttgtagagagggtcacctactagaagagaaatgcccagtcttagaggtgggtcaggtgtagagctggagggggtccctggctgctgaggggaccctaccagatgagccctgcctctgggagccccctaggaagcaccagcctggacctaccacctgcggaggcctgctgccccctggcggccagtgctgttagagtgctgccaagcacagccttatttctgccggggcctccccaccggagagcccagggggccggccgggttcctggtccctggctgggagcagggctttctggtagttggggcacaaaaccatcggggaaccacatgttgactgtgagcaaagtgtcttccgattagcagcctcagggatgccctggtggcctctccagggctgctcaggcaaggccccccacccatctggtatggaaacctgccggctccaggccagacccaggagccaagagaaggctgaagccagcttggctgtgttctctgatctaggccttcccagaggaggcgagcagaagctgtgccacttggaattgcaacccatgagttcagaaggcacactctgccatgctgagctccaagggtgctaccaggggaagatgggatctatagagtctctgggccctggccccagggaggagcacatttttcttgaccctcacctacctggtgctagttggtcaaccctgcctgcatacatgggctcctgtcatggggcccagagtcccttgcagatatagaaataggggaggagctcaggtctgcgccaggcaggaagaaggcaggcttctggcttccagaggtgccgcggtggcctcctggcatcatttgttattgcctctgaaacaagccttactgcctggagggcttagattcctgcttctccaatgtagtgtgggtatcttgtagggtatgtggtggatgccagggcgtgctccaggcacctcttcctgaagtctctgcatttggagattcgtggagaacctatttaagcccaattttaactgaaagccagtgagtctgatatggaagggaatgtaaaatttgcctgacttcttaagaacaaaacccccagctctgtgccccatgctccttggggcttgccacccactcctttgctgtcagaggtacaggagctgggagagtccaggagctagggacacagagggagactatggaccaaggtgtgtgtgtctggaggaaccactgcccaccccaccaccccggggtctctggggaactgtcaacctgcccacgggacatgtacatttccccttttgtgctggaagtgtgagtgacacttgctgggggtggagggtgggacacatgaggatgtataagtacagattttaaaaaaggaaatcaacttacacttcctggctcttgtttaaaacagtggtgagctcctgtgtgggccgacttgctaaaggtcacacacgcgcccggtggagcacgagagacctcgtggcagcatgtgatctggaaggcaggcaggacgggggcgttggggagccaaagtcaactctgggcctctggagctatagtgacttttgggctagaagggaccctggtggtctgtgcttcagccatttgcagggcaggggcatcattaattcagacgtaaagattctatgaatatggactggccaaaagttatccttactccatctgtgaaagaagtttgctaaagcaaatcatgatatgaacaaaaattacaggggacctgtttaagagaacaaaatgttccaagcactttaggcagacaccagctgtttgcaaacaatgtgctaatatgcaaatgatgtgcttattaaaggaggcccatggggcctcttattggcaatacttggctgtgggttacattaaatatgtgaacatagtatgaagtagcatcattttagggttattctgttacttagggtttttgttttctgttttttttttctctttttttgtatttaccgtgctagttctcttctacacctactctgtctctcaagccattttgccactcgcttccctgccatctggcccttccctttgtctcagtgggatagatggattgtgaaatggaatctcccagaacccctgccctggcagcctggaagaccgtgcctgcccagccctcgtcaccacagggactccttgggtcctggcagtgcatgtgccagcaggcaggacaaactctgtgtacctgtgcccaggtgaatgggcgcagggtcctcttgccctgtcctgcggggggccccacgagttcctggcattcagcactgcttagcattctcggaaggtttcttcaactgcttgcttttcccaggcttgcctttagtgtcatgtaagacatttttaagttatatttattttgttgggttttaaaattgcacagaacactaagaccgaaaggctggactcttgtttctccttgaaagctttgcctttgttttgaacttcctttcccacttggtagaaagagcccagaagcagccctggccctgtaagatggactctttcatccttcagttgtatttagctttgagtttctctgcatctgtccaccccatgtgtatataacccagcccctggctctggggtggtcacctcgtcagtgccttttgttctggaggagaggaccccccccgcctgccgagaggctctcttcctgttctgcacccctctccccatgggaccttggagaaaactgaactgttacaaacccctgcacagtgcctgtcaaacagatgcaaaccttcctgaataaagccttggagaccagcgctgtctgtggtgtgatccttctggcccccagccctgagacctggctgaggggcaggctggggagtcttaggaagctagagggcccacatgggggctgttaggggagtgggtgtcagactgggtaacattttaatttgtaaagaatataaaccactctccaaaatgagtcttttcaaccctcatgaaactttgaaatagtagctcagagactagaacatcaaccaagaagcactgtccccaagtaggggggtctccggtgcagcgatcgcttctggggccttactctaagctagactggggctgaacacgcccatcggagttcccgttttacccagatcaattccctgaacaaagatttatagtctgttttacagatgaggaaactgaggtttaaatgaagc

SEQ ID NO: 560 - protein, 940 aa, Homo sapiens; identical to SEQ ID NO: 558

SEQ ID NO: 561 - DNA, 55105 bp, Mus musculus
  misc_feature (1)...(55105): n = A,T,C or G
ggaagtcgcggccctccgccacaggctcagtcgccaggcagtctcgccatggcttgctacatctaccagctgccgtcctgggtgctggacgacctgtgccgcaatatcgacacgctcagtgagtgggactggatgcagttcggtgagtgacactacttactctgagccaggacccgagatagacagacagatccacgcccccccacccccaccccgccccgtgttacctgaggccggggattcctgtgtagaacgctgctgctttgctttactttgcagaacgagctggagctgcctatgaagttgcttatagcctagggtggtctgctcactatgtagcttcttggcgagttttggctgtctgtatgcttgtagagctgttaccagggctgtgatctaccttgcagcctgtggtatctggggccaccctcctaacttccctgaaacttgccttaatctataaactgcagctgacaagggtagattctttatacagttgtaaaaataaaatagtgtcaaccgggcagtggtggcgcacgactttaatcccagcacttgggaagcagagacaggtggatttctnnnnnnnnnnnnnnnnnnnnnnnnnnnnnnnnnnnnnnnnnnnnnnnnnnnnnnnnnnnnnnnnnnnnnnnnnnnnnnnnggctaaacagagaaaccctgtctcaaaagaccaaaataaataaataaataaaataaaataaaataaaatagtgtcaaagaatgtaccttccctaccttagtgtcgtcattctgtggcatattttccattcttattattttgagacagggtcacccagtgtagccctggtacttgctttgtagatcaggctggcctggaactaacagagctctacctgcctctcctgctggaatactgagttaaaggtgtagtccaccattcctggctagtcatttatttttctgcagtgagggaactttgatcctagggcctcgtgcctgttagaaaagtcacactaccactgagccatagtccaggtgacgttcttggacttttgagacctgtttttcgtttgtttgtttgtttgttgttgtgttttttaatgtagcccatgttgccttggaatttgtcattgtcctgtctcagcctcctaagtgtgggattataaatttgaatctcttgtatttgtggggtagggggtggggtgggaaggaataaggggctcatgtagctcaggctagccttggatgccctggaacttctgaccctctcacttccattttggaatactgggattgcaggctcagcttatgtggtgctggagatggaacccaggaaagcactatacactaagtgtggaatagccccgctaccttattcctgtaggtcaaacgcacataggaacagtgggtaaaggcagtgtaactgttgccacttaatctccttttgttttttcaagacagggtttctttgtgtagccctagctgtcctactccctctgtagaccaggctggcctcaaactcagagatccacctgcctcggcttcccaagagctgggattaaaggtgtgcgccaccactgcctggcaatgatttatgtgtgtgtgtttatgaattttacttgattatatttttgtcgtgcttggaattgagtccaaggccttgtgcctgtcaggcaagcattttgccagtgagctatataacttcttaaatgaaattatgtgtgtgtgtgttccattgttgttgttgttgtaatacaggatctcatgtagtccaggctggcctagaactcattacctagctaagaatgaccttgaatttctggtcttcctagtgacctctctcgagttgctgggattatgtgtcaccatgcctgacttcagtaatatattgtttaattaagatgtttacgatactggaggctggcaagattgctcaatgggtggaggcactgaatatcaagcccgtggacccgtgttttatccctggaacccttgtaaagctagaaggggagagcccactccacacagttgccccgtgaccctacccaggcgcacttactacaatgagtatctattacacagctatacttgatacataaagtggacatgtcttgtgttgtcctgccagtttggatatatattatgcatgcgaggaatcggatgttcctcagcggcaaagcactcaattagcgtgtgttcctgggttccacccccagccctgtgaatgaaaagaaaacaagaaaggaaaaataagtattttaaggttatggttctcattctgggattttttttttttctgtcagtggcagttgccaatgtccagagacatctctagttgtcacaccttgatagatgcagaggctgaacacccaacaggacagcccctcagcacaaagcacagagcacagcagcccccaaggctcagcgggggggggggggggggnnnnnnnnnnnnnnnnnnnnggggggggggggaggtcagggagcctcttttacccaggaagaaaaggagttgatgtgcaaagaaaagtactgtagacatcaggagcagaaagatgaggcccagttctccacggggatgaatgttcttggcttccatgagccagttgtaacggccgttgctgttcatgtttgcttgctagcttctgaccatgcagccccaccgtgctcaggactgcacctcctggtctctttcccaactgccttaagtgtagacacttatgtcgtatttaagccatcttgtgatttctgtacaccagtcatgcacgacagacagcctgcctcttctctcttaaaatatatcctaggtattttgccttgataatttttttttaatcccagctttctattgtatagctcaaactggtgatcctcctgcctcagcttctccaaagctatgattatacatacctggcattgagctcttatctcttgaatgtattttcactctttatcactaccagggagctcgagggctgggacgggaacatccgagatgaagggaggtgactctcctttgtgccctcagccttcctatcccctccttgcaggctctgtcctagtctcagggtgcccatgaagatgtctattaccactggattgcccagggaactctggctgaagtgtggctcagtggtagagtgtgtgcttactgtgcctatgggcctgggctcagctactggaatgacataacaaagagaaggagggaaggaaggagggcggagggaagggagggaggcaggggttggtgggtaagaaagcctattacacagatgtgtaattcccgaatgtaggaagtagaggtaggaagatcaggatggaattccactccggcctgggctacttttgagggtctgtctcaaaaagccaaaaaccaagtaagcagcaagcaatcaaatgataaacaaacaaacccattatcaaccatcacataatccacacatttaaggagcacctctgtgagtgctcacacacactcacgtgcacaccatacatcccgccgcccctgccccctccgctctaggtgttttctgttgtagcattttatgtgagtgggaccatcctgcgtgcactgtcctttgcgaatggcttcagcatttagcaagtcttaaagggtcatccacgttgtagtcaatgtgagttctgtatccccttccttccttccgtcccctccctcatgtctctcttccaccccttcagtttctctcatttactctcctccctccttttccagtgatgaaaacagaacccagggtctctcacatgcagggctgtgctccttgttctagtatctctgcctctctgtctctgtctgtctctctgtctctgtctctctgtctctctctaacttttgggttttcgagacagggtttctctgtgtagttctggctgtcctggaactccctctatagaccaggctggtctcgaactcaaaggtccacctgcctctgcctcctatgggctgggattaaaggcatgcaccatcactgcctagctttccagtttctttcttttttttttttcttttttttttttttttggttttttgagacagggtttctctgtatagccctggctgtcctggaactcactttgtagaccgggctggcctcgaactcagaaatccgcctgcctctgcctcccgagtgctgggattaaaggcgtgcgccaccacgcccggccagtttcttttttatattcaagtaatactccagtgtatggatgtccaatcttttgcttctccatgtctccactgagggacatttgggctcctctcgttcttgggcagtcatgaaaactctgcaggacatttgtgtcaaagtgtcagtgtggacacatgctttcatttcccttgggagtgaacctaggcgtgctgaggagtacagtgcgcactgcactcttataggacacggtgccacgtgttttccagaggggctgtcctggttcccatgcccgaaggacggctactatttatcttgttaaagcttggcagtaagacaggctttcgggctcctgcttattggccatttatatatcctttgctgagaactgcactgagtttgcaagccctggacatggcagaattacccagagtccactgaggcttcacgatggttgaggaaatcaaggaaattccttagtaggcctgcctgctctctctgtttctgttttgctctctctctctctctctctctctctctctctctctctctctctctctctctctctcgtcacacatacacacaaacatacacacctacctcatcctccctggcctcctttgggctcctgctctttgcctgtgagtcacccttaggtggctgcagttttctcagtccagaggctgccctgagcccaagcctagcccctccatatgcagttgccagctggtctcaggactctggttttcggtgccccaaaggagggagaaggcgggtgatagtccctgctctccaaagtcttggctgttgagctagtctaaagaaggtgatcttgtgctggaatcctggcagagatcatgtgggagtatggaaagatctaaagcgtctaaagtgattgtaaaagcccacagccacagctatgaatcttcctttggatcagcaggtagacttctgcctttgtttctctgcgctcatttgctcctggggcaaagacttgtagtatctgtctgagtctgtgtacaatggggttctttttgttttgttttgtttgattttgttttgtttggtttttggtttttttcgagacagggtttctctgtatagccctggctatcctggaactcactttgtagaccaggctgtcctcgaactcagaaatctgcctgactctgcctcccaagtgctgggattaaaggcgtgcgctaccaccgcctggctacaatggggttcttaagtttcatctacctgggagtgtgcacagacacccctgcaggagccccttagctggaccactctctttcttgctcaccagtgcactccagcctttgtacactgcctagctgtgtgacttcaggcaagtgactgtgtgtctctgagccattcatctgtaagaggctgaaggaacacagtggtttcccttgccatactggaaagagtttggccagtgaggggagaggcagatgacccttaggagggtcattctgggaaggtgggctgtcctgttctgcaggactgtaaggataggtagactttccccacgattcgggaatcagcatgaagcaatggtttctctgtggacataacacattgccaaacactagctcaagtctcccagtgtatagagttcacctagcccacatagccacccatgaggtccaaaaggaaactgaggctctgggagagctgacaggcctttgctaaatgcacagcaaggaagtgcctgggaggatttgaaccagggctgctcacatgctgtgtctgtcagctctcaggcactgtgacagacaccctcaggaatcgattgccttagcaagaggagagcacaattggagagattttagcgtgtagtctcttgattctgctttgtgtctgtggcagtgtctcatggcaaagcctctttatggaaggcgctggactcccatacccactgagggcacgtctctgagtacttgggagactctccctgggtctcatctcttaaagctcccacccctccaggaaccaagctgggaccacgccgttagcatagggccttttgtgggacaccagttccgaagagtagtgttcacaccggtggaaagtctggaagattgactgcctggatgcagtcagtggtttccttgagtctgctaggtaggactttgatttttctctttttcatcatgaccagattaataagagctatgccctcatcggagcccttggcagtgactgagtcgtctctccctccgtctctgcttgtcctactcctgggcgcagtgcagaaggatctgtaccctaaaagacaatcggctttggcaaactaaactatttcttttcaaagttcacttcctgtttctcctgggaggaaactgaaattcacagaagctcaaagctctggctagtactcttgacggagccccactaacaccagtgtccttgctgggctagctttggtatgacgtcacacgttcctctttgccccttgtgaacaattggaaggggaccctgggcctgcttaagtcacttcctgctggctaggaatctgatgtggagtttccagtgactaaaaccataactctggaactttccgtccctacaggacgcttctctggcagcgttctctgtgggagaacctcatggtctttcctcatttatccagaggggaccgaccgtgcatgggccactgtgtttatccgggctctgagtgtcttccatagttctacagagttcttagctttatctctggcctccctgctctcggcttcgtccacccaagctcatattccaaacagaaaagttctgtggcgttctggatttggctgttttgtctagaactcatcttggtcttgtgtttaatgcttagtggcattttcctttgccggtgctgggactcgaacccagagcctcatgcgtgcatgggaggcaagcacgacaccaaccgagttcactcctagtccctcagtcacttgactttgtgttccacatattcctgttctgtgatttttgaattattggcaccaaggcttgattttttttttaattcctcacttttgttcggttttgcttggctgtactgggaacggggctgagggtctcctgcacaagccaactggtgttctaatcattctctctctttaatgctttcctatgttaataaactcagtggcaaagctgggtgtggtggctcatacctttaattctagaacttgggaggtagagaaaggcagattcccgagaggtcaaggccagcttgttctacatagtgagaccctatctcaaacaaacaaacacaatcagtggaatactatgtcacaatgaaaaatgccatttaagggttgggagtgttgctcagtggttggcttagtgtgcatgaggccctggttttgagctctagttctgcaaaacacaaaaatccattcactcaaactgacaaattccttatgggctcataagggcctaactgaagttatgtaggatgagtctctgggttcagtatccagcaccatgccaataaaaacaataataaagttaatgtttatatatatatatggggggattgaggttggtttttttgttttttgtttttttgtttttttttttttttgagacagggtttctctgtgtagccctgaactgtcctggaactcactctgtagaccaggctggcctcgaactcagaaatctgcctgcctctgcctcccaagtactgggattaaaggtgtgcgccaccacttcctggcttgataaaaaatttaagacagggtcttactatgttgtccaagttggcctggaactcactatgtagaccaggctggcctcaaactcaccgaaggcctcttgcctctgcctccagagtgctagtattaaaggcattcactatcaagcctggcgaatagtaatgcaactaaaaaatagtcatttataaggagcctggattgactgggagaaggcttgaactacaacactaataaataggagaggtcttacctattgtctgtcaaattctgtcttaaagccagcacctatgtgaaggagagaggaggagaggaagtagcctagtggagttggcctgggagggtgggatagagtgtcttttccatgagaacaaccatcaaatatatatatatatatatatatatatatatatatatatatatatatatatgcacacacacccacacacacccacacatatatacatatatatccacacacatatatatatatatatgcacacatacacacatatatacatacatacacatacacacacatatgtgtgtatatacatatatatatatatatatatatatatatatacatacatacatacatatatgccaaggtaagccacatgtgttggctcacatcagtaatgttagtgtgtgggagacaggggcaggaggattgttgcattggaggctggtctgaactacacagcaagaccttgtatcaagaaaatcaaattaaaaataaaagaaggaaagcataatttagtattagtgccaacacagtcccttgcggttctccctggtgcttcagagttagcacggtgccagtgagctctctcggttcctgtgacagctctaccatttttcattcatcagccacagacacactaatttttcccaccagggttgagacttagtgagccaagggctcagggaacaacatctggggacacttgttgggctcctgcaagaacagggcatctctaaggctgagggcttccctaccttactgccttcctctcctctgcatcctccctgtagccctgaggcaggcagctctcccctttggagatgtggcagtgatggagacagatggcactcggtgcctgcagggctcccattctagatggagtgggctcagttctgctcctcattgaggctggtgctggggaagagaccatcccaagcaaaggaactactgatgttcaaggctcccaagctcctaagatctccatcctgctgggatgcagtagccacgttgatatctggggggagcagtgaggtagatgggaaccctcccttggggccagtgcctccagttctaagcggaatcctctcttgccttccagcttcctacgtgatcacagacctgacacagctgaggaagatcaagtccatggagagggtccagggggtgagcatcacccgggagctactgtggtggtggtccatgcggcaggccacggtccagcagctggtggacctcctgtgtcacctggaactctaccgagctgcccagattgtcttgagctgtgagtaactactctgtccccaggggactctcagcaagggtatctaccagatattttctgcaggcctactatgtgttatacttggcactgagtttatcaggagagacactgactagacagagatctaaaacatttaatttgtaattaaaaaatatatatatattggaggccagggagtaagggcacttgttgccaagcattgtaacctaagtttgaactctgggacccacatggtggaaggagagatgcccaaaagttgacctctggcctctgcacgtatgctgcggtagttgtgcctctccacacaaacacacaaattaattttaagaacttaaaaaaaatattggagagccagttaggagacggtaagcagcaggaacgaaggaagaataaccagactgagagataagagagatggggtagggaagcctccaagcgctgtggtccaggacagccagtcctaagagagtatcctggaagggtgggaggaaaactgtgttggggctgaggacatcgaccaagggagagcaccacctagaatgtgtaagaccctggctttcaactccagttctgcaggaaagacagagtatctgaaactcgggaagcccatgcacgctttgaaattggcctctgtggagatggggatggctgcctgccattccagcagacccagggcacaggacttgcctggatgaccctgaagccttcctttagagcaaggatagggattacagagctccagcctcagcgctgcagcccacatgggctaacagggtcaccctgggacggcgtccactcttcagccactatgtaactcactaggatttaaacctgtggttaacacaccatggctttccttttggggtttaagcaggaggtgcctgttccagtaggagagtctccagccaggcttgcttctgcattcccagaaactgtcccataaaccaaacccctacctggtggtcatgactttcccctagcttctgtctctgttctgattgtatttccctacccagtcttcttccagcttcttctctcagactggacagggtagcctgcttggctcacagctctttagaactggctagcatggatgctgtcctgtcctgagatgtgccagatcactgttcctcatccctattccccgagggccagtcagagaggcctgggtcaagatatggctgagagagtccaggcctggccccacggtacagccctgggagaattttctttcaagggctcagaccctgccattgtcttgcgaaggggtcagcctggatgccaagcagagccctctctgggattcttggagcctgggtctccatgatcactggaaccaggaggcatttcatttgatcactgtgaccagcccccaaggtttgtgacctcaattttggttactctgtcttcttagaaacctgaaatgtggcagatgctgagaaatgataaggcttaactggtgtgatggcaaatggttgcaatccagcacttgggaggcagaggtaggcagatcaggaattcagagccagctttgggcacataatgagttcagaactagcttgggctacatgagaccctgcctcaaaaaactgttctgtattttaaatgaactaattataaacacttagagctgccagctcatatgtggacacagtgtggttacagctagtccactttgcagaggcagatggctgggccaggcaaggcaatggtgtcccatcaggatgtgtgataacagaggaagaaccccagaagctcctgaccatactctctgaccactgacagcagagatcattgactaatctaggaaacatctttcttgtggaggtcaacaaagaccgaaacaccagatttaaagaaacattcatgccaggctcaatggtgcaaccctgttaatccaagtgcttgggaggcagaggcagaggcaagtgaactctgtaaactctgggtcagccaggtcgacacacagagactctgtctcaaaaacaaacaactaaagaataggtatgtggcatgccggcgtggtggcacacacctttaatcccagcactcgggaggcagaggcaggcagatttctgagttcgaggccagcctggtctacagagtgagttccaggacagccagggctatacagagaaaccctgtctcaacaaaacaaaacaacaaaaaaaagtataggtatgtggcttgtggtcccaaggtccatgggggtctcatctggatccagagcccacgactccactctctcaggcaactggaactgggcctgttgccagcaactgtgggctctctgggttggcaggaagtgctacctcctggcttttggtcaattagaacccttctcagactagactgtcctgttttgcattttatgcatcccccaacccccagttccccaaacacactcttgttttgtttagtcctgctggccaaaaccaccggagatggatcccaccacccctggctgttttgtgccactctggctgctcacccctgcactgtgtccttcggctacacacttcccttttctcacccttgctgggtttttaatagagggaaaaaaaagttgcctgcctggtctaaaggtgaccacccagggcctgtgtgcaggcactcaagtgcctgtgttaaggcgtgccccctcttctaaccaagcctttaatcttagtttccatttacctgcttattatttacttggctctgcagcagtcaacctgaaaaattgacttctgcccaccattctttctttcctttttttttttttttttttttttttttttgattctgggaatggaacctcgggcattgtgcatgtcagctaacttctaccactaaactacacttagccctcctaacgtgtgtgtgtgtgtgtgtgtgtgtgtgtgtgtgtgtgtggtggggggttgtgtatatgtgtgtgtcactctttgtctatgtgtgtatactgtgggtgtttgggtgtgtggggttatagagttttattgtgttgcctagctggcatggaactcactctgtagaccaggctgaccttgaactcacagagatctgtcttcctctgcctcccaagtgctgggattgaagacatgcacttctatgcttggcccctccatatttctttctcttgttgttgttggtttttttaaaaagagatttatttatttttattttatgtgtatgagtgttctgcctgcatttatatatgtgcactacatgtttgctatgcccaagtagttcagaagaggacatcagatcccctggaactggagatagggacggttgtgagtcactgtgtgggtgctgagaatcaaaccccggccagtgctcttaattgctgagccaccccacacctctaaacacttcttaaagatccgaaggtagccgtattttacagatgtcctgcatgggtgttaacacatatcaaggcaaagatctggcctcccatcaccaaaaccaaaccgtcccagccaaccagcaacttcaatagagttgaatagtgtcccagtaaacccacactgcagccttgtgaccattatatacgagccaagttcaggcttgaagtagctggacttgcatggcctggaaactgatgtctggggatgggggtttctgttccctcacttttcctcagctctacttgccaaggtcatcatttaacctgctagacatggaatccgacaagagttagaagaaattagtgcaggtcataggactcggtttccacagcacaacctttgccacactttccgtcgttcttcatgctctccctgacagactcctggctctgttcatacagggtgggctacagggacttagagagccaagctgggcctggcatgctagcacatgtctgttagccctaacactggacaaggtgaggcaggacggtagtgacttctgggctagcctgggctgtataatgagaccttgtctcaaataatcaaacaagctgaactgggaggaggctcaaagaccaaagttctcaggaacagcctctgagtagaatatgggtgtggccatgggcgtctgaaaactcaggagccatctgggtggaggcaggctgattcctggggcttgctggcctagctcagaaaaccgtgaccttcaggttcagtgagagactctaaggtggaggaactcaacctgggggcccaacccctttgtgggggatcaaaggatcaaaggacactttcacaggagtcacctaaggccatgggaaaacacatttacaatttattgcagtaccaaaattaccgttataaagtagcaacaaaaataattttatggttgggggtcccagcatccagaaggttgaggaccactgctttaagaacatagaatagaaagtgacacttgatgtcttcctctggccttcccgtgtgtgtgtgtgtgtgtgtgtgtgaacacacgtgtgaccgcatgctcgcgctcacacacacacacacacacacacacacacacacacacacacacacacacatatacagccatgaacatttctccaccagtgacatccaaggctgtctagggcaggtaaagtcattccaaggtgtcctggtgtcaggggctggccagggacacatgcttctggttcttatgtaaggtgacaagaagcaaaggtgggtgtgctcctgtctgcctagggctctaccaggaagttgcatgtctaaccttcccttaaaagcattggcctgaactgcatctcaggatcgacctggttgccagggagactgggaaatgcaggaagaggtttacagaggtaaagcatcttgttgctctggaggagaagtagctattccagagacaactagcatctcacacaccttcccatttggccatctggatgtctacacgcaactgtcttcccacatgtgccccgtccccaagagagaaagacctgatagctatcagtcactttctttaggttagttcaccgtccgatgccaccatctgtggctctcctctccagcttctgatgacccagtggatctcaaccagaaagaggttatccgcactcccttgcccaccagtgtacccacaattcattgctaggatggaacaggaagccacagtccaagtagctgcttgctctagcagtcagtgattccagcaggacctgtccattgcctgctgcaatagcggtcctcaccagccattctgcagtctctgggcatctgtttcacctggaaccttggcagggtagtttggatggggctgaggagtagatatgattgcccgggtaagcctaggtctcatggcgcatttgtctagtggggtagatagacagtaatgattgaacacacataaacacagtcaatagcaacacatgcactcgaaggaacatgcactgggtggggaggccggctgagagagggagatgggaagggcagctgaaggaagggcctacttggtcgtgtctaggcagagggcacagcatactcacagaggctggggtgggcaggaggcatgtatgaagaccaagagaggcctttgactttctgatcctcctgcctcaatctctcaattctggaattacaggtgtgcaccgccacacccagatgatggaatgctgggaatcaaacatggggcctatggcttgctgggcaagcatgctccccatattattattattattgttgttgttgttgttactattattattttattggttcttcaagacagtttttttttttttctgtgtaacagagccctggctggcctggaacttgatatgtagaccagactggcctgaactcacagaaatctgcctgcctctgcctccctcctgagtgctgggattaaaggtgtgtgtgtatgtgtgtgtgtgtgtgtgtttattgttgtattagcagtttttctcagggctttaacaaaatcccaacaaagcagctggaggaaggaaggaaggaagggcttttttggctccaagtttgagacctgtacctgggacctgggatgctggtcacactgcatccacagacatgagagctggtgttcagcgcctgtgtgtgtagtctacgaccccaacgtaaggggcggtgctgcccgcatgctgatgtgtctttatacctcaattaacctaaatcagaaagcccctcacacgtacacccagagaaaggtttgcctccgtggtgactctaaatcccaccacgttgacaagaccaacttatcaaatgaaaatgtactggtcccatgtagctgaggggttctgcctgtcaactgagtagggggagacccgcgggggtctgaagggatgtgagaggtgactaagcatttctctcccattggccgctgccatcttcctgtcaggtttttgtggatttcttgttgtgggtgttgaggtgggatgctcacacagtagggaagagcagcgtggccgagctctaaccccgtctggaattttctcgatgagctttgttgttttctggacgacatgcttgtgcaactctaactgttcagactctggctttggcgtgtgagccagagtcacttccttcctggatcagggctctgtggacaggggactttgggtggctgttgagcaaagtagagaagtgtgaccccttcctcttcatagagcccaggctgcacgcatgtaggtgagagggctcccatgtatagtctaagagtttctgtgtttgccctctctaatgttttcacagcctcagggagcaatagagtgtggatcaggatcatctccctgtggcatcagggacctgtcctggaagctgtcactgtatcaggctgagacatcagggtctatgaacccaaaataatgggacttagcacccagtatgtcccagcaagcacctttcctcatgagtttagttactcccattttatagctgtggaaactgagacttgcccaaagccacttaccttgtaaatggctaagatacaaaccgaggtcagcttgaccttaatctgtatttgggtaggtcgttaggttaagtctcaagtttcccctttggggaatcgggcatctttaggtatggtggcactcaagaggtggaggcaggaggatcagaagttcaaagctggtcttggctacattgccgtcatccttgggtacaagagaccctgtcccacacttcaaaggaacaagtgtctcagcctctgtttactctgtttttatagcaggaagcttcaaaaaggtggccgctgtttttttttagggtgctgatgctagtgtggggcaggtcacctgatttccttccccgaactgatccttctacagtcgctgtgggtttggagagtggtgggagagcacataggggggcatgtgccgcacaattaaactggggcacagggggttcacctgtcaggctgtgactgtgaaccatgctgtggtcacccggctcctctaagtgagaaggctcagctgtcctcagtgttttcgtgagtcagtgccagatgcgtcagaggcgtgacctaatcgcgcccccctccccccaagatgagctgcaacatgcgaaaggacagctcctgtgtccttgacttggggtcgctgtgacaggggaggcaatggaagagactcgttggctttttgttcctggttagctgggaccttgccttcaatggcttcaatctaattgcaagggagactgggatatgagaggggcaagtgggtcacagctccaggtgacatcggttcaaggggattttggcaaggttccatctaaccctccaaagccccacacagcctcactcctgcccagttttttgaccttacctctaccatctatctgcctcttccttcagcccagccactaaggtctttctttctttgatgaaacttatcaaaatgccccaggacctttgcacatgctgttccctggactctggtctttcccaaacattcttgtattcttccagaggccagtccccatcaccttttggaccttggcctcaaaagaatttcctcccttcgagtttctcatttgcatacgagtcttcccactttgtgaattagttgattcccacctcatcccgagtgctggaaattgactcagccatttctctcaagcagagaccctgtctccaatgctgtaagtgaatgaatcacagtgagtctttgaaacttgggcggggccgggctctctgggcatctaggtatgaagcagttaggaggtaggccatgcctgtctctgtctcttttacattttctatttagagtcagttattatggtgcacgcctttaatcccagcacttgggaaggtagaattaccagaatgtgttcatagaatgaggactctgatgtcagttctggaatcccctctggcccaatgaacagcgctgggatttgccgctgtgttatataggcaggcagatctctgagtttgaggccagcctttttctacagagatagttctggaacagccatggctacttagagaaaccctatctcaaaaagtaatatttatttttattttactttatgtgtatgagtgttttgcctgtatgtatgtatgtatgtatgtatgtatgtatgtgtaccatgtgtgagcagtacccacagaggccaaaagagggcgtcagatttactggagctgtggttacagacagttgtgaactgagaattaaacccacggcctctggaagaacaacaagtgttcttaactgttcacccatctctctagcctctgcttacgtctctctctggttttttgtttgtttgtttgtttgtttgtttgttttgtttttgtttttcaagacagggtttctctgtgtagccctggctgtcctggaactcactctgtagaccaggctggcctcgaactcagaaatgcgcctgcctctgcctcccgagtgctgggattaaaggcgtgcaccaccacgcctggttctgcttaagtctcttttgagtttggagtttttacatgctgtgtgtgtgtgtgtgtgtgtgtgtgtgtgtgtgtgtgtgtatacacgtgtgatgttaaaccacaaatgcacaacagactgggcctggggattagttggaaaagtaaaagcaagggcctagtgaaatgtttgtccctgatgtgagtgcctggctccagggttccttggctgcctgcggctcaccactttcgattgtttagaagggagtcattccagctacagatcaacttaagcattaaaataaataccgaagtattgcgttgttgtttgccttgagtgggtaaagggcagggtttccagagtgtgttcatagcatgagggccttgctgtcagctcaggagtcccctctgccccagtaagcagtgctgggatttgctgcggtgctgtcctcaggcagccaggggaggagtcctatgcctgcctggggtcagccaaggcatcagcatggtaacctgccttgaatccttttcactgaaggaagtagagcagaaataaaagattccagagaaaacaagtgtttcaggtttcattttcgtcaagtggatgacggggttgttgttgaatatgtgtgggagcatgtgtgggtgagcatgtgtgtgggtgagcatgtgtgggtgagcatgtgtgggtgagcatgtgtgtgggtgagcatgtgtgtgggtgagcatgtgtgggtgagcatgtgtgggtgagcatgtgtgtgggtgaacatgtatgtgtgagcatgtgtgggtgagcatgtgtgggtgagcatgtgtgtgtgggtgagcatgtgtgggtgagcatgtgtgtgggtgagcatgtgtgggtgagcatgtgtgtgtgggtgagcgtgtgtgggtgagcatgtgtgggtgagcatgtgtgtgtgggtgagcatgtgtgtgtgggtgagcatgtgtgtgggtgagcatgtgtgtgggtgagcatgtggggggagagtgctcatttgtgtgtgggcctgaggtcagtgtcaggtgtctctccctgaacgtggggctcaacatttcagctctgctgactggccagtgaactgtagcaattggcctgtcttggtccctccagtggtcttgttataggaagttgcccccgcccctggtttttcacaggggggtctggggatctgaacttggatcctaatgcttgcactttgccaacagagccatctccttagctctgtggcttcttgagaaagggtctcactgtgtagcctacgctggcctagaactcattgtgtatttcaggctggtctcaaactcaagacagcctccctcaaaggttgggggttgcaggtgagtaaccgctaaccataccaggttacgtttggacctgtgtcccagagcctgagttagatgttcccatagtggcaagcgtggttcagacagagacatctggtgacagagggaaataccaatggcttacatcccttaattgtttttaaaacttaacctatgggtgtggggggggggatgcgcgcacgtgtgcgtgcacgcgcccttggggccgtgaaagggtatgtatgattccttggcattacaggcatttgtgatccacctgatgctggtgctggggatgaaacttaggtcttctgggtgagtcagttctcttaaccactgagccatctcctcagccacagtggcttacatctctccttagctggtgggaagctggccagagcatcctgtctctgggcattcttgctccgtcgagacagctgtgcactgcggcaggatacacaacaaagcaaggaggaagtcaccttcccctcacacacaggcctgcaaagcacaaaggggcttggacacagctgggccccaccctttgccatcttattgtccaggactctatccaggtcactctcctggaaactcacagactctgaggatgcacatgttgccagagctgtagagaaatgcctcttttcttcctggggtggaggaattgccgggcaagtgaactccaagctgctcattcctcgtatgatgaggtagttagtgagccctgagggaggtgagagcaggtccccatttctcccaccatccacctcctgtgttgtttgttcctgtacccactgacttgctccctacccacatttactgtccgtgaatgtttgaaatatggctatggaagctgtccagtgtagctcagttggtaatgtttgcctagcacgtcggaagcctttggtttggtcctctgcactgtcctgggattccgctctcgagaggtagaggcgggagaaccaggaggtttttatttgttttttgttttgttttttttaatacatagtttattgttattgttattattactattattattattttgtacattgatgttttttctgcatctgtgcctatgtgagggtgtccaccctggagtgggaattatagacaggcatgagctgccatgtgctttatgggacttgaaccctgatcctctgggaaagcagccagtgctcttaaataccgagccatctctccagccccttgttttatgttttgagacaaggtctctctatgtagccttggatgtcccagaactcactttgtagaccaggctgacttcaaactcacagaaatccacctgcctctgccttccttaggctgggattaaaagtgtatgctactaagcccagcccaggatccaggagtttaaaggtcacctttggctgcttagtgagtctcaggccagtccagactgtatgaggccctgtgtcaaaaaacagaaaacaaaattgggaatagttttgtatctcaaaggcttcctcatagaccttcctggatgtcaaaggtgctttcaattttatttagttggatagtttattgttttgaaatggagtcttgctttgttggttagggtggactagaacttctggctctaatgactgtcctgccttgggctccgaagtagcttgatgacctgtgagccgtgcctggcccagaggtcgttttttaaaaagtaatgagttacattttgacattcatacatatgtatcagtatgcttagcacatatttgcacatcgccctgccccctctactggtcccttactgtccctaaattgtccctttttctttttgctttctcatatatatacgtatgtgtttaaatatggattctgcataggggagaaaaacagctgttatgtttccccattcccctcttgctccacatccctgtagattccttccttccttccttccccttcacagccccctctatttttctgcctctctatatttagctctagattctgcttcttagagagaaagcatgtgctattcctgtgcggctcctagaggtttgttttggtttgagacaggttctgttagttactctcctgttgctgtgatcaaacaccgtgaccaagacaacttaaagaaagagagagagagagagagagagagagagagagagagagagagagagattattcaggtgtggtgatgtgtgcctttaaagagttagtctggccaggtggtgagtgcctttaatactagcattatagaggcagaggcagacggagatctctgtgagttcaaggccagtctggtctacagagtgagttccaggacagccaggaccatgcagagaaaccctgtctcaaaaacaaaacaaatgacttaggaggaggaggaccaggaagaggagaaggaagaagaggaggaaaaggaggaggaagaagaggaggaagagggagaggaagaggaggaataattcatgtagcaggagaatctgtcgtgtgtcaccatggggaggcatggcatcaggcagacatggccggagcaggaagatgagagcttacacattgaaccactgaaatgaagcacagagaacaaactgaaaggggcaatgagtctttaaatactcaaagctcatcttccgtgacgtacttcctttaacaaagccctttcataagcctctcccaagagtatcaccaactggttaccaaatattcacatgctcgagattattggggctcttactctgtcagagcgccacacaggctttcacatagcccgggctgacctctcgaactcactgtgtagcagaggaaaacagaacatcatattcccgcgagctcggctcctgatgctcgggcattgtaggtgtgcattgctgttgggtcggtcctgactagctgtgctgtgtttctgatctcattttgccaagcccaggtaagctcccagagctctggggttaggatgactgtcactccggtggaggtgcaagagacttggaggaccaagaccctccttccctggctacaactggctgaggaagctgtgtctgcctcagctcaggtctgcctctctgatcgtgctctgccttgaatcagactctggatcagtgcctgtgcctgatgcccttgagaatttaaccccacaaaggaaaaaagacctgtggccctagcactgggaagctgtctggggaaactcagccaccagcttgctctgcagccatgtaggacattcacccctttgctcttggtctctcagcctgtggcgctccagtgtcttctgtctccctagtgactgaaagagtgggtggggtttgggtgggtggggtttgcagcctaagcagcaacaggttcctgaaaacagaaacaagaggagccatgcttttctccatttggttttcacagggagagtgaacaagactagctcgcactgcatagtacacaaccttacttgccaggaggcacaccagcagctagggtgtttaatatctttctttccttctccttctaaacatttctatttatttacttcttttggtgttgggggtgtaggacctggggattcgttcatgcttggcaagccctggacctctaagacccgtcctcagtccgaaaacggttcgaagctcacacaagctagttattgtttgcatatggacatcttgatctaacccaaagctcactcggttaggggaattctcaggaagctgatggggcgtgatgtagtagagcttgacctgggtctgtcagctgacatttgtggttggttgggcatggctctgcaagtgtcattaggtatccctgggtggttgaggaagtgttaactctgaatgtgctgacaggttccctccgggccttctcatgccccccacccagtatgtcttcttcccaccccagtcctgaaagtgaccctgtgacaccctgccaggtgtaggctagggcgtgtcattttagaaaaacaggagagagagagagagagagagagagagagagagagagaggatggactctccctgcaatgaaaacaaaggaagcctttgtgtgccctcatgggcggagcttgcaaaggtcccttgtgccacaccacatatccctgctcagagagacacagatttgtgctaaacaaacaaacaaacaaaaaggtcacaggggctgggctgtgactcagtggctcagtgccaggtactggctccattcccagcagctgggaaagaacagagtcagcaggaataggacccagaggtcaggatggagtgacccttgacccccatgttaccgatgaagaaactgagtctcagccaggcttcactcaagaaaatgcctctagctgaggagatggatcggtgtataaaggcacttcttcacaaacccgagaaccttagttcaaatccccagagacacagacacctgtgtctgtacttctagtgtccctaaaggagatgggagatggaggaaggagaattcttgaaagtcctcagactagctaccctgctatacacagaagataaacaacaaagcgactgtctcaaactctatccactctctatgatagtctcattgtccatatttacacacacacacacacacacacacacacacacaaatgctggcgtgtacatattgtgtacatacacaacgataaatacaaaatgtaaaagaaacattatatgctggacccaggagcaatgtgggggcaggtggggtatcatttcctactgttgtgggcatggcttcaacctgaagtcacagttgggggttctctaccaggaagcgacctctgtccttctgcttcacacacctgtctggagttgctgctgtatgtctggtgaggaccatgggatttctactctaggctctctggagagagaggaacaacacaagaaaggcagtgcccctggcccagtggaggctgggtaagagatgtatggaacagcctgcctcctggggacatgtttagcatctgcttttggtcactccctgtttgggcagcttggtggcaggtatgcttatgaattggcagttacctcagcaaatggtttttgttgacattttgttacaaagactgtctgttcccttccagggcttcagagccagcctggtctacaaggcacagactgtgtggtttggctgcagtggggaagtggctggcttagagactacattccaggtggcatgatgccaacaaaaaaacaaaaacaagaattacacggtgctggttagatggcccaggggttaagaatacttcttggaggacctgagttcagttcccagcacccacattgggtggctcacagctgtctgtcattccagctccaggggatctgatgccctcttctggtttctgtgggcattgcatacatgtggcaggctcgcgtgcgtgcgtgcgtgcgtgcttgtgtgtgtgtgtgtgtgtgtgtgtgtgtgtgtgtgtgtgtgtgtgtgaaaaaaagaaagaattacagaatcattagaaacagaggaaaagaaagagaaactgctgagaggaagtggctttccaaaagaggaaaatgttgtgaaacttccttctctagagttttttaagaccattgcaggaactagacaaagggtgaggtagttgctagaagcctggttagttctttatgctgtaatgggcagagccaacagattccccgcttgcaccatgaatgctccctggactgatgttcttgttcctaggctgcccacccagcttgaggtggttgaaactcctttctgtccatctctgactccaactttgttaaattttgtttttttgaggcaggttcttgctatgttgtcttgactgtcctagaatacactatgtagaccaggattgtctcgaactcacagagatctgcctgcctctgcctcccagatgctgggatcaaaggtgtgcaccactatccctgcagtttctcttatttgatggcccagaactcatagagactccagtgctggcatgaaagggggttgcaaccatggctggcttttttttttcccgagacagggtttctctgtgtagccctagctgtcctggaactcactctgtagaccaggctggcctcgaactcagaaattcgcctgcctctgcctcccaagtgccagagaagatagaagagggtgtgggatcccccgtgggctttcattttcacacgtgggtccaccccaaaccaaccaagaaccaaggaccttgtttctttcacacacacacacacacacacacacacacacacacagttagctctaacatctttgagttacatccacctctcttacgatttgggttttgctgaagcaggaatattgaagaatccggactaaggagtttagacattatccaggcaacaagaagccatagtgtttccctttaagcaacagggatgtgacaaggccagaacgggctcttgctgcctgatggcaaaggaagggagccgagcaggaagggtaagcctgggcgctagttggaagagaggagaacgctgtttaaaagaacctcggtgaggtctggatatgagctggcatgcaggtgacctcccaccatcattgagggttccccaaactatatatactatgcagaagtgaggacatttcctgtaggtgacttctgtagccagccctatcaacctgggctgtgtgatcctcagcaagtccctaaagctgtttagagatgagctgtacagttgtgtgtagggcagcaggaccaggccgtctctctagatatggctgctgtgtaggattctcacgtatgaagcagagaagagaaactgcgggacagtcaggacttgggctcctggaacccagggtcttgtgcatgctatgcagatgatccgacacccagctcccaggcggatgtcttcagcttgtttgcacattcagtaaactgcacagccctttccaaagcccttctgcacctgcgctcccatttctccactcacagcagtcctgacaaagtcagcaagcaggcattaccctcgtggtcttcatttgttttaatttatttatttttaaagatttgtttatttgtattttatgtgtatgagtgttttgcttgtatatattatatgagtaccacacacatgtgtagtgcctgcagaggtcagaagagggtgttggatcccctggaactacagttacagatatttgtggaccaccatatgggtgcagggaatcaaacctgggttttcggaaagatcaccagtgctattaaccactgaggcatctccccagtccctgtttattttgtgggtatgagtgtttatatgcacatatgtgtaccatgtgcatgcctggtagtcacggggatcagaagttcccctggaactggagttacagacagctctgaactgctattgtggatgttgggaatggaacccaggtcctcggcaagagagagcagtcagtgctcttaactgccgagctttctctccagccccaatggtctccatcttataggaggctcatggatggaaagtgactttttggaagtcacagaactaccaagtcagaagctaggtgtgtgtgtgtgtgtgtgtgtatgtgtttcagaatgtcagagccaaaccacgtggcactgtcatagcccagtggacatatgagcaagtcatgacccagagagaacaactcaggaggcacagtgagaatttgtgctggaggcagggttggacctcaagtctctgacttgcagacctgccccgccatagcttcctggtcatggaaagtgacaccgtcctctatgccttgttccagggaagccggttcctgagagcacatctcccctcccagccttcccagaggctgtgaagccaggggctgtggctacttctagaagaaacctcaaggatgaacaggagaaagtccggcctgtgaagccacgttcccttctagacacaggtgctctcctcccctccttcctcctcctcttctgagttttagatttatacatttttcttttctgtgtatgggtgcttggcctgactatacataaggactacttgcatacagtggagtcaaaagaggtcattggattccctgggattccctagtatggtggtgtatcactatgtgggtgctaggatcactatgtgggtgctaggatcactatgtgggtgctaggaatggtggtgtatcactatgtgggtgctaggatcactatgtgggtgctagggatggtggtgtatcatgatgtgggtgctaggatcagtcccaggtcctcctaaagagtgatcagtgctcttaattgttgagccatcttttcagacccatgggtattatttttttcttttgggggcatggggtgtgtgtgtgtgtgtgtgtgtacatcaaatcacactgcacagtgagttagatatccaggtgtggtggtgtatgcgtgcaatcccagctattccagcctctgaggcaggaggaccttgattttgactctattctgggctacgtaactgggtggctgctatctggctttcctcaggaagctgaggtcagggatccctgtggcccatgacagagtgtctgcttggtatacacagatctggcttcagtcctcagctaaatgtttatgtagtggtctttgttactttgtggggtcttcttcctaccctttatgccccacccatcccactttcaccctaatcactagataggagagaaagaaggatatggggggggggggatccatgaatctagtttctttcctctttgagcatgactgctaacaaactgcaaccaaccctcctgagtgaccaacagccaccacccccacctctcggggctgtagaatttatataccttctgaaaaattcccagaattccaaacatcacacaattgcagaaaccatctgcagctggcaaaaccacggctctgctagagcatgaggcaaatcatagtcagcagctaccacacagcccgatatccttgcacctgggattaaaacaaaaacatatgtgtctgtgttttttaaagaaaccaaaattccaaaattctcattacagtgttaagtttacaaataccattttcagagtgggtcagggagggagagctgggcatggaaccctgggggttaggcgtgcgagataagtgctttacccttgagccactccctctcccatcaatttcagcaaaagaaaaaataaggatttgctcaaggtgatttaaccatggggtttgagcacttctacctcccccatacagcctacgctgctgtcccagagccttgcagagagcactgtatgtgtgtccagcctctcatctcctgtaacctctggcctgcaagctcaagatcccagagccataaaatgcagctcactgaggagcccgaagctagccagtcctgcatggagcagtcactgttaggggcttgggccagaggttgacccaccagtgcttacattccctctcagcctcatcatttctgagttcctccatctgtaaatgggtaagaacagagcccattgcatcctattgcagagaatcaggcaccttagctgggtggatggtgtgtgtgtgtgtgtgtgtgtgtgtgtgtgtgtgtgtgtgtgtgtgtatgtgtgtgaatgaaaattccaggccaacatggtttctttaggcatgtgcctctgcagataccagagctggtaaccatatggatctgtgtgaggggacagggaaatccagttaaaaacaactccatagccagtagaaaggtgtgcaaaacaactgccgatggaagccacagctgggctggagaatgtttcacttccctcagctgttccttactttcctgctacatagtaataaaagaccacgccatcccttcccatagtgagaagcaggctttacagactcagaggcagatagatgttaacacctcacagcccattgtcctattctgatctcccccgcaggcccaggatctccaggcattccagagcaacaggtccgtggcctttaccggatgcctggctccatatgatgtttctttagtcattacaggggatgcgtgtgaatggtcgctcaggtctgagtgcttggaagactggagtagctcatttctgggcaggcaacaccaccgggcaatcaggtcagggctggctgtcctgtcctcacagattctagctgggtggtgggggataatgcctttaatcccagcacttggaggcagaggaagataggtctccaagtttgaaaaaagaaagaaaagaaaagagaagaaaaaggaagaaaagaagagaagagaagaaaaaggaagaaaagaagagaagagaaggaaaaaaggaaagaaagaaagaaagaaagaaagaaagaaagaaagaaagaaagaaagaaagaaagaaaaagtatggcttctatagctcttaaggggccaggggagaatctagtgtggtctaagtcggacctggagtcagactgtgaacacaaggaccttgtgctctctacagtttctatatccagttccaagccagggttgcataatgagaccccatctcaaaaaaaaaaaaaaaagaaaaaaaagaaaaaagaaaaaaaaaaggaggaaaagtgtgtgtggagggggctggcagttaatgctaagtcaaggactatttcctgtaactaaagatatcgaagaaggaaggggaaaaatgtgctgacctatgaaccccaattcctgataggtcctcagacccgggccaaactgctgttcctttgccaaagggagaaagataatgagaggggaggtgggggaggagcgggcgggtgccagggcctctctgtactttcaccattagcctttgtgtggcccacattcctgagtggccctggggagcaggtgtgccggggccactgggcctgtccctgcagtccctcccacagaagcggaagttctatttctgagttgaaacaggaggagttattctttccattgattactgaggccactcagccctgggaaagccccagatttcaggcttgtggtctgtccggggaagttgctgtttgagggcgttttttattttagaggaaaagtttgggcgcttggagcgttgtattttgaggacttttatgttgagatgaatgggtcctgcggtgtgtccccgaccttccatgaacccgtgcagcgctcagcagacaggaagttacacactaggccctctgtgatccactgtggcaacagtgtatacagtgtatgtagtgtttgcagtacagtgtgtgtgtgtgtgtgtgtgtgtatggtgtattgtgtgtgtggtatggtatgaagtgtgtgtgtgtgtgtgatgcatggagtttggtgtgtttatgggtgtgtgtggtgtatattgtgtgtgtggtatatgttgtagtatgtgtagtttcttattaagaatctgcagtgtccacacagacaacgaaagcagtgcattgaaggctctgtgctgctgtccaggctgcaagggtggtccatggttacttcatcggctgggctgctctgccttgcccggccatccggggaaaccttagacagttctttgaaaacatttaaaaaatggaaaatcttggccaggtggtggtggtggtgcaagcctttaatcccagctctcatgaggcaaaggcaccttggtctacagagagctccagggtagccagagctacacagagaaaccctgtctcaaaaaacaaaaacaagaacaaacagaccaacccactcgagtagacggttcatgcttccatcagccggcttcagtgatgatcagacttctggtgacccagcggccattgaggaactggttccagaactccttcctgcagggtaccagagtctatggatacttgagtcccttctgcaaagtagcatgataggtgcttgattcagccctggctactggtacccacaggatggaggtgcctgggtatttaccaagtgagtgctgagcctcccctccccctccgtgcccttgatttccccagtccttcaggccaccccaggtagaacagcatctgctgtggaaccacactggaggtttctctgtgtcctctgccaggcagtggcacaggggcagcacaggggcatcccccatcatgtgaccccggctgctcaggacacctcccacttcctggtctcctcctgtcattcaagatgacaaattgcacctgttgcaagatgtcaccaggcttaaaaggattgacaccatggagctggcctcccccaccccctccgcggtgtcaggaggtgacagcactgactgagggaaaaggtcgcttcgggatgcgtccccaggcagagtgttgactgtgttgtcctttctagggcccatcatggctggggcccagcggcagcgtccgtgcgagatggatgccccttgttccctgaaaactgatgcacccgactctccccagtctaaggtaaatccaccctgtgcttctatcccagttgtgtcttggctcgtggtcctctcagaaacagtttcttcattccctgagaccagtgtgggagtggggaggacaagggacccacaaatgtctccccaaacttctgagattaaggatactcatcagcagaacaaggggtgtgtgctgcactgagtttgcgggtcttggtcggttgtgtctttggggcatgattcagggcccagtgaagtaccctagcactgagtcccagcccgggccaggattcatgtttgccacattggggattgagcccagggttctttgcattcaaccactgaaccataactatagcccccttttttctttttttgtttgttgtgcttgttttgttttgttttgtttttgagcaagcttttattaagggtcatagacaacaggccttgaacttgtgatccccctgtctcagcctctagtggagcagctgggaggacaggccttcactacaaactcaatagaatctttgctttctttctttctttcttccttctttttttttttttttcctgtttgtttttgagacagggtttctctgtgtagccctggctgtcctggaactcactctgtagaccagactagcctcgaactcagaaatcctcctgcttctgcctcacaagtattggaattaaaggccaccactgcccagctaggacctttgtttttaatggccctgggtaagcaagacctgaaccagtaacgcctacacaggcagttacaggaactagtttacaactgcccagccctccccactttcttgtcagacttgagcaacagtcagagtggtcctgcactttaacttgggttccagaatgttctttgatgttattcttgtgggtacttttgccctcatttgttaatgctcccagatactgttgtgactctattggtaataattcacactgggttagaaatgaaagcaacagtttgcatacagctcagtggtacagccctgggtcccaccccagccaagggggatggggcgagggaaatagctttttactcttttgaggcagggttccatgtagcccaggctggcttcaaacttgttgtatagctgaggataaccttgaactactgcctccacctcccaaattactggataacaggcatgcatcaccacacccagtttatgtgtgttaaggatggaactcaaggcctgtgcatgtcaggcaagcactccaccaattgagctgcatccttacttatttttttgagacaagatttcactatgtagctcagtttggatttgaatttgtgaatcctcctacctttgaatcccacatgatgtcgtcatgggcgtgaactagcatacccagccttttcttctagtttgaaaagataaagaccttgccgttaatcccagcacttgggaggcagaggtgggcagttctgtgtgagttagaggctagcatggtgtgtacggtgagtttgagaccaatcagagtgacatagtaaatccctggtttttgggtttattttttatttttattgttttaaagatatcaaaagtttgtatgtttttgagaagttgagggtttgggcttgtccctgggggagaaagcagcaactcctgggctggttaataaatatctcctgtaacttaatcatgttcagagatgattgaatcattaaggacctttagggccagcagttggaggacaggcaggcaggttgaggttagcctggtctacaatgtgtgctccaggccagccaggggtacacagggaaactatctcaaaaacaaaaacaaaaaccttcaggagcctgggagatggctcagcggttaagaacactggctgctcttccagaggtcctgagttcaattcccagcaaccacatggtggctcacaaccatctgtaatgggatctgatgccctcttctggcctgcagatgtaaatgcagatagcactcataaatacatctttaaaaatatttattaagaagtttctataaacctttgttttccttttctttttgtacataatctttaaaattttatactacatttatttattttgtatgtatgtatgtatgtatgtatgtatgtatatgtgagggcatgtgtatgctgtggcacacatgtgaagttagaggacaactttcaggagtttattattaatgtcctgggggttgaactcgggtggccaggctttccgagagcctttatctagtgagccatcttgccggccccatcctcattttctataagccaattctagtggatctaactggcaggaacagactcatctttaattgcctgtttttgcctagaatagtttcctagaactatttcctagaatgattaataagggtttaagtaaccttataaatatcaatttctgtgtgcctgtgtttcagccagctttcatggtcaccatccactcttctctcccaatctccagtattgcagtacttccacatctgcccccaagcaagaaaggcttttgggtttgcccggagacaggcttttctggagtgaagcagatgtcgtccaagcaactgaggactttgaccaaagccaccgaatcagcgagggcacctttgccgatatctaccagggtcaaaggaacggtgtggccttcgccttcaagaagctcagggaggtgaggtgagggtgtctgcagggagcagtgaggccgggggctgagggtggatgggtcttcaggggctgtgtattttcccacaggtggccggctccagtccagggtccatggacagattcctacaggcagagatgcagctctgcctcaggtaagcttccggtgcagagcccctggcctaatgatgacggcaggcagtgcttcctgtgtgcaaggcaagtggttagcactgtcattattgttctgggccattttctgaggctgtcacggagagggcggtttctaaagcacatgtttgtttatttcgtggttttagaggctgggagctcagagggcatccattgaggcctcatgtagcaggtaccacagcagtggtcatcacacagtgtgactgagggtctctactcttgtatagccctagcccatgatctcacctaaccctaagcaccctgcctccaaatacctctgactataaatttggggcctcagtttccagcacacaaactctggggcacatgctcaggtcatagcatatacaagctcattccagcgtcaccagaatgttgcaacacagatcccagggccacagttgataggtgtatacgttggggcccagagaggctcagtgtttggcccaagaccacacagctagtaagtggcagggccagagtatgagtcttcatagactccagagtctgtgctcttcttatgcagcaaaaaatagaattctcaagaaaccctggctttttccagctcctccttccatgtatgaagaaagagatcctccctatcgcattttgaaacaggcaaacagactggtggtcaatggcaaacctatctcaacactagacatgtggggacccacggaactaagtctgcctctgtgtgtgtttatacagccaagattgaagaatggtttattttattttattttattttagagacagggtttctctgtgtatccctgcctgtcctggaaattgcattgtagaccaggctggccttaaactcaccaagatttacctgcctctgccttccaagtgctgggattaaaggtgtgagctactacacctggcttattttattttttagagactaggttttactatgtagcctggttggcttggaactctctctgtcgaccaggctggcctcagactcacagagatccatctgcctctgccttctaagtgctggattaaaggtgtgggccactacagttggcctggcttttattatattttaaaatggttgaaacaaatctaaaggatagctcatggtccatggatacaagatgacataaaataaagttttattggtatacggctgtgttttccagtgttcacagtgtctatgactccttctgggctgaacacacagtagggcacttgctgtagtctacagtttgtggagaacacatgttttctaactcactctttattctacaagctggctggagatgtagtcaagcacagataaggccctgagttctagtcctagcaactccccatcccactgccccaccccccaatattacaggggtaaagtaagaaagcctccaatctgttcactgctgcgaggtgtggtcttgtcaccccagcacttgaaatgctgaggcaggaaggctgcacaccaaaggcttcccatcccagagctgacgggagcttggggagggacgaggacagtcagggactgagacatgtcctagctttgtcaccatacctagctagtttgtcatttctaaatgccttcttcataggagataacacacatgagtgtaaacatgtagacactcattcaatggagatcagacatgtgcccttgcttcaactctgtgttctcatagataggctcagtggctattcctccactcattagtttagtagcccaggctataccaggttagagggagagctcacttgaaaccaagtagctcctgcctcctagtgcatgcaggacggacaggcgtgcaaagctagtgaatgagacaggtgtgaagtagggcacgggaacgcagcatgacctggcacaaggccatctgtagttgcccttcgaggtagcctgggctgtggccacaagaaggagatggaaaactgtgtgtaacgactgtgtgatggggctggagagatggctcagtggttaagagcactgactgtgcttctagaggtcctgagttcaattcccagcaaccacatggtggctcatcaccatctgtaatgggatcccatgccctcttctggtgtgtctgaagacagcaacagtgtactcacatacatgacacaaataaatagatcttaaaaaaaaacaaaacaaaacaaaaacagtgggtggtgattaatgaggcaagaggtttctgggaggcagaagagaagtgtcctttcccaggtagacacgtggatggttcacatgtggagcatgagatgtggctagagtcatgaggagagccaagaggagaaaggtgactcataaccctgaggcgggtgtggtggcctctagcaggttcttcatctttcagccttttcccagaagtgggttggggatggtgccagactgcacagcagggaaatagggtgaggccaccagggaccagagcctgtggcggctgggaggtagcgggtggtctgagccaggaagtggggtctgcctgtggctcttgctctttcatgcctgactgtgcacttgtgctgggttcagatgctgccacgcgaacgtcctacctctgctgggtttctgcactggaagacagttccacagcctcatctacccctacatggcaaatggctctctgcacgacagactctgggctcaggtaaaccagtggctgtagtcacaggacggaacagatagctcttgcctaggagtcaagttaaggacttcaaagagtgtaaacttttttgaaagcttataaaagcttcaatatagatatcaatgtatcctttatttcattttatttttatttatgattttttttgggggggggaggacaagatcaccagtagccaggttagcctcaaacttgctatatggtagacagtgaccttgaagttctggtcctcctgtctttacttcctgagtgctaggagtacaagcatgtgctaccatgcctggtttgtgcagcgctggggaatgaagtccaggacctggataggagcagacagcttaaactgaactctgtccccaactgctctcctagtctttataatgctaagatcaaatccaggacttccggtccatttcatatccaaggagacaaaagctcagaggcttcaagcgtcttcccaaagtcacacagcaggagtgtgtctgatcttggaatttcaagtagctctgtttgatacaaataatatcacctcagccgggcgtggtggcgcacgcctttaatcccagcactcgggaggcagaggcaggcggatttctgagtttgaggacagccagggctaaacagagaaaccctgtctcgaaaaacaaaacaaacaaaataataataataataataataataataataataataataataatcacctcaaggtagtacatcacactggctgagccccgtgaccaaggatgggttcgaagcagtccgagaacagactataaagactttaggatggttcaggagtgaccctttttataccttctctttctcttagggcaactcagacatgctgccctggccacagcgggccagcatctgctcagggctgcttctagccgtggagcacctgcatagcctggacatcatccacagcaatgttaagaggtgagagggcgggctggagagatggctcagtggttaagagcactgactgctcttccagaggtcctgagttcagttcacagcaaccacgtggtggctcacaacccaccatgcaatggtgggtctgatgccctcttctggggtgtctgaagagagcaatggtggatacattaaataaataaataataaataaatctttttttaaaaaagagagaaaagaaaaaagaggtgagagggcagcatgagctgggcttgctccccaggtctggctttgagaaccaggacagctcctgttcttgctgtctgtctgtctctcccctccccttcccccttcttctcctctatctcccctcccttggggaccttagctctctcttcatatcctcaaaatccagtatttctgaggtatgaagctgtcactttatctgtggcctttctggattagtttccctgcaggccacagcaccctaaacatttgaccatctactcaggagtgagccggcttgcactccatctgggagctgtgcccagccttgggatttgagctccccatttgaactttgctcagtgcctgccttgcttgtcggttagcgatagaccttgtcagggagttttccaggtttcctatcccccgcatcttagtgtcaggtttccaagaactagagaactgccatcacgggagagattccaagagtccaaggcatttagcagaaccagctgcacgaccatagaggtcttgtggttcctcaaggttccctctcctgtggtacaagccagctcaaaagccctttcttctttcccctcctgacttgcatttgatggccccatcaccctgggcgtgctccaccatccagctgcgtcgtcctcccacgcaaatcctcacccctaagactggatggtttcacggctctcagttcctcctctgcctccccatgttgcaaggtttcacggcttgttgtgatttcttaaccttgcggtgaagcggcttgctcacacttatttagatactcctaatagtagatattggagttgctggctattattaaaaagattttttaaactttttttttgtttgtttattgagacaaagtcttgctgtcgagcagaactggcctctaacttaccagtgtagcccaggctgacctgaagctcactacgtagcctacactggcctcgaacttccagcagctctatcttagtttcccaagtgctggggattataggtgagctgccactgtgcctggcctggtgtcttctttttcaaatactgctcggtggaccagtgagatggctcagcgggtgaaaatgctcgctgccaggcctgatggcctgagtttgatcccttgaatctaaatgatggaaggagagagcctgcaaaacttcccactgagctcccctggcaagatgtggcatgcataccccctcccccaaggaattctctctctgagaattttctctccctccaattatgactggatcaaagtatattttcacttctccctttaaaaattaaaaaaaaaaagctccccttccctacaacctgagcaaactgagttacaaaggatgtaactgggttataaaggatgccagtgtctgggttggccccagagaggccagagcttgtaatgggaacagctttagaggagtctaggccagaatgagcagtgggcttgacctgatgagcggtggggccggccagggctggcatctgtggggagtagaagtctgcatttcctgcatattcctggggcaactaggccaattttcagctccatttccatttaatggagtgagtgggtttccaaggtcctacccatttatggctggctatttcatgttgagtgtcttctgtgagtgcctccactccaccattcccagggctgacgcttgcccagtgctaaattgtttggccagtgtgtctccacggcaacctcttcacttgctttcccgcagtgccaacgtcttgctggaccagcatcttaaccccaagctggctcatcctgtggctcaccctcatcccgacaataaaaagaccaaatataccgtcatgaggactcacctgttccaggcctcagctgcatatctgccggaacacttcatcagagtggggcagctgaccaagcaggtggacatcttcagctgtggaattgtaagcatttcctcgtctgcccacaggctggctgtaagcgtggggcttgcgtggagttacagcagaggctgctggactgtggcctccaggccagatccgagacaaaggcatctttgaaaaccgtttatttcacttgctcttagtctgtgggtgtgcattatgtgtggggtgtgggatgggggtgtagttcgagtgagacgctcaggtagtatcgacctcctttgggatcggctctctcatggacctgaagctcacgagttaggctagactcaccagtgaaccccaaggatcctcctgtctcagtctccccagggcttgaattacaagtgcataccacaacatctggcatttgtatatgagaatctcaggatctgagctctcaagtcctatgttcacaaggtgaccattcacggactgacgtatgtccctaatttgcctccccacccccatttttggtaccggagataataccgagaccctcagacatgcgagacatgtgttctaccactgagccatacttcccaaatttttgcaataaggtgtcactgggtccctgtggtccagcctagccaccaaccacgatcctgcctcagccctttgagtactggaattgcagctgtgtgcaaccaggcctaacttctatggtctattttacatggcttctgagttataagtgattttcatggttaaaaaggtttacatagctgggcatgggggtagatgtttgtaatcccagcacttggaaagtcaaggcaggaagattgcttttagttcaggctagcctgggctacatagcgagttctaggtcaacttaaccttgtgtcagaaactcttaaaaaatggtaaacaggtatatacagaaactgtgtatggttggtgattctgtgggctgtagatgttatctctcgacttcctgcttcccgtccatactgttggcctaccacctatttctctgtcatgtttcttcatcactcttccatcggtgaccatctacctctcctgcataccctgcctcaggaccgggtgccgggtgctcagggcgtactgtaaagcgtctgtagtctgagcctgatagtctgctcagttcatctttaggacacactgagtcctgttgatgtctgcaggatgggtgtgttaaaagggctgagaggacggataggtttggaagatactgtcgagcaaagccaagcgggcttttcattccagacttaatagggtgctgaccctgtgacctggttgttgtgaacccagcagagaaggtgatgcaagcccctgcaaccccacttgacagcagagcctggttttcttgctgtctgtctgtccgacttggtgttgcaagaccacagaatgttccacagcattgggaatgtgacccgagatgcacagtttgttgcctgcagccaaactcagactgttgcgctcagggctttgcatgtgccttcctccctgtcttgaactctgtccttcctctctgtgaccacagtcttctgtctgttcacatctgcctctggagccctcaccaggccgccttctgccctcaactggacctctgtgtcccagattcagtttccttctgcccctggctggccactctgctggctcccattttccccatttgatccccccctagagtttcctgtgagtgtgtcggtgaggctaagcagccctacttggagaaccagtggctctctgggagaggaggcagagcgagttctaggggaacctaggcaatttaggaagactatatctcaaaacaaacagaacagaataaagcaaatgaaaacaaagattgaaataagtcaaaacaaagcaatagggcagaccctccaactaccaggcagtatggcctagtgcagtccaggcacttccgccatctaacacctgcccaccccatgtttgggcctcagttttgccttctggaaagtggggtgttagtggtgcttatagagtagtaatggggctggatgtggtggcaaatacctttaatgtcagcactcagaaagcaaaggcaggtgatctctgtgggttcaagaccagcttggtctacaaagtgagttccagggcagtgagggctctatagagagacttgtctcaaataagtaaataagtaagtaattaagtaagtaaataaataaataaaatttaaaaagagtgtaataggatgtgtatatatgggtattgtagtattagtgtgagtgtgtgcatgtgtgcatgtttgtgcctatgtgcatgtgtgtgtgcatatgcatgtgcatgcgtgcatgtgtgtgcaggtgtgcacatgccatactgcatatggaggtcagagaataactatctggagttgtggcctttctcctgccaccttgtgggattgaaccctaatagtctggcctgcacgccagtacctcatcttgcccgctgttgtctcagtgtttttatgctcactaagtgacccttgtcagagacttgttccttccggaatcacatggctgagacagaggagatgtctatctcctgatttgttttcctctgttccttcctgcaaggaccttgctgactgcctcttctcaactgactgtagacccttttctatggagtgctctgtgctgccccctcctggccactgttgtcacgctccccgtgagcagggtaacctcagtgcctaacctgtggtttactgctctaacttgttgcaggagggtgtgggagagacaccattgctgttcatcttgcagcatagctgctctaccccacgtgacacatgcagattctggcccaagtttcagttcccaaccctgggactcacttcttgtgcagagctggacttccagtccaggcttctgtgtctgtctcccatgtctgtagttttattttttgtttgtttgtttgtttgtttgttttttgagacaagagtttctttgggtagccttggctatcctagaactagctctataggccggactggcctggagcgggtagagatccacctgtctctgcctcctgagttctgggatttaaggtgtgcgtcaccaccacctggctcactcctgaatcttttacactgctgagaatctcatgaacaggaatggcaggcttgctcttcgcacaggtacaaatcacagtttcccacttgggtgttggctcagggctgtgttcctctgtgagtgagtaaagtaggtgggggtggggaatcctggtagggtggcaagacaatcaggaactcaaggccaccctcagctacagagtaatgtcaaaagacccttgtcttaaaaaaaagaaaaacaaaaaaaacaaaaaaacaaaaacaaaccaaaaaaaaccaacccaaaccaaacaaaaacaaacaaacaaacaaaaaaccaagaaaagggctgggcagtggtggcgcactcctttaatcctagcacttgggaggcagaggcaggcttatttctgagtttgaggccagcctggtctgcagagtgagttccaggacagccaggactacacagagaaaccctgtcttgaaacaatcaatcaatcaatcaaacaaccaaaccaaaccaaaccaaaacaagaaaaaggggctgcaacatggctcagtgggaaaaggtgcttgctgccaagcctgacaacctgagttccagtccggggacccacgcagtgggaggtgagctccagttctcacaagttgctctctgacctctgtgcaagtgccatggcgggtgaataccaacacacacacacacacacacacacacacacacacacacactcaataaataaataaattattatttattttatttactattattattaaataataatagtattaacagtaataatatcagaaaagatgaagcctttgtcattgtctaagtcttttgctgactgtgtgtgtcaactctgtgttctctcctacccaggtattggccgaggtccttaccggcatccctgcgatggacaaggaccgcagtccagtttacctggtaagagatccagtcacttcgggttggttggctggtatccttgggcacacgtccatgtgggcagggagggccttgcccaccacatgcaaagttctcaggcctcagaccagagctcttggcatccatgacatcttcccacactgccattttagaagcacagcaactggcgctgccgtgtgtatgcaactgctaagcctcattctagccttagttttcttcttcttttctttcttttcttttctttttttttttgtgtgtggggggtatgtatatctgtgaggggattgatcttacattatggtctaggatggctttgagttcttggtcatcctcctgcctctgcctatttttgagttctgggattacagacttgtgccacacagtcagctgcagccctctgagtgagccttttcctctgtttcagcctgccttcctttctttggtgagtccttgctaatcaagtcgggggnnnnnnnnnnnnnnnnnnnntggcctcgaactcagaaatccgcctgcctctgcctcccgagtgctgggattaaaggcatgtgccaccacgccccagctctgattgacattttgtcctgtggtttcactcactagtcgctcgctctaattttccttcacatttcctgggtcctgggagttggctcttgagcctctcctgggttcctggttgatgcttttgtcaaggacactttgtcctagcctgtacacagccctgacaatagagtcaagctccccacactgtgaactcactgccagtagcagatgctgttgctggctacaaataagatctttcttccctggagggtctcaagggcggggctctgggaactgcctctggatcccctttctttgtggtaacttgtctctctctgcaaaccactcatgtgctttcgctgttacaagcctatttcttcttcctcgactgctcggggttaaggctaagtttccccaaagataaatagttaaaagctcatgcttttctggaccccaagtgagtgccagaagcgccatggcacccttagccatctttacttctaggtattgaatctctgatggtgtcaggcatgttgtgttcccagattctgaaactcccgctgagataaaattctattgcccagctagccttgaactcctgggctcaagcgatcttcgtgccttagcttccagtgaccaggaaccataggtctaatgacaccacacttgcctcatttttatcttttaaattgtttttaattcttcttttatattacatccccaactgtagttcacctcccccatcccttccagtcccacctacctcctctctcccaaaaccacttatcctcaatttcccttggaaaaataaaacaaaaaacgtcccagcaggcctcccagggatatcaaccgaacaagactatagcaacatgatttaataagactagatgcaaactgtaatggcaaggttggatgaggtaacctagtgggaggaaaaagggtcccaagggcaggcaagagagtcagagatagccctcactcccactgtgaggagacccacaagcacaccaagctacacaagcaaaaggtatataatatgcagaggacctagcacagacccatgcagggtccgtgaaagtgacttcagtcttagtaagccccctgtcagcccagcttagttgattctgtgaaccctgtttccatggtctcctcaacccctttgtctcccacaattcttctgcccccttcttctgtggggtttccctggctcagcctagtgttaggcatctgttcccatcagttgctggatgtgactctctggtgattgttgggcaggcattggtctatgactatagcacaatatcattaggaatcatttcattgacttttttttttagccagttgtgtttggaggcagatgaaggccttgtagaggaagggttggctgagtgggtgactagagtggaccaagggacagagactaggtagggatgcattctagatggcaaaaccaagcctcactatgtaactcaggcttgccttgaatttacagacctcttcctcagtctctgtagagtgctggggttataggtgcgtgttgtcaaatcagctttaagatgctgtgtgtcttataatatgtaattataaatatggacatatttatatgcacatagatatgtagcagtgaaatatatatatacacacatacactaaaaacaaataagtatacagcaatttgatacaacaaatgtaggggttgactttgaactcctgatcctcctgcctctacttcctaagtgttaggattgaaggcacacagcaccgttgtctgtctacctggctttgaggctgctatataagcagaggaccaactgggctacagccttgacctcataaatgagttactctctcgctcctgactctgctcctgctttgtgtggaggtggcatgattcctggcactctggggtcagtcctgagcagcaatcacatgcatgcccttcgttttgttttgtcttgttttgttttgtttgtttgctgtccttcttgcttatttcttggtaagacatttcaaatgcccttttgaaagaggtagctctgactcccttgggatcctgctttgcccctgttgatgctaggtcctcccgctaggtccccagctctcccccttcacgttgcctctcttggagaagctgcttgcagttggtaatgcttgtgactccgatttctgcagagtgggtacagtcaagggtgacctttggggacctgctgctttttgtcccagttcattgcaagacttatcacacgcattgctatatcagcagaaacaaaaagggcctgtgtacatgttaataagattaattcatgaggctgtagagatgactttgcagttaagggcacttgcagaggacctgagttcagatcccaggatctatgtcaggtggctcacaaccttctgtgactctggctacaggagatctgatgctgccttttggcttctgctcacactcacacacaggacaaatacacagctacacatacatacatacatacatacatacattcatatcctaaaaaaataagattaaattgggactggagagatggctcagtggttaataatgcatacagccgttcttgcagaggacctgagtttagttcccacaacccatgtccagtggtttactacctggatcctgcaactccatgtccaaagaatctgacaccctcttctgagggtatctgtactcacatgtccttaccacgcacacattcatttataaatgaataaaaataacaatatatatatatgtatatatatatatttggtttctcgagacagggtttctctgtagccctggctatcctggaactcactccgtagaccaggctggcctcaaactcagaaatccacctgcctctgcctctgcctctgcctcccaagtgctgggattaaaggcgtgtgccaccaccacccggccgacaatcttttaaaaaaagattaaattataagtgttaggcacgtggttaagtgctatgcaaatgatggttattagtatttgctgtgcatatattttacaaatgggagacatttattggaagtgggctattgagtatttttctatttttgtgctgtgggtccattattggatgtgtatttgtgctatacccaggaatatacccaggagtttcatgtttccattttctgatggagccactgaattgggtggaacaggctaagctactccagctgagctgtgctgtcctagggagcgcccagtgcattctcaagtgcttgagtgccttttgcataccttgccacacccagcctctcacctggacttcctcactctcttcccatagaaggatttgcttctcagtgagattcccaacagtacttcttcagtctgctccaggaagaccagcatggggaaggcagtggtgaaagagatctgccagagacatgtggagaagagggcagggctgctgcctgaggcctgtgaggaagcctgggccaccgctgtgagtgtctgcctgcggaggcgcaatgccagcgtggaggaggtgagctctctgctgcctgctgccttacctagaaggcctcacgtgctggggctgcagtaagccaagtttagccttgatcgttcacagtaaaacccactggggccattgcagcaatcagggttgcagtgtgggtaatgcgggaccctgagggtgggtgtgtctggctgggctgcagggagcacaggatggaacctagaaatcagggttgctgtgtgggtcatgggggaccccaaggttgggtatctggccggagcctcttgtaggagcccatctcttcctgtctttccttggcctgctttctctcctggtctgtaactgccctgtggcatttccttcacccttttggagagaatggcttggagttactcacgtggtcctaagctgagctggaatgagtgccccaaatcctctctctaactacagaggagcagtctgtctgagcaagccgttcccgtcctgctatcttggagttcctagtctttgcatgagagttgtctgtgtggtaggcactggaatggtgtatgacaggactctacatctaacctggcagggaactaagcccagacttaagagggctcctggaggcccagtaggattttcccaggtcactaaggattgcagtacacaagcagatacaatcagatgtgatctaaacagccaccnnnnnnnnnnnnnnnnnnnncgtgcaccggcttatttagtttttgtgtattgtgtgtgttcttgtacatggaagttccacagggacttgtgagagtcagttctttccttccaccgtgtgcattctgtggatggaacctagctccctaggctcagcaggatgcacctttctagggtggactcatcttgcctctccctgcttcaacttttatcttttaacaggatctcacactgtagctcatggtggccttgaacttgaggcagttctcctgcctccatctcctaggttctggtattatgagtgtgagccgacacctgcttgtctatttttcagatgatagctcttggctggctttgaacttcatacttagcatggtggctatgaattcctgaagctgcacccgcttctcaaattctaggattataggcttcttttatcccattagactctgatacttttatatttataaaaaaaagtccacagcagctgggtgtggtggcacactgctttaatctatcagcacttgggaggcagaggcaggcagatgtctgtgggttcaaagccagccttgtctacagagtgaatttcagacagccaggactctgtaggaagatactattaaaaaaaaaaaaaggaaagaaagaaagaaaaagaattattgtgattgtgtgcaaaataaatgaattcatatgggattttaaaattaaattcagaagtagaatgtgtgtgtgtgtatgtatgtatgtatccttgtgtacatatatgtgtacatgtacatatgccatgacacagatgtcaaggtcaaagaataacttctccttctaccctatgggtcctggaactcagattgtcagtcttggcagcaagcacctttacctactgtgctatctcaccagcccatacactgagttgttttgcaaggcacagaggaattgaaatgttcttattcagggtgagcagtatgtatggcgagcaggtcagtggcctgggatgctgacccagcagctgaagccgctgcttaaggccagctcgggctacggagtgagttcaaagcctggatgcagtgtaaggagctcctagctcagacgtgagacaagggagaaggtcccaatgtagctccatgtagcacgtttgcctggtacccccgcccccaaggctctgcaatcaactcaaggtcacagacacttgcccacacctggcccagtctttgccatcagaagtctggggtgcagtgattggaccgcctgggctcacacattcatctgcagcaggcatttgattataattcccaggagaccatgtgatggccttcggcctttgaaaggaccggcatggacgcaagacattcccagaccaagcactcagcacaaatgagatttatttccccagaccagcaagcagggggtgaggggtgggagaggttataaaagtagcagcagcagcaacagaaagaaaaacaagcagacaagagaagcaagagagggtgtttctgtgggagtggggggtttaagggatgtgtgtggagggaggggggaaatgtgtctgctagggtgggttggtatatcctgactgagcatattagccacaaaatgagttttgatagttggactttggtgttttgtcttaggaatgaatcagtgaccaaataagggaatagcttgagggccagctttaggaatgtaatggttgttaagcaagagagaggaaaccggggtaaaaggtcaaaacctgtctgcagtgtttgctctgctggggggaggggctgggtttgccttgcgtgcttatctctgctagagccccttcagctttagtgtcagcgactgatacggctgcttgtctgtctcctcctccaaggcacgagtctccctggccggggtggaggagcaactccgagggcagctgtcccttccctggagcagggtttctgaggccacaggctcatcttccaataccccggaggaaacagatgacgttgacaattccagcctcagcgtcccttctttggttatgatggcatcgtgcccaggggctgcctcctctccactcttcacgggacatggagcagcacagccatccaccagtgggagacaggaggctgactcctcgtcagaggcttgcacaggcccacagacaccccagaacggtaagcttgggagggtgaggtgcccatgctgaatcactcctgtgaccctaacttaggccatccctcctctcttttcctaattcatggtttttgttagtaattcaggcattcactgcacagtggacacacagagaggaagttcagcacaccagtgactattgtttccgaccactctcctgcctcttagactttcacacctccatctttgtactgcgccttggtcatacctacttcccatttgctaggacagctgtgtggcggtcctcagctttgttccacgcatgtctctggctcactacttctttttttttattttattttggtttttcaagacagggtttctctgtatagccctggctgtcctggaactcactttgtagaccaggctggcctcgaactcagaaatccgcctgtttctgcctcccaagtgctgggattaaaggtgtgcgccactacgccccgctctcactacttcttcttccaggatccagagagagagtgatatttactgaatttttttaagtttaaaatctgattttatgtgtatgggtgttctgtctctgtgtatatctgtggaatgcatatgcacagtacctgaagaggcaagacagcctgaaactggagttgcagatgattgtgagctaacatgtgggtgctgggaatcgaacctgagttctttggacgaccaagcagtaaatgttcttaactactaagccatctttccagtccccagattttaatttttttgatgcatttttgcagtactggactggatgtagggcctcattttgtgtgtgtgtgtgtgtatacatatatgtatgtatgtatatatatatatataatattatatattatttacacacataatataggatatataatatataatacttctatatatatataagtaatctatttttttttttaattttgagagatcatgtgtctcgtgtagcctaaaataatatggaccttcctatatagctgaggatgcccttgaactcctgatcctcctgccttcacctcccaggtgctgggctcacatgactggtaaaatggccagcaggttaaaggtgctgacatcaaagcctgacaacctgactatgtatgaacctggtttatcatacggtaaaaggagaagattgatgccctgacttctacaaacacaccttgtcatgtatgcacatgcccacgtaggtatatgtgtgcatgcacacatatacacacagcaaaggaaaaaaataattaaatagtttgagacagagtttcacctgggctatctcgtgaacccttgtctatttattttgggattgcaggtatatgtgccactatgcccttctagagtgggttataaaaacacactgcttggcacatacctgttgtacttaaaaccacttctctgggcccagcaggaccttgtgtggtccctcttgcctgcctctttttccttgccaataacttctaaagacaccctccatcactggcacttgggtccaaatatgccaggcttcctagtgaaataaaagttgaggcctttttgacgaggcatcaccaggccttgtgaatgtgactcactggtagtctagaccactccactggggaggaaggagaatttagaaactgttatgacctaagcgacaggcaccataaaatcatgccatgtgacagatctcacatggcccaatgtgccagagcagctccccagggatgctcttgtcctgtctctcagactgctccaactgggcccgcacactccttcccctagatggtcccacagcctggacagcagtaaagcagccagccctcccaggacttggccagcatctcaattttcttagggtcccctgttatgacattgctcttggtcaacaggaaatagttaaaagagcacagtgcctgactcctgcccaaccatcacccttttctagttcctcatttgtaatgaaacgaaaaaggagggatgttagcatacaggtgattccaccaggctcctcccagggacctagcaacagtcctcacgtgccactgcagccaggtgcttcaggtgcgggctgtgtatacaaggattgcccactatctagctctttctcctttctctctctgttaccatgtgtttctggacagtctctccccccccccnnnnnnnnnnnnnnnnnnnncctcccccaaataaatcaccttataccagatttgttgcttggtgtaacttctcaggggtgtgctttgtcatgagtccaccgggtacccccttgacgcattatatttcataacagaaatagctatgattattgttgatggccacacttctcccatgactgtgggaatatgggagcctctttgtggaaaaggtgtatatgtgtggtggggattgggggagccggagtgttagagtgtctatgggggagggtgcagacttccctgcaacggcataagctatgacatgctacttgtatttgggcctgtttcacaaacttggcatgagactctgataaggtctgactcagagaattttaacggcaacacttgctgaaggtactctctttctgttttctgctgaacatcagctacagagacttcatggaaaattgagatcaatgaagccaaaaggagactgatggagaacatcgtactctacaaagaagagagactggacagcagcgagctctttggaccctgatgaccagcgcacagctgaagacccttattctcaactggacagacaaacgtccaggcagggaagaggtctttggctgcccaaggtctgttgagacccacacaacccaaacatcagcctgaacagaaggaaacatggcttcatcagagtcgagttgcaggggggtgggggtaggggacctcagcttatacagacaccatatccaggaagcactcctcctctctgagtcgtcttagttagagggctgtgaagtggaacaccttgtatgtgatccaaggatttgggtggtttttgtggttccggggaacccacgttgttgaccaccccaagagatgctgttgcccccaaacctcttagttctccacaacggacagagcaatcctgcagcatccgtggcgttttccagagttatcatctgtcagtcatatttgtagacagctttctgcaaattcccacttcttaaaagacctacagccggtgtctccgcaagttctcaagttcaggactgcaaaagcaggacggttggcaaaggactccgtaggctttctccttcttcagttggtgatcctgtaagccaccggtatttaggaactgcctgcttttcaccttcgacctcccattgtgcccatatttattttaatggagactcagaggttgtgtgttatttatagctaggtgaagaagcatgagaaacagtctcatgtttgattctgctgctagttaagtcaatcacttggtgggtggtagctcagtatccttgtaagataaccctgctctgttctccctggggaagaacagagctgctctattcagctcttgggaggatgggtgcagcggctgcagaagcactttgaaaatgtatctgttctgtgttctcaatggagtaaaaggtatgtagttcatggctctgccatgtagaaaatgtttatgaagtgaatatatttttgaaaagtcatgttgcaaacatgttttgtaaaacaaagctatttctttctttttttttttgttttttttttgttttttcgagacagggtttctctgtatagccctggctgtccgggacctcactttgtagaccaggctggcctcgaactcagaaatccgcctgcctctgcctcccgagtgctgggattaaaggcgtgcgccaccatgcccggctaacaaagctatttctaattcactatttaaaaaaagaattccattatagtgacaaaataaaaatgtttgtaatc

SEQ ID NO: 562 - DNA, 3146 bp, Mus musculus
ggaagtcgcggccctccgccacaggctcagtcgccaggcagtctcgccatggcttgctacatctaccagctgccgtcctgggtgctggacgacctgtgccgcaatatcgacacgctcagtgagtgggactggatgcagttcgcttcctacgtgatcacagacctgacacagctgaggaagatcaagtccatggagagggtccagggggtgagcatcacccgggagctactgtggtggtggtccatgcggcaggccacggtccagcagctggtggacctcctgtgtcacctggaactctaccgagctgcccagattgtcttgagctggaagccggttcctgagagcacatctcccctcccagccttcccagaggctgtgaagccaggggctgtggctacttctagaagaaacctcaaggatgaacaggagaaagtccggcctgtgaagccacgttcccttctagacacagggcccatcatggctggggcccagcggcagcgtccgtgcgagatggatgccccttgttccctgaaaactgatgcacccgactctccccagtctaagtattgcagtacttccacatctgcccccaagcaagaaaggcttttgggtttgcccggagacaggcttttctggagtgaagcagatgtcgtccaagcaactgaggactttgaccaaagccaccgaatcagcgagggcacctttgccgatatctaccagggtcaaaggaacggtgtggccttcgccttcaagaagctcagggaggtggccggctccagtccagggtccatggacagattcctacaggcagagatgcagctctgcctcagatgctgccacgcgaacgtcctacctctgctgggtttctgcactggaagacagttccacagcctcatctacccctacatggcaaatggctctctgcacgacagactctgggctcagggcaactcagacatgctgccctggccacagcgggccagcatctgctcagggctgcttctagccgtggagcacctgcatagcctggacatcatccacagcaatgttaagagtgccaacgtcttgctggaccagcatcttaaccccaagctggctcatcctgtggctcaccctcatcccgacaataaaaagaccaaatataccgtcatgaggactcacctgttccaggcctcagctgcatatctgccggaacacttcatcagagtggggcagctgaccaagcaggtggacatcttcagctgtggaattgtattggccgaggtccttaccggcatccctgcgatggacaaggaccgcagtccagtttacctgaaggatttgcttctcagtgagattcccaacagtacttcttcagtctgctccaggaagaccagcatggggaaggcagtggtgaaagagatctgccagagacatgtggagaagagggcagggctgctgcctgaggcctgtgaggaagcctgggccaccgctgtgagtgtctgcctgcggaggcgcaatgccagcgtggaggaggcacgagtctccctggccggggtggaggagcaactccgagggcagctgtcccttccctggagcagggtttctgaggccacaggctcatcttccaataccccggaggaaacagatgacgttgacaattccagcctcagcgtcccttctttggttatgatggcatcgtgcccaggggctgcctcctctccactcttcacgggacatggagcagcacagccatccaccagtgggagacaggaggctgactcctcgtcagaggcttgcacaggcccacagacaccccagaacgctacagagacttcatggaaaattgagatcaatgaagccaaaaggagactgatggagaacatcgtactctacaaagaagagagactggacagcagcgagctctttggaccctgatgaccagcgcacagctgaagacccttattctcaactggacagacaaacgtccaggcagggaagaggtctttggctgcccaaggtctgttgagacccacacaacccaaacatcagcctgaacagaaggaaacatggcttcatcagagtcgagttgcaggggggtgggggtaggggacctcagcttatacagacaccatatccaggaagcactcctcctctctgagtcgtcttagttagagggctgtgaagtggaacaccttgtatgtgatccaaggatttgggtggtttttgtggttccggggaacccacgttgttgaccaccccaagagatgctgttgcccccaaacctcttagttctccacaacggacagagcaatcctgcagcatccgtggcgttttccagagttatcatctgtcagtcatatttgtagacagctttctgcaaattcccacttcttaaaagacctacagccggtgtctccgcaagttctcaagttcaggactgcaaaagcaggacggttggcaaaggactccgtaggctttctccttcttcagttggtgatcctgtaagccaccggtatttaggaactgcctgcttttcaccttcgacctcccattgtgcccatatttattttaatggagactcagaggttgtgtgttatttatagctaggtgaagaagcatgagaaacagtctcatgtttgattctgctgctagttaagtcaatcacttggtgggtggtagctcagtatccttgtaagataaccctgctctgttctccctggggaagaacagagctgctctattcagctcttgggaggatgggtgcagcggctgcagaagcactttgaaaatgtatctgttctgtgttctcaatggagtaaaaggtatgtagttcatggctctgccatgtagaaaatgtttatgaagtgaatatatttttgaaaagtcatgttgcaaacatgttttgtaaaacaaagctatttctttctttttttttttgttttttttttgttttttcgagacagggtttctctgtatagccctggctgtccgggacctcactttgtagaccaggctggcctcgaactcagaaatccgcctgcctctgcctcccgagtgctgggattaaaggcgtgcgccaccatgcccggctaacaaagctatttctaattcactatttaaaaaaagaattccattatagtgacaaaataaaaatgtttgtaatc

SEQ ID NO: 563 - protein, 622 aa, Mus musculus
MACYIYQLPSWVLDDLCRNIDTLSEWDWMQFASYVITDLTQLRKIKSMERVQGVSITRELLWWWSMRQATVQQLVDLLCHLELYRAAQIVLSWKPVPESTSPLPAFPEAVKPGAVATSRRNLKDEQEKVRPVKPRSLLDTGPIMAGAQRQRPCEMDAPCSLKTDAPDSPQSKYCSTSTSAPKQERLLGLPGDRLFWSEADVVQATEDFDQSHRISEGTFADIYQGQRNGVAFAFKKLREVAGSSPGSMDRFLQAEMQLCLRCCHANVLPLLGFCTGRQFHSLIYPYMANGSLHDRLWAQGNSDMLPWPQRASICSGLLLAVEHLHSLDIIHSNVKSANVLLDQHLNPKLAHPVAHPHPDNKKTKYTVMRTHLFQASAAYLPEHFIRVGQLTKQVDIFSCGIVLAEVLTGIPAMDKDRSPVYLKDLLLSEIPNSTSSVCSRKTSMGKAVVKEICQRHVEKRAGLLPEACEEAWATAVSVCLRRRNASVEEARVSLAGVEEQLRGQLSLPWSRVSEATGSSSNTPEETDDVDNSSLSVPSLVMMASCPGAASSPLFTGHGAAQPSTSGRQEADSSSEACTGPQTPQNATETSWKIEINEAKRRLMENIVLYKEERLDSSELFGP

SEQ ID NO: 564 - DNA, 98982 bp, Homo sapiens
caggtgagattacaaccctcatttcagagaaggtcctaccccataccctgggggaaggaatggtgacatcataaagcctcgttaaaacccatgaggacagtggagagtgtcaggatagctgaactacgtgtagaggttcctggagggtggtgcgcccagggaggggacagaagctctgcgccccttatcccataccttggtgtacgcatctcttcatctgtatccttcgtaatatcctttatgataaaccaggtaggccgggcgtggtggctcacacatataatcccagcactttgggaggctgaggtaggaggattgcttcagcctgggagttcaagataacatcatagtgagatcctgtctctcctagaaaaaaaaagaacaaccaggagtggtggcgcatgcttgcagtcccagctgttcagtttgcactccagcctgggagacagagcaagacctgctgtctcaaaaaaaaaagactggtaaacatttttcactgagttctgttagccactccagcaaattaaacccaaagcgaaggtggtgggaaccccaacttgaagctggttggtcagaagttctggagccctaaacttgctactggtgtgtgggtgggggcagtcttggggactgaggcctcaacctgcaggatctgatattatttccagaaagatggtgttggaagtgaattagaggatacctaattggtgttcactgcagaattgattgcttgctcgctctcgggaagaaatctacacatttggacacgaaagtgttctgggttggtattgtgttagtgtggaatctagaggaaaaacagtttttctgaaacagaaaggtaaatgaatttcgcctttagacttgggtcccatcctcaagatacctcatatatatgcacatattccaaaatacaaaaaaatctgaaattggaaacacctctggtcccaagcatttccaatgagggacattcaacttgttcccctttctttcggcacacctaaactgcctgccccaacaaaacattttcttgtccccaccccttaccacacatacccagtagtccattggcaggtcacagaaaattgaggtacacgtattatggtcatgagaaggattgggcagtagcactcaatgtatgagagggagaaaaacccacaaaacttatttcaaaattcaaaacatgaaaccgcaggaaaatataagtctgtttgacatacaaactaatggcagtaatctctctccctgtctgtcagaaggaaaaacacgaaagattgtttcgttccaattgggaaaagttgaatcctgggggcctggagctggccccacagatgctgataacagagctgaggttactgaaaggcttgggggaagtcctgttgaaccatttcatcttaacataagttggaggagacttaattgggcaaaggacagtttagcaatttgcttgatggggagtgacatgagttgatggatcttcccttgtaggagggtgttcattacctaggcccaacccaagaattttgagaactcttgttgtagctattccatgctcagaaacctctgataggaactgtggtaagggctcgtattagtctgttctcatgctgttatgaaggaatacccaagactgtgtaattaataaagaaaagaggtttaattgacacagttgctcacagctggggaggcctcaggaaacttaacaatcatggtggaaggcacctcttcacagggcagcaggagagagaatgaatgccagcaggggaaatggcagatgcttataaaaccattagatctcatgaaaactctgtcaccattggccagacgtggtggctcacgcctgtagtcccagcactttgggaggccgaggtgggtggatcacaaggtcaggagttcacgaccagcctggccaaggtggtgaaaccctgtctctactaaaaatacaaaaattagccaggcgtggtggcgggtgcctgtaatcccagctactcgggagactgaggcagagaattatttgaacctgggaggcggagcttgcagtgagccaaggttgtgccactgcactccagcctgggcgatagagtaagactccgtctcaaaaaaaaaaaaaaaaaagaaaactctgtcaccatcatgagaacagcctggggaaaattacctcccatgatttgattaaaccctcccatgatatatggggattacaattcaagatgagatctgggggggacacagccaaaccgtatcagggctgttccagcaggtctggattaccctggcgtggagcaactccaagcagtagggaggattttgagaaggtctagtgtgcctctggggcagctgttttccaaatactcgtttatacttggcagcctccaggatttccacccccctgatagatgcagaaagcagatccctctggaacagactccagtattggaaataaatgtacatgtatgggagattgcccaaattaagtatggcactcctaaataagccattaaaaaggatagggggccaggcgctgtggctcacacctgcaatatcagcgctttgggaggctgaggctagagaatcactggaggagagtttgagaccagccttggcaacatagtgagacctccgtctctaccaaaaaaaaaaaaaaaaaaaaggtaaaaagaataggataggatagaggtttactcatctttctgagagagaaagagtagccacttttttttttttttaatttttttcttgagagagaatctcattgtgttgctgaggctggagtgcagtggcgttagctcactgcaacctccacctcctgggttcaagcaattctcctgcctcagcctcctgagtagctgggattacaggtgcacgccaccatgcctgtctaatttttaatatttttcgtagagacagggtttcaccatgttggccggctggtctcgaactcctgacttcaagtgatctgctcgccttggcctcacaaagtgctgggattacaggcatgagccaccacacctggctgaaatttttattttttaaattataatagagacagggtcttgtcatgttgcccaggctgctcttgaacacctgggctcaggcagtcctcccgccttggcctcccaaagtgctgagattatagataggcatgcaccaccacacctggccttatgtttgtttttcttaaaattttttttgtttgtttctgtttttttgtttgtgcttttttttgccttttttctttttttttttctttctttctttctttttttttttttttttgagacagcgtctcactttgtcacccaggctggagtgcagtggcgctatctgggctcactgcaagccccacctcctggattcacgccattctcctgcttcagcctcccgagtagctgggactacaggcgcccgccaccacgcccggctaatttttttgtattttttagtagagacggggtttcatcgtgttagccaggatggtctcgatctcctgacctcgtgatccgcccgcctctgcctcccaaagtgctgggattacaggcgtgagccaccgcgcccggcctccttttctttttttttgagacagagtgttgctcttgtcgcccaagctggagtacaatggcaggatcttggctcactgcaacctccgcctctgggttcaagtgattctcctacctcagcctcccgagtagctgggattacaggcatgcgccaccacgcccagctaattttgtatttttagtagagataggatttctccatgttggtcaggctggtcttgaactcctgatctcaggtgattcgcctgcctcggcctcccaaaatgctgggattacaggtgtgagccactacacgcagccattttttaacagagatggggtctcactatgttgtccaggctgggctcctgggctcaggcagtcctctctccttggccttccaaagtgtttggattacaggaatgagccatggcacccagcccatcacaattttagatgttcatctttgctccagaaaatctagttttaggaatttaccttaagaaagaaaaaacaagtgtgaatagatgtatgtatatgaagtttgctgcagtattatttagaatagcataatactggaaataaaagtatactgataggagtttgggcacatatagtatggtgttcctaaataagccattaaaagggaaatagtactatgctcatataatgacaggaaaagctattaattgaaaaaaaaacagaaaattaaatgttaaaaaaatttttttttcaccatagtgtctgcaaaaaagaaaatatgtttaaaaaattggccagtcacggtggttcacgcctgtaatctcagcacttcggaagtccgaggtgggcagatcacgaggtcaagagatcaagaccatcctggccaacgtggtgaaaccccgtctctactaaaaatacaaaaaactagccaggtgtggtggcatgcgcctgtagtcccagctacctgggaggctaaggcaggagaatcacttgaacccggtaggcggaggttgcagtgagccgagatttcgccactgcactccagcctggtgacagagtgagactccttctcaaaaaaaaaaaaaaaatcattttgtataggactaaaaacatgtaaaaggagtatatactccaaacaataatggtgattcctcagggatgaggttatgggaaggtgtttgttttctctttctttctgtctttgacaaatatcacatgctatcagagaaaccaataaagatatttttgttaaaaaaaaatatagccgggcgcggtggctcatgcctgtaatcccagcactttgggaggccgaggtgggtggatcacctgaggtcaggagtttgagaccagcctgaccaacatggagaaacctcgtatctactcaaaatacaaaattagctgggtgtggtggcacatgcctgtaaccccagctactcaggaggctgaggcaggagaattgcttgaacccaggaggcaggggttgcggttagccaagatcacaccagtgcactccagcctgggcaacaagagcaaaactccgtctcaaaaagagagaaaaaaaaagaaaaatatatgcaaagtgcatagagaagctttattattctcctttcatcagtcttccctcctgctccagctttttttttttttttttttttttttttgatatggagtctcactgtgtcccccagtctggagtgcagtggtatgatcttggctcagtgcagtctccacctcccgggttcaaatgattctcctgcctcagcctcccaagtagctgggattacaggtgcgtgccatcacgcccagcgaatttttttgtatttttagtagaaacggggttccgccgtgttggttgggctggtctcgaactcctgacctcaagtgatccacccacctcggtctcccaaagtgctgggattgcaggcatgagccaccatgcttggcctctgccccagctttctgatatgactggttctcaactgtgccagcacatattagaattatctgggaagctttaaaaaacagtagtgcctgagccccactccagaataattgaatctgtctccctggaggtagggctaggcatttatactttttaaaagcaccccagatgtttctactgtgcagccagggttgcaaaccactgactataatttcaagggaattaaacttgaacagctcaaaatgacgtaagtgtgtaattaattacattcagcctcaataactgtttctaactgatcctggtgggtgttggtcatggaaaatagccagaggaagaaattaactgcaagatcagaggaaatttcttgtggtgaggcagtataacacagcagaaagagcatttgctttgggtcagacttgagttgcatcctgttgatgcgggacaggcaagcccccaaattggggtttagcctgggagggttcttagcttcacccagaaaggaattccagggccagccagtggtgttaaatagcaccttttattgaaatagcagtgtgcagccgcagcagaggtactgctccttgcagggtagggctactccataggcagtgtgcccagagtagtggctcagaggcagttctacagtcacatttatacacacttttaattatatgcaaattaaggggcagtttatgcagaacattctagaaaggggcggtgacttcttggagtcgccatggcaatggtaaactgacaaggtacactggtggcagtgtcttatgcgaggtacttcccaccacacctgttttagctagtcctcaatttggtccgatgtcccagccattcctttcgagtcgagtgctgccccctacctcactgtcacttggccaacttggcccagttacaattgacttcagcctcagtttcttcatctgtaaaacagaaacaataaacctttgcagggttgtatggattacagataatgtatgctaaatgcctgctaggtgagttggtaggtgaagggcaaccattagtaatagcaaagaccttactttgaagaacttattctaaagagtggtaactgagatgtgtccctgtgatgacctgctcaggcccaaaatgactcaagcttctctggaagacagaatcctaggacacagatcccaagccctgaggctggggtgagaaggaattgcgggaagggcctgaggatgcagcagagagagcagtgggggctcctctgccttccaggattgaccaaggctgaatgtgaaacttccgtggtcttaaagcctcaccccagggaagaggccctgtggcactgagggaggagctctacacacacgctgcttgcggaagagaaggagaagcaggtaggggactctgcaaaaagagaaaaggagaaaaagaagaggatctttattctcttttacccccgtgtgcctgggatggagatgcttctccacccagcctatggcaaacaatcattacagttcccaagtccaccttcagccactgctgaaaacacaggacttcacttgaaaagtagtctcagaacactgaaatatgtcccactttcaacatcaaggaggacataatagtaatcctttactgggctcagcacttcacagttgatcttgagcgttttggagtccatttaggcttcataacaatccttccaagtggctgcagcaggagatccagtttccaaaagggaaaacagaactggctcaaaggactaagagccggagagtggctgaaccaggtctccaaacttgataggactccaaggccagtgggtgccttttcaagaccactaatgacagctaccattttttgggcacattctctgtgcgaggaaagccctgtagtaggtgttctatataggctacataatttgatttattccactcccctcacaactctaagcagtaggaaggagcaggcccactttacagatgctggaaacaaggcttgacgaatgaaatgagttgtccagagtcacaaagcctgttggtggcagaactgcaacttggccctaggacttctcactttgatttcagcttcctccttttgcagcgctactccatagctgacggccacagctatacagtggtacctactctagttacttatctgcccttcgtgacctcgcctaacctcttggaatctatttacttctgtgtaaaatggggataataatatctatagtataggcttgtaagaatgacataagatcatttttgcaaagtacattgtagatacagataaatgtatctgtatctacaatatactttagccagtggtgatggagagcctggggtcagaatacttaggttcaaatgattttagccatattatttaacctctctgtgccttagtttccttatttgtagaatggggctataaccatacctacctcagagggtcattgtaaggagtaagtaaagtaacccaggtgaaggctacacatagtaagtgctcaataaatactagctattttatatatgtgtgtgtgtattttatatatatatatatatatatatatatatatatatatatatatatatatgtatacacacactataaattctgttccttgtaccctctttgtttatttagagacagggtctcactctcacccaggctggagtgcagtggtgcaatcttggctcactgcaatctccacctcctgggctcaagtgatccccctaccttagcctcccaagtacctgggactacaggcacatgccaccatgcctggctaatttttgtagagacagggtcttgctctgtttcccaggctggtctcgaattcctgggctcaagcgatctgcctgcctctgcctcccaaagtgctggggttataggtgggagccgccgcacccagccccttataccctatttaataatccagtttgtcctgcagtcccctgcaccatactctgcttttttcccagtaatagtatcatctaagataatgcaattggccacttgcactcccttttaccaccctctacttttattctttcttttctttctttttttttttttttttttcagagacagggtctcattctgtcactcaggctgcagtgcagtcatagctcactgcagcctcaaactcctgggttcaagagatcctaccaccttagcctcctgagtagctgggactataggtgtacactaccatgcttggctcattttaaaattttttgtagaggccaggcgtggtggctcatgcctgtaatcctagcactttgggaggccgaggcaggcggatcacgaggtcaggagttcaagaccatcctggccaacacagtgaaaccctgtctctactaaaaatacaaaaattagctgggcgtggtggcgcgtgcctgtaatcccagctactcgggagactgaggcaggagaattgcttgaaccgggacctgggaggcagaggctgcagtgagccaagattgcgccactgcactccagcctgggctacagagcaagactccgtctcaaaaaaaaaaagttttttgtagagataagatcttcctatgttgcccaggcttctactttcattctccaacatagcttatctgcctatttttattgcttgttgtctgtctccctccaggacaaggattttgtccttctcttcagaggtattcccagcacctacaacagtgcctggcacatagtagctgcacgatacatattagctactatagtaaagtctacctgactaccctatttaatagaatattccccatgctcaatctgaattcctgattccctttaaccaactttttttccttttttttttttttgcaatagtgcttattacctttaagacactctgtaacatactatatttattatttattgttagtctttctctccacacctagattgtaagtcttatgaaagcaagggcttttgtaggctttttttttttttttctttttttttgagacagagcctcactcttcacccaggctggagtacaagggcacaatctgggcttactgcaacctccgcctccagggttcaagcgattcttctgcctcagcctcccaggtagctgggactacaggcgtgcgccaccgtgcccggctaatttttgtatttttggtagtgacggggtttcaccatattggccaggctagtctcgaactcctgacctcgtgatccgtccgcctcggcctcccaaagtactgggattacaggagtgatccaccgcgcccggctgtagggtttcttattcaggtattaccaacacctagggagttgcctggcatacagtaggtaattaatggagtatttgatgagcgcatgatgcatggtgtagtgccgatggaagtggggtcagaaggcctcctgccgctgcggcagaattcccgtgtggccttctcccaccagggcctcagtttcccctcgcagttccgattctctggccggcgctggggtggagccggcggggccgtcgtgccgcccgtggccgctggggacgctggtgccctcccgccccgcccacttccccgccggtccgcccctggctagagaagccgcagcccgcagtgtccgacccagtcgtcccgcgccggagccggccccgtagcgtgccatggcctgctacatctaccagctgccctcctgggtgctggacgacctgtgccgcaacatggacgcgctcagcgagtgggactggatggagttcggtgagtgcggcccggggaggggaggggaccagggcgaccggagcccccagcgatcccgcctggagcggccgccaagctccctcgggcacccgggttcagcgggtcccgatccgagggcgtgcgagctgagcctcctggaccgggtccgccgcggacctcggcctgtcacctgaaggtgccgcgtggtctctgaggacgtctgtcgacgagcaggggccgccgccactgcgctctgagtccagagaacggtgggtacgggggccctcctgtcagcgctgctggctcggtgacgtccccaggtggcctctcatccagcccacaacagcctgcaaagtgcgagcctcgaccctgtagggacccacggtgctgtcacttcttgggggggtgtgtgtgtgtgtgtgtgtggtgtgtttagttttagtgtatattagaaggatctatgatttaacatatatatatatattgaaacggagtttcgctgttgttgcccaggctggagtgcaatggcacggtctcggctcactgcaacctccacctctgggattcaagcgattttcctgcctcggcctcccgagtagctgggattacaggcgcccgctaccaccctggctaattttttgtattttcagtagagaccgggtttcaccatgttggccagactggtcttgaactatttttttttttttttttttttttttaagacggagtctcactctgtcgcccaggctggagtgcagtggcgcgatctaggctcgttgcaagctccgcctcccgggttcacgccattctcctgcctcagccttctgagtagctgggactacaggcgcccgccaccacgcccggctaactttgtattcttagtagagacggggtttcaccgtgttagccaggatggtctggatctcctgaccttgtgatccgcccaccctgggcctcccaaagtgctgggattacaggcatgagccaccgcgcccggcctccggaactcttgatctcaggcgatccacctgcttcggcctcccaaagtgctgggattacaggcgtgagccactgtgcccagcctatttatcatatttgtgattaaatgtactttaccattatagttttaaaatcagatatttacttttagtgtacattgttttgatcacagtatttatgactatcaacctgttttgagatcagatgtgtcctaatagattcagtgtgtataatggggcctaagcacaagcacttactttcactctattgcaaggtgcacagttctagataattccgtgggaaggcactcagacagcctccatatgttttgtttgttggtgcctgacggatgactggcggagagggccatggactctgcggggaggccgcttgcctgttgtctctgctttccaggtggagatctgcattccaggctcttgctgtatgactttgggccagtttgttaacctctctgagcctcagcttctgaatctgtatgtaaactggagatgataattatagcttcttcataaagttgtgaggaatgaaaatactgtataaaagcactgacacctaagtgttaaatattcttataagtcataagttgtaatattctcttttcatttttatttttttgagacagtctcattctgtggcccaggctggaatgcagtggcgagatctcggctcactgcagcttccgcctcttggattcaagtgattctcttgcctcagcctcccgagtagctgggattacaggcatgtgccaccacgcccactaatttttatgtttttagtagagatggggtttcgccatgttggccaggctggtctcgaactcctgacctcatgtgatttggccgctttggcctcccaaagtgctgggattacaggcgtgagccactgctcctggacctggcttcactactttgaatgtttcctgggcagtgaacaaactttgtgtgagactccctctcattttttccacattggcccagccctcagttacaaatgccagaacaacttctgtttctaggaaattcaattagaaggcatacctatgacttaaaaaaaaaataaagctttactgagatattcacataccatacaatccacctgtttcaggagtacaatttagtggtatttagtatattcacagggctgtgtatccatcttcacaatcaatcttagaacattttaatcacccgaagaagaaactctgtacccgttaacttccaatcccctccttccattttcctgagttttagacattgcctattttggacatttcatataaatggaatcatataatatatagtgctctgtgactgacttgtttcaactaacatgaggttcatccatgttgtagcatgcgtcaatacttagtttcttttttttttttttgagacggagtctcgctttgtcacccaggctggagtgcagtggcgcaatctcggctcactgcaagctccacctcctgggttcatgccattctcctgcttcagcctccctagcagcttggactacaggtgcctgccaccatgcccggctaatttttttgtatttttagtagagatggggtttcactgtgttagccaggatggtcttgatctcctgaccgtgtaatccacctacctcggcttcccaaagtgctgggattacaggcgtgagccaccgcgcccagccagtttctttttattgtaggataatgttccatggtatggatatactacatttcattcatttatcagttgttgggcattgggttcttttcacttttgggccattgtgaatagtgctgctgtgaacactcacatacaagattttgtgcagtggtgcaaatgtagctcaccgcagccccaacttcctgggctcaagcgatcttcctgtctcctgagtagctggactacaggtgtgcactgctgcacccagctaacttttgtattttttgtagagacaggtttcaccatgttactcaggctgatcttgaactctggagctcaagcgatctgcccatctcaccttcccaaattgctgggattacaggtgtgagccactgcatctggctttatgtttaactatttgaggagctaccagatgttttctaaagtggctgaaccaccagtgtatgaggatgaccatttctccacatccttgtcaacatgtgttatttttttctttttttaatttttttttttttgagacagagtctcgctctgtcgctgaggctggagtgcagtggcatgatctcggctcgctgcaaccttagcctcctgggttcaagcgattcttgtgcctcagcctcccaagtagctgggattacaggcatgcaccaccgtgcctgactaatttttgtatcttcagtagagacagggtttcaccgtgttggccaggctggtctcaaactcctaacctcaggtgatctgcccgcctcggcctcccaaagtgctgggattacaggtgtgagcaccatgtccggccttattgttgcttttttgatggtagccacctgagccagtgtgaagtggcatcttactgtggtttgatttgcatttccctaatgactaatgctgtggagcatcttttcctgtgcttgttggccatttgcacatcttctttggagaatacctctgcgaggctccccactgggatggatatgatctgaacaccttgccaggcatgttgactctgacacatctgcccagtgctggcctctctgacctcctcttcttccacacccactgtcactcccctgctccagccacactgacctccctgggccagacacagggtctttgcaggtgctgttccctctgcctgggacgttcttccccctgtgttacctggggctagctttctagtctattagtttcctcctgttgcagttatagattactacaatatcaggggaaccagcccgcagtatttcaatgtaggttcttttctattttccctaagtgtcggccggtctgagaaataaagagtacaaagagagaaattttacatctaggcctctgggggtgctgttacacattggtaggaccgtgatggtgaccccgagccacaaaaccagcgagtttttattagggatttcaaaaggggaggggtgtacgaatagggagtaggtcccagagatcacattcttcaaagggcaataaaagatcacaaggcaaaggtgaaattagaattactggtgaaggtccatgtcccactgggcacgcattgtcttgataaacatcttaacaggaaacagggttggagagcagacaacccgtctgactagaattcaccaggctggaatttcccaatcctagtaagcctgagggcactgcaggagaccagggcatatttcatcccttatctcaactgcatcagacagacacccccagagtggccatttatagacctaccccgggaatgcgttccttccccagggttatcaattattaatattccttgctgggaaaagaattcagcgatatttctcctactcacacgtccatctataggctctctgtgagaagaaaaatatggctctattctgcccgaccccacaggcagtcagaccttatggttatcttcccttgttccctgaacatcactgttattctgttctttttcagggtgccctgatttcatattgtttaaacacccacgttttacaatcagatttcatatttttcaaacacacgttttacaaacaatttatacagttaatgcaatcatcacagggtcctgaggtgacatacatcctcagcttatgaaaatgatgggattaagagattaaagacaggcataggaaattataagagtataaatgtccataaaatcttcacaatttatgttcagagattgcagtaaagacagacgtaagaaattataaaagtattaattttgggaactgataaatgtccatgaaatcttcacaagttgtattcttctgccgtggcttcagccggtcctgttcggggcccctgacttcccacaacactacaaagttggtggcctgtaacacctcaagtttattatctcagcattctggaggtcagaagtcctaactcagggtggctctagggaggagtcggtctcctggccttgactggcttcctgaggcctgcagcatcctgtggcttatggccccttcctccatcatcaaggccatgggtgtgtatcatcacatctgtctctgtgacttctgcttctaccatcacctcatctctgaatctgatgttctggcctcccccttacagggaccctggtaattaccttggccagacccagagaatccaggataatctcatctcagaatccttgatttaatctaacctgcaaagtcccttttgctatgtaaggtaccatattcacaggtctcggggcttaggatgtggatgttttccaagggtattattctgtctgtcacagtccttcaggtaagctcctgtggcacctctttgaaatcaagaggactttcctgcccctgttcctctctagcccatcaccgtgtttcatttccctcattccgcttcacagcctttgatgtcccctcgttcctgaattttttccacctgtctctccctatggaatggaagccccgtgcgggcaggggccttacctgtctagtttttcactgctgtattcccagagcctgggacagtgcctggctagagggcaggtgccagaatgaatgatgagctgccaggccttggtgtggtgaggatgcgggctgcccactcttacccattggagctggcctggagcctttggtcagcccacttcctacactggatcagagccagcggtgcctccggcccactgctcctcgcccagtcccagtgctccagttccctcttcagctgaatgaacgagtgactgtgattgacccttcagtcctaaaaattcttggcttcctgtgggtcattttagaaagaagacagtccctcagagctgatggtgatactgggagagtgtagtgagaacgctaaagtgattcagaagatcccgcagccacagacagccacgctctttcagatccgacacttgttggcagataatctggccacgcctagttcttgtctccgtgatggcagctgcctctgttgggctttgcctgagcctgtgtaaaaagggtttcctacagcttcagccccaggtgtgtgcagaggggctcggcgcaggggctcttctgtgtgtggccgttccccgtctcgttcactcatgcgtgtgccagcctttgtgcacagccctgctttgccctgcccagctgtgtgacatcaggcaggtgactatctctctctgagcctttagtttcctcatccatgaagcaccctcacagtgttgctgagaggcttaggagactcagcttattgtaaagggtcaagttagggctttcctcatcccccacccagggaggggtgtgggcattcgattctaagatgggtcatttcaggaggctgtgccatccctgctgtggaggactttgaagacaggcaaggttttctactgcctcgggtgaactcctgcaggattcaggaactcaagagtgatagtccctgtactgttaatcatcagggataaaaacattttcaggccaggtgcagtggctcacgcctctaatttcaacactttgggaggcctaggtgggaaaatttcttgaagccaagagtttgagaccagcctcgtgatccgcccgcctcagcctcccaaagtgtttggattacaggcgtgagccactgcacccagccttttttttttttttgagacggagtctcactctgttgcccaggctggagtccaatgatgcaatctcagctcactgcaacctcggcctcctgggttcaagtgattctcctgcctcagcctccagagtagctgggactacaggcgcccgccaccacactctgctagtttttgcattttcagtagagatgggctgggcgtagtggctcacggctgtaatctcagcactttgggaggccaaggtgggaggaccacgaggtcaggagttcgaaaccagcctggccaacatggtgaaactctgtccctactaaaaatatgaaaattggccaggtgcggtggctcatgcctgtaatcctagctctttgggaggctgaggtgggtggatcatgaggtcaggagattgagaccatcctggctaacacagtgaaaccccgtttctactaaaaaaaaaaattagccgggcatggtggcaggcgcctgtagtcctagctactcaggaggctgaggcaggagaatggtgtgaacctgggaggtggagcttgcagtgagcagagatcgcaccactgcactccagcctgggcgacagagcgagactccgtctcaaaaaaacaaacaaacaaaaaattagccaggtgtgatggcactcgcctgtaatcccagctattcgggaggctgaggcaggagaattgcttgaacctgggaggtggaggttgcagtgagctgacatgtgccattgcactccagcctgggcaacaagagtaaaactccgactcaaaaaaaaaaaaaaaaaaaaggccgggcgcggtggctcatgcctgtaatcccagcactttgggaggccgaggtgggtggatcacgaggtcaggagtttgagcccagcctggccaacatagtgaaaccccgtctctaccaaaaatacaaaaattagctgggcatggtggcacatgcctgtagtcccagctactcgggaggctgaggtaggagaattgtgtgaacccaggaggtggaggttgtggtgagccaagatcgcgccactgcactccagcctgggcaacagagcgagactctgtctcaaaaaaaaaaaaaaaaaaaaaaaagtagagacggggtttcatcatgtcggccaggctggtctcaaactcctgacctcgttatccgcttgccttggcctcccaaagtgctgggattacaggcgtgagccaccgcacctggccaaactctatgaaaaacaggttttcatagaatgtagatagtttaacacttacagctaatacttatatcatgtttattgtgtgttaagcactgttctgagtgcttctgtacatagaactcatctaatccttgcaacaatctcggaggcaggtgctgctgttatccttgtttgacagatgaggaaactgaggctcagggggagatgaacaccttccccaaaaacacagcaagtaagcagcagagacaggatttgaacccaggccccgaatcccaatatctggcctctgaaccaccactactgtcctgctgactttcgcacatgttttcatatctgtagaaaaagtctggaagattagacaccaaaatgtaactggtggtgtccttggagtcctccaagtgggataatcatggggactttcattttcttgtttcccaaatattctacgatgaccagctattacctgtccatgctgagaaaaaagctgcagcttagcagaaggccttggtagtgactcatcccctcaagatctctatcatgtcccgactctaaagggtctggttgagactgggtacggtggctgatgcctgtgatcccagctctttgggaggccaaggagggtggatcacttgagctcaggagtttgataccagcctggccaagatagtgaaactccatctctactaaaaataccaaaaaattagccgagagtggtggcacatgccctgtagccccagctacttgggaggctgaggcaggagaattgcttgaacctgggaggcataggctgcagtgaactgagatcacgccactgcactccagcctgggcagcagagcaagactccgtctgaaaaaaactaaataaaataaataaagggtctggttaaatgctgattggtcaacaccttaagatatggcaccgtcatggaacaaaaatgtctaagctggaaggcaccttagagtttaattcctgtttctcttgtattaccatcacgagtaaggaaagttcagcccacagagagtcaggctgtggctgagttcctgctgccacccacgaggggtggccctgggcttctgttttcccattacgtcatgctgcctcccaagatgggagtgtgtgtggatgaccaatgcttcgtggggggagatggtccttccttttccatccgttctcttctctgtattgctagaagcagccgctgacccagctgacatcacttcccactgaccagcaatctggcctggggtttccagtgactaacatagcaatttaggaactttccatcttaattgggcacttctcctggaggctttctgtgtgcaggagactgtcaccagcccattttgtccaaagggtaggggattgtgcaatctggtcacagcactcactggctctgaaattttctgtggtcccttgtaactcttaggatcaagtccaaactccaaagctgggcattcacttgagggtctttgttatgtggtcctgggcttcatctcttgccttcccttcttctactcggcccacctatgtttatatatttttttgttttgttttgttttatttttttgagatggagtctcactctgttgcccacgctggagtgcagtggcgtgatctcggctcactgcaacctctgcctcccgggttcaagtgattctcctgcctcagccttccacgtagctgggactacaagtgggcaccaccacgcttggctaatttttgtatttttagtggagatgggagttcaccatgttggccaggctggtctcgaactcctgaacttaggtgatccgcccacctcagcctcccaaagtgctgggattacaggcatgaaccactgcacccggctgattactcctagttttaataaaaatgcctttctcacttcagtaaaccagtggaatactggtcataaaaatccatttatgggccaggcacagtggttcatgcctgtaccaaaaaaaaaaattagccaggaatggtggtgtgtctgtcatcccagctgctggggaggctgaggtgggaggattgcttgagcctgggaggccaaggctgtggtgatccatgtttgcaccactgtactcatgccacctgggcaacagagtgacaccctgtctcaaaaaaaaaaaagatttttaaatttttatttatttttaatttttatatttttgagactcagtctctgtcgctcaggctggagtgcagtggcacgatctcagctcactgcaacctccacctcctaggttcaagtgatttctcctacctcagcctcccgagtagctgggagattacaggcgtgtgttaccacacctggctaatttttgtatttttagtagagacggggtttcaccatgttggccaggctagtatcgaactcctgacctcaggtgatccacctgcctcagcctcccaaagtgctaggattataggcatgagccactgtgcccagtccctgtggtataatgttaataaataagaccaggatgcagaatctcaggtgaggcatggtggctcacacctgcaatcccagcactttaagaggttgaggtgggaagattgcttgaggcgaggagtgcgagagcagcctgggcaacatagtgagaccccatctcttaagaaaaggtacaaaatcagctgggcacggtggctcacgcctgtaatcccagtactttgggaggccgaggcaggcgcatcacaaggtcaggagattgagaccatcctggctaatgtggtgaaacctggtctctactaaaaatacaaaaaaattagccaggcgtggtggtgggcgcctgtagtcccagctactcgggaggctgaggccggagaatggcctgaacccgggaggcggagcttgcagtgagctcaggagtgcaccactgcactccagcctgggtgacagagcgagactccgtctcaaaaaaaaaaaaaaaaaaaaaaagaaaagatacaaaatcttacctgcagcgtggcaacaactacatccaaagacacatctatgtagagggggtgatttttggaaaggggaagtaccctaatggccttaggagggtggtgagatgctgtgtaacttttccccctgtattgtccatgttttttttttttttttttttttttggtgaacaaccatcaattttatggtaaaacaccaaaagaaagaatgcattatttttattgttactagtggtagctccctgcaagttttgtcccatacttcagaattggcaaagtatttttgtatccatggctctctgatccttataacagttctgtgaagacgatgtggtatgtgtgtgtgttttcattcagtcattcacttagcatatcttttttgttgttgtttttggagacaaggtcttgctgtgttgcccaggctggagtgcagtgacatcatcgtggcttgctgcagcctccaactcctgggctcaagtgatcctcccatctcagcctcctgagtagctaggactacagatgcatgccaccatgcctggctactttgtttatttatttatttatttattttgagacagagtctctctctgtctcccaggctggagtgcagtggcgcgatcttggctcattgcaagctctgcctctcgggttcatgacattctcctgcctcagcctcccgagtagctgggactacaggtgcacgccaccacgcccggctaattttttgtatttttagtagagacgaggtttcaccatgttagccagcatggtctcaatctcctgaccttgcgatctgcccgccttggccttccaaagtgctgggattacaggcgtaagccactgcgcctggcctacttcgtttattttttgtagagacagggtcttttttttgttttgagatggagtctcgctctgtcgcccaggctggagtgcaatggcgtgatcttggctcactgcaagctccgcctcccaggttcacgccattctcttgcctcagcctcccgagtagctgggactacaggtgcccgccaccacgcccggctaatttttctatttttagtagagacagggtttcaccgtgttagccaggatggtcttgatctcctgaccttgtggtccacctgcctcggcctcccaaagtgctgggattacaggtgtgagccaccatgcccggcctactttgtttattttttgtagagacagggtctcactatgttgcccaggctggtcttgaactcctgagctccagcaatccctccttggtctcctaaagtattggaattacagctgtgagccgctgcacctggcctcatacacttgttgagttcccctgaccaggactgggacttagctgagaggaatgagatgcccagggcaaaatgtaaggaggcgctgatgctcagggtcctgcggtgccacctgaagatgagcgcctcctgcattttccttccctaggtgcctcacctgactcaccctcatcctggccccacctccactctgaaccaggcactattctcaattctggggaagtaacagtgaaccaaacaggtagagctccctgcctacacggaccttccattatagaaggggaggcaggcagagctagtacccactgaggctcccacgggcgcagtgactgccccaggcatagcagcagccaatgctcaaggctttgaccctcctgtcccgtggtctttctcctaagtcatatgtactggaccccatgggtgcccagcagagtcagcgttgtaacttgggccacctgtggacctcagctaatggtggtgtttccagtgtggaggcggtggttggggaggatgtcctggaaaagcccagctaggggctagtgtggggacctgtcctagagggactgcctctctgactctaagcagagttctctccgtcccttccagcctcctacgtgatcacagacctgacccagctgcggaagatcaagtccatggagcgggtgcagggtgtgagcatcacgcgggagctgctgtggtggtggggcatgcggcaggccaccgtccagcaacttgtggacctcctgtgccgcctggagctctaccgggctgcccagatcatcctgaactgtgagtaactcagggccctccttgagtggggcccatcacgctcctgagcagtttccatccgtgtgagttgcactctctggccttaatacttttttcctcttttaattaaaaaatttaatgagtgagtttaccatgcacataagaaactggtaacaggccaggtgcggtggctcacgcctgtaatcccagcacttccggaggctgaggtaggtgaatcacctgaagtcaggagtttgagactggcctggctaacatggtgaaaacccgtctctactaaaaatacaaaattagctgggcttggtggcctgcgcctgtaatcccagctactcaggaggctgaggcaggagaatcgcttgaacctgggaggcggaggttgcagtgagccaggattgcaccactgcactccagcctgggtgacagtgagactctgtctccaaaagaaaaaaaaaaaagaaacaaaaaaaagaaactggtaacagtggttacctgtggggagaggaactgggctgccagagaacacagtattggagggagactttactgtaaattatttcataccttttaaatttgggctatctgttccaaaaataaatacattaattaatttaaaaaaccccaatagctataacaaaaattcaaaaaagcatgcagcaaaaatgattcatattgcttcttttccccactttacatcccaagaagtaatgattggtaaaaatttctggcttgtcttactagaaattttctctgcatgggcaagggtattatatatctgcaattccttttttaaaaactttttttttgagacagggtcgtgctctgctgcccaggctggagagcaatagtgtgatcaaagctcactgcagccttgatgtcctgggctcaagtgtcctcctgcctcaacttcctgagtaattgggactataggcacatgccaccatgcctgactaatttttcatttttttgtagagatccaggctggtcttgaactcctggtctcaagtgatcctcctgccttggcctcccaaagtgctgggattgcaggcatgagtcacatcaccctgcctgcaacccccttttgatacagctagtagcacatcatgtattgtgaattttttttcacctagcaaagaccttggggacttttcatattgacacattctttctaatagctacattgtattcctttgacagatgctctatgatttgtttgcccctattgagatgtgtttatgttccttctagcatttttcagttgttttttttttttttgagatgaagtttcactctgtctcccaggctggagagcagtggcacgatcttggctcaccacaacctccacctcccatgttcaagagattctcctgcctcagcctcccaagtagctgtgattacaggtgcccactaccacatccagctaattttttttttttttatatgaagtctctctctgttgcccaggctggagtgcagtggtgagatctcggctcattgcagcctctgcctcctgggttcaagtgattctcctgcctcagcttcctgagtagctgggaccacagatacccaccaccatgcccggctaatttttgtatttttagtatagacggggtttcactgtgttggccaagctggtctcaaactcctgacctcaaatgatccacctgccttggccttccaaagtgctgggattataggtgtgagccaccgtgcccagtcaactttttgtagttttagtagagacagggtttcactatgttgaccaggctgatctccaacttccaacctcaggtgatctgcccaccttggcctcccaaagtgctgggattacaggtgtgagccaccatgcccagccatttttctattctgtatagtgtcatgatacacttagatgtatagagcctgttttgcacacatgtaagtgtagccatgggatggctttctattatagtattggaatgtctgggttgaaggtttttgcattttaagtgttgattgatatttagtattaacaaattaccctcctctgagagaacaggatcatgtgtgatggggacatatttagctggtaatacctccctaccctgaagggtggctgtgaagtcgaagagaataagtgcctgatgttcagctggtgctcagcagaaggcagtggggatggggggtctggttacccccacccctcctcacatccccaaagagaccccctcagcgtagggcagggagccagtcttctgcatgtacttaactgagcacctgcctggttctgccctaggttctggaatacagcacaggcaatgtgacaggtcctccgccctcatgaggacacagtcttgtgaggagacagttaatgcataggaaaactagtacagaaatgggcaggcaggatacagtgaccagataggggagcctcctaggacagggggtcaaggaaggccagtgtgaggatgtgaacctagaggaataggaagaagacagccacatgacgcattgggtaagagctcaggagagaggggccagcatgtgcaagggccctgaggagccagtggtgggagccccagacacctggggaggagctgtcctgtctggggttcctgagctgggaaccacctggctggaccatcagaccagattcagcacctgcctatccctcaggtcttctggagtcattgagggcttccaggaggggggactgggagcaaaggcctgagggtgggggcctagagagtaccaccctctgagataaaccaggagagcaggggatgctgtggtggacgtgcaggtggagagatctagagctacagcccaggctgggcttttgggggcattgtggggcagaccacaccagtcacggggaggccagtggggcagcgagaacatctcctcccttcagctggcaagcaactttccaggccctcctgtctggggtcgggaatggggcgatctggctaccaatgggagtgatgttccagcacaggacggtggctgggcctgcttctgcacaggctggaccctgactcctctgtgtgcccccagcagcatagtggtggctcctcttgagtcatggtcctccccatcccctggacttctgtctccacccctgctggctgcctccctaagcacaccttcctcctcagagtggagagggtcagctagctgcccaggccacagcctccccattcctggaacccacctgaaacccctccctgcccggtgctcctgagccgctgccgttcctctccttacattccccctgcgaaagttgtcagaatcaatatggagtgactttgtgttaaaaaaaaaaataacccttggctgggcatggtggctcacgcgtgtaatcccatcactttgggaggccgaggcgggtagatcacctgaggtcaggagtttgaaaccagtcagaccaacatggtgaaaccctgtttctactaaaaatacaaaaaaattagctgggctcctgtagtcccagctactcatgaggctgaggcaggagaattgcttgaacctgggaggcggaggttgcagtgaggggagattgcacactgcactccagcctgggtgacagagcgagactccatttcaaaaataaataaccctgacaaatagaactagggaaggccatgaagggaggactgtcatgcataaatgcccaacaacaataactgtcacggaagactctacaaaaaccacaaccttgcataaagaccattgtaaccacacacaaaaaatacttctgcgaggacatctgcccagcaaatgcctatccgaccctggagactggaatcactcttgttattcaaggatagttatctcaaaacagttatgtaatcctcttcacttttcctttgaaaaacctccctggatacacacttagtttactatggcacgtgtactctcattccaatgccctattcctgagtaagcatcattttcttttttttctttttcttttctttttttttttttttgagatggagtcttgctctgtcacccaggctggagtgcagtggcgcaatcttggctcaccgcaacctctgcctcccaggttcaagcgattctcttccctcagcctcccaagtagctgggactacaggcacctgccaccacacctggctaatttttgtattttcagtagagacgggggtttcaccatattggccaggctggtctcgaactcctgacccgaggtgatccaccggccttggcctcccaaagtgctgggattacaggtgtgagccactgtgcccagctacatcattttctttttttctttttttttttttgggacagagtctcactctgtcgcccagcctggagtgcggtggcacgatctcggctcactgcaagctccgcctcccaggttcatgccattctcctgcctcagcctcccgagtaggtgggactacaggtgcccgccaccacgcccggctaattttttgtattttagttagagacggggtttcacctgttagccaggatggtctcgatctcctgaccacgtgatccgcccgcctcggcctcccaaagtgctgggattacaggcgtgagccactgcgcccggccttgtatttttagtagagatggggtttcgccatgttggctaggctagtctcaaactcctgacctcaggtgatctgcccgcctcagcctcccaaagtgctgggattacaggctgagccactgcgccaggccctttatttttttaattttaattttttgttatctctatagtagttcaaacagatgcccactaatttgtttttttttttttgagacggagtctctttctgtcactgaggctggagtgcagtagtgcgatctcagcttactgcaacctctgcttctggagttcaagtggttctcctgcctcagcctcccaagtagctaggattataggtgtgccccgctgcatctggttaagtttttgaatttttaatagagatggggtttcaccatgttggccaggctattcttgaactcctggcctcaagtgatctgcccacctcggccttccaaagtgccaggattacagccgtgagccaccgcgcctggctggatgcccaccacctcttaaagggtgttaatgataaatttgaagaaaacagtacttgaaagccccacacaccagaagtcctggacatgaagtggcttcctgagggacttacctctccaggggatgtgcctggatgtgactgtggccttttgaaggccatgcttgaactcagtggtacgacaggggcccactgggggccatatccctgcacagtctcttgaaatgtgaactgcagtggctgcctggtctgaatgggtagagggctggctctgtgggtctctgttccttgatatttcctcagccttagttgccaaggccgtagttatttaatttgtcaaacactgaatactctaagaattagaatgggccgggcgcagtggctcaagcctgtaatcccaacactttgggaggccgaggcgggcagatcacaaggtcaggagatcgagaccatcctggctaacacagtgaaaccctgcctctactaaaacaaacaaacaaaaattagcctggcgtggttgcgggtgcctgtagtcccagctactcaggaggctgaggcaggagagtggtgggaacccgggaggcggagcttgcagtgagccaagatggcaccactgcactccagcctggcggcagagcgagactccgtctcaaaataaataaataaataaataaataagagaattagaataaatcagtacagaaggcttagaacagaaagcagctacccattccttgccctagcaaatctgctggccagagtcagcccctttttcctcttttagccatccatgtcttgggctcctctattagccttccaggttcactactgtaaaacaagcgcagaccacagtggctgagaaaagacaggcgttcgtttccctctcctgtgactgccaggctgccccgggctcaagtggcagctccgtggttttgtggcccaggctctttcttctttactgttctgccagtgtggacacaagacttctcacatctgagatggcccctctgtgcccctacatgcacatcgcagacagcaagaagggaaaaagaggaaaaaggtgggtacactccacttcttttaaggacatgaccaggaagttgctcacctactttccctcataagctattggccaaacctggtcacagaaccacacctgcttgcaagggaggctgggaaatgtaatctttggttgcaaggttttatgtgcaactaaagcttctagtactctagaaaaggaggcaatcagtattggagggaccattagcagtttctgccacggtccattttggccacccagatatctgtatacacctgtcttgacctgcataaaacatctgctttccacaagggagataggcctgggggcctaatcagtcacttcctttagggcaaatctggtatgtgtgggtgatgtgtagccttctctaatggccccagtgacccagggcctctcaaccaaagagaagctgtctgcatccccttcccccagcacacccaaattccatggtggaatttgaacaggaagccacaataaaaaactcctacttgagatgagaaacacgaggtagttacttgtctatagcagtcaacaaatctggcagaggagcaattgtaaaactcccttccctgtttttttgtggagtttttgtgtgttttttttttttttttttttttttgagacggagccttgctctgtcgcccaggctggagtgcagtggcgcgatctcggctcactgcaagctccgcctcccaggttcacgccattctcttgcctcagcctcccgagtagctgggactacaggcgcccgccaccatgcccggctatttttttatttttttttatttttagtagagacggggtttcaccgtgttagccagggtgatctcctgacctcgtgatccgcccgccttggcctcccaaagtgctgggattacaggcgtgagcccctgcgccgggccaaaactccattcccaggtaaaggagtaagttctttgcttggcccatctggcagcccttggttctcagtgatctgtgattcgcgaagcatcctaagcatcagtatcacctgggaacttgttagaaacgcaaattattgggccccacctcatctgctgattcggaaactctagtggtgaggcccagcagtctggcttaagttccccagatgattctgatgcaccttgaagtttaagaaccactgctcggcccggcgcggtggctcatgcatgtaatcccagcactttgggaggcccaggcaggcggatcacctgaggtcgggagttcgggaccagcctgaccaacatggagaaaccctgtctctactaaaaacacaaaattagccgggcgtggtggtgcatgcctgtaatcccagctactcaggaaggctgaggcaggcgaatcgcttgaacctgggaagcagagattgtggtgagccaagatcgcaccattgtactccagcctgggcaacaagagtgaaactccgtctcaaaaaaaaaaaaaaaaaaaaagaaccactgctctggctgggcgcggtggctcacacctgtaatcccaacactttgtgaggctgaggtgggtggatcacttgaggtcaggagttcaagaccagcctggccaacatggtgaaacatcgtctctactaaaaatacaaaaattaggccaggcgtggtggctcaggcctgtgatctcagctacttgggaggctgacgcaggagaattgcttgaacctgggaggtggaggtttgcagtgagctgagattgtgccactgcactccatcctgggcgacagactacactccgtctcaaaaataaataaaaatggaaatacaaaaattagccagaggtggcggtgggcacgtgtaatcccagctactcgggaggctgaggcaagagaatctcttgaaccaggaggcagagattgttgggaggcagagattgcaatgagccaagattgtgccactgcacttcagcctgggtgacagagcaagactccgtctcaacaacaacaacaacaacaacaaaacactgctctgatacctggtcctccgtgatttctgggaagtggagcttccacgttcattattctctgtggccttatctgaaacggaactggaaagaatgtgcttttatttagggctccttggctttcacaaaccacctcctgctggtgtgggtttggggacttgagtggagctgtaggagtcaaataatctccagcttttatcagattcagctgtggtttctttggcaacacagttctgtcaaaaaactagaagcttctgctctcttggcttctaatcagttctgctgtggtaatcacagccgaagatccagcctagacacatcttaattctcagccctgaagtgtttggtctgttatttcctggcttctgcgcttagcctcgcctcctcaccccccaatttaatgtgcttacctggagcttcccttgaagccacctgaaacagtaagttggatgggaaggcaggactcttaatttgacttttgcctttgagctctctgtatttggcagagaacctcttctgagggtcagtagtagaactcagaaaggtggagcagagattagattattagaaaggttagtaccacagtcttccctgctgctgaggcagactcttgagatcccccaagatggggattcttgttgacttggattgttagctacaggctgggtctttgttttctttctttcctttttttttttttttttttttaaatagagacagaatctcgctttgttgcccaggctggaatgcagtggggcagtggtacaatcttagcttactgctgttttgaactcttgtgctcaaacagtcctcttgcttcagcctcccaagtagctaggactataagtgcaaaccaccatgcccagctaactttttttttttttttcagattttggaatttttgcattatatccttagtggctgagcatccctaattcgaaaatccagtatctgaagtgcatttcttttgagtgtcatgttgttgctcaagaagttttggatgttggagcattttggatttcaggttttcagattagggtgactccaactgttatcactattttcagtccctctataggttggctttgcagtgttaacaaatgtacttacatttcttccataagctataggcaatgtctcccgatgccccattttgtaaaatgaagccctttttatcctctcctctccactttcacttcccatcttctggcaaagactagttgaaaaatagtcctctgtgaatgttgtgacctctgagcctccaggaaagaactgggtcttggatgaagattcaccctctgggtcagacaggaaggcggaatactgcctttgtgtcctaattgaaagctgcctcattgtcatgtggagagtactacatgcacagggcatctgcagtagcagatcatggtctagagtagcatttcccacaccatgtgcctcagaagactggtccagcaagataccctgctgcaaacaaaagggttcatgaataactaaactcgggaaaccccgcatactttatcactgcctctgcctttggagatttacaatgcataccaactgtgaaggctctgatacgtcctgcagcaaagaaacttatttaggctattgtttcccattcatatttgaccatggtactccttttcatttgatactgatatgcccatgagatcaatatactttgtgagtcactgctctggggaaatggtgaccatggtgagggtgctgggcatctcagggaagccccatgatggagaacctagggggtcagaggcagtacttgtatgttcagaccagcatccagtgtgagaagagtctgtttctggggctagggtccgccatcaccctggggcttaacgatgagaggcctactccagagagggatttttccagatgaccaggcttaggaggggactgtgggccgggctccagaccttatatactggcatcttaggggcttaagagcaggaattgaggcagaagtgagtatcccagctgtggctcccaggcaaaggagaatccactataatcaatgctgagctctagagctgattaagtgccaccaaaggctgggttaggtgctgagcctgtagatggtggggagcagatggctctggctctgagggtggagtctggaaactgggtgcactggcctgtgaggtgaaattctccctctgccctgccacagggatttagatatgcaggagctggacaagagagttaataaggaactaaaaatacattttttgtctttttgagatggagtctcacgctgtcacctgggctggagtgccatggctcgatctcggctcactgcaacctccgcctcccgggttcaagcgatccttgtgcctcaacctctgagtagctgggattacaggcatgcactaccacgcctggctaatttttgtaattttatttatttatttatgtatttatttatttttgaaatggagtttcgctcttgttgcccaggctggagtgcaatagcgcaatctcggctcaccacaacctctgcctcccgggttcaagcgattctcctgcctgagcctcccgagtagctgggattacaggcatgcgccaccacgcccggcttattttgtatttttagtagagacagggtttctccatgttggtcaggctggtctcaaactcccgacctcaggtgatccccctgccttggcctcccaaagtgctgggattacgggtgtgaaccactgtgcctggcctaatttttgtatttttagtagagacagggttttgccgtgttggccaggctggtcttgaatccctgacctcagtgatccacccgccttggcctcccaaagtattgggattataggcatgagccactgcgcctggcctaaaaatacatttgctgagtgcctactgtgcgctagatgctggggatgcaaccatgaaaacacagccaaggtctcaggcctcaaggagcttacagtccagtgggagatgaattataagaagctaacacacagatgcatgtcacccactgcagtatgagtgctcaaaggataaatgtaggtcaggtggggagggcaggtaggagagtgcaagatgagaggatttgatctcatcaggggaagtttctctgaggcagtgaaacttgagcctcctccgtaaggaatagtggaccaagaagtgaaggacgacacacacatatctagccggggggagcagcatgtacaaaggcctgggggtgggctgaggctggggacagggcagggtcaggccacccagtgccatgcaggctaccgccaagagtttgctttcaccggagagtgaagggaagacgttggagggcttccacctgggagtatcccctgttttggccactatatggactggggggctgggcctgtgaggttccagatgtcaactgagtaggacaggaagacacttcaggaatccgaagggatttgggaagtgaccaaggttttctcttcccatctgttgctactatctacctgaagtcttgagtttcacaattttcatgcagtttcttcttggttgtgcaactcttgacagtttctaactttgggtttggcatctcggccagagtcatttccttcctggagctgggctctcattgagtggaaaatttggggctgctatgtaaaatgaaacagaagagaatgaacccttcctctccggaaggggccgggctgtgccaggtccagacagggcttgtgtgtctgctctcttggaaggctgccctgcctccgcccctttccagctgctagggcacaacagaacatgcctacatccagaccctgcccactgcagacttgccactggaggcgacactgttttgggccaaaaccacaggccaggggtcagagcacctgggttctagtaatagcttgtgtttagcacctgatatgtgccaggtaagcatcttttctcacaactcttattatccctattttatagaagaggaaactgaggctcagagattaagtaatttcccaaggccacatagcccatagtgatgaggccaacatgggaattcaggtctgcctgaccttacccgcttcttggtaggttactagattgcatcatcacttgccccatctggaaaatgggtaaagacattgccctatctacttttcttgtagactgggaaggttcaaagcatacgagatggtgaggttttctttgtttctttttttttttttttttgtgagacagagtctcactctgttgtccaggctgaagtgcagtggcatgagcttggctcactgcaacctctgcctcgtggactcaagcaattatcctgcctcagcctcccgagtagctgggactactggcgcccaccaccacgcccagctagaggttttcttaaagttaattgctgagtggctaaggacaggtcacttgaccttttccttccatgcattcattattccattggaaaaaagcaaggctttaatcactgttggtctcttgagagtggtgttagaatgaacagagtgtggaatgcctctaagccagtccccagtgtttcagagaggaagggtaagagctagggtgaagtgaaccatcctttattgaactcctgctagatgcttagctcttacaactagtctcctccagttgcaagttttggacacatactcagatgatgcattagccaggataggcttggttatgctgcggtatcagataaaccttgaaatctagttcctcaacgcaacaaatattgatttcccactcacctgaagtccagtaagggtcatgcagcctcctgcattcttgtagccagctaagtcatctagaacatgtggcttccaaagtcactgtggctggggaagagagggttggaagaggctcactagctgttaagtgcttcgtccaggaagtgatagatagcatcttcacttaaaatccactggctaggccgggcgcggtggctcaagcctgtaatcccagcactttgggaggccgaggccggcggatcacaaggtcaggagatcgagaccatcctggctaacatggtgataccccgtctctactaaaaataaaaaaaaattagctgggcgtggtggcgggtgcctgtagtcccagctactcaagaggctgaggcaggagaattgcttgaacccgggaggcggagcttgcagtgagccgagatcgcgccactgcactccagcctgggcaacagagcgagaatctgtctcaaaaaaaaaaaaatccactggctagaaccagtcgtgacgcccagcctaattgctaaggaggcaggagtatgagacagagcagatggttatttggtaagtactctctcagctacaggttacctcagttccagggcgcttacagtaaggttctgcctaactgtggcctacaaggccctgcatggtctacctttgcccggctcttcaacctcacctctaccactttccccctcagtcattcccctcagccactacggtcatccttcacttgcggggatatgccaagtgtttgctgcctaaggacctttgcacacgtgttccctctccttggaatgctgtctctccccagcttccctacattcttccatgctagtccttttcatcctctgggtgtctgcatatgtggccccttctcatggcagcttttcctggccagcctatggaagtaggtccatcaggcacccctccctcgagtttgttttcagcatagagcacctcccagtttataattagatgtcttttatttaactagcttaatgtcagtattatggcagttttgataaaggattccccattccctaacacaaaatgaatgaatgaatgaatgagaaagaatgagtcatttcagcagcaggtggagtacaagttcagtggagaaccagggatcgcacaattaggaaggcaggctgtgctctcaggtttgcctcatttcaggtctagcttgagttgggagtgtgtgtgtgtgtgtgtgtgtgtgtgtgtgtgtgtgttgtgtgttgtgtgtgactgtgtatggcctggagggccaaacccagggattaggagggaaaggaaaagagagggcgcggaaagctgtgtttgtccctgatagagccagctggcacgagggtgctttagttatagctgaatcacttttgtttgttctggaagggatctattctggccacatgagtcagcctaagaacaaattactgtgtagtttgacgggcgtgaagggttggggggaatttccagagtgtgctcacccaggaaagaccttgttgccagctctgagtcccctctgctccaacagctcctggatttgccaccgtgtgaaatgttctcaggcagctagtgtgacggcccaggccccgtcagccaaaggcccagcacccataaacatcctttagtcctttctcctgaaggaactggggcataaacaagcacataataaataaatctgcattctaggcttcgctttcttcagatataagacaactaccttatacttggtagcaattatcccccagagctgttacctgaattaaataggccacagatatgggcaagaacttaggaaaaaaagcctgacctagagttagagtggtcattataataacagtagtaggaggccaaggcggacggatcacctgaggtcaggagttcgagaccagcctggccaatatggcaaaaccccgtctctactaaaaatacaaaaattagccgggcgtgatggtgtctgcctgtaatcccagctactcgggagggtgaggtaggacaatcgcttgaacccaggaggcagaagttgtaatgagcagagatcgtgccactgtactccagcctgggcaacagagcgagactatagcaaatgatggtagcttagatctgctgggtgttaatttttttatcctcatggctggtctcgggtcgggggtccacttccacatctcatttgtcggatgaggaagccaaggcttaggaggatccccctgctggtgagcctgactgcaggacacactccagactgcgggagttcatttgccttccgtggcatcagtgattcatgctcattaggaagagcacaggcattccgaaaacaaatcagagagaaaaagaaatcatgcctggcaaccagctctggtgaaccatgacaggggcacagagaagcgcttctgcccctcccccatttcctccttgtatctgggactcagccctcatcactgtgggttctcagcctcagcaaggcagctttcacggatatccagattccaggctgggtgcagtggctcacacctgtaatcccagaactttgggaggccaaggcaggtagattgcttgagcccaggagtttgagatcagcttgcgcaatatggcaaaaccctgtctctaccaaaaaaaaacaaaaacaaaaacaaaaacaaaattagcctggcgtggtggcgtgctcctgtggtctcagctacttgggaggctgaggtgggaggattgcttgaacttgggaggtagaggctgcagtgagctatggttgcaccagtgcactctagcctgggtcacagagcaagactctgcctcaaaaacaaaaacaaaaaatccagactctgtctgagaactgccgtgtcaaccttctggtgcctgtggccacctaagctatagattagctgttccttccgtcacctgcgtccccttcctatccctgggggtcccagcagggagaaccctgggctgcccacctccagtgtgtgactgaggctggctgccaatggcgtgggcacaggcccccacctcccctgctgctgggctcctatgttactttgctctcatggccactgtacctctcgggactgtgcaccaagttgctgcccacctagaatcggtttccattagagtgtttaaaatgttaaaaatagccttccaccctaaatgcttccttcggaggcccgagttgggaatcagaggttcttttctatctgcacctttctggcagaactgaaggagggtggctgtttgcacagtgttgtgggcccctgccctgggccagccacttcacatttgtcatcatggagccctgggacggccctgggaggtgtggggttattattctgattccacaggagaggcgcatgaagctcagagggttaggaggtctgtgcctgggcgtgaagctggaatcgcagagcttgggtctggctcaagccagagccgacgcttccccacgcttactcttgtgatcctagttctactctttgatcacagtctgtgtttttggatctcatgatcctgcagaatcaactttatgtgtggaattctcttgagaatttaatcctgggaggaaagagtgctgtcttggaagcctgaggctgcccctgtctatctgtgataagaagtccgtgagcagctcactcctgagccttggccttggcagataggaagctcagtgcgagagttaaagcttgtcacagccctttcttgtaggcatttggcctcctttgcctcatcctgcctttggtgttctatttttatttcactagctctctggtgtgccagcctgaatgagtgggcgttgcgtctttctagctagcagggagcaggtttggagggatgaggacagaggccattttctccatcttcatgtttggacagtgggacaggcatgcatgggcctgcctgtccacccagctcagaccatgccggcagctccagggtggagatgagggcggttcatgtttatacgcaccatttattgcttgcattttaaagacatctaaaaactcaaagcttgagaagatgggggtttcacaggaaaccagaacttcttgttggggctgacatggggctctgttggcttacatccgtggctggtgtgacctggtgcctcttgtgtgggagggtggatgttagccccaagtgtgctgacaggtctggtcacaggtagccctgccgacaccgcccctccccatctgttcctcactcctgctcacttccaaatgccctgtggtgccaggtggggccaccgcatgtcactgcagaaggaacaagaaaaagaaagagaaaagctggactctctttaggatgaaaacataatgacattttttatcttccccacgggtggagcccacagaggtcggccacaaatgggttggtggccttgatgttcctgccaaatgtgttttgacagagaggcaaagatttgtgctgaacaaaacattaccctgaataggacactggactgggagcagtggctcaggcctgtaatcccagcactttgggaggacaaggtgggaggatcactggggcctaggagtttgagcccaggctgggcaacatagtgagatgctgtctctacacaaaattaaaaattagctgggcgtggtgttgcctgtaatcccagcggcatgggaggctaagagaggaggatagcttgagctcaggagtttgaggctgcagtgagctgtgatcacaccactgcatagcctgggtgacagagcaacaccctgtctcaaaaaaaaaaaaaaggaacaggacactgaagttaagtaaggctgtaagtatcaccctcatccccattttactgtgatgagaacaatgaggctcagccaggcaggcctccgacaaggagaaggtgcctcatttgctgggatcatgggcggttctgggtgtaggtgagacctttagggagcattttatactgttgcgggcctggcctctgcaggaggtcactgttgggaagtgacttcagcgagcccagccggccctgagccaggggagccactgctgcccttttgacacagatgtcacaaggatgacaagcctttccaggagcataagccccacttgaggcagtttgaggagggagggtggagggagagaggcagtctctccctgccagagaggggaggctgggaaagatgaggactgggagtggcggggggtagccttccaagggagcacaggcagagctttcacttctgtgcaccctgggagcgacagctctgttccagacccgtgcttgaatcagcactcaccccgacattgttcattgtcattctgtacaagggactggttttctgttgttgttgttttttgagacagagtcttgctctattgcccaggctggagtgcagtggcacaatcttagcacactgcagcctccgcctcccaggttcaagcgattctcctgcttcagcctcctgagtagctgggactacaggtgtgcaccaccacgcctggctaatttttgtatttttagtagagacggggtttcgccatgttggccaggctggtccagaactcctgaccacaggtgatctgccctccttggcctcccaaagtgctgggattataggtgtgaaccactgtgcccggcctagggactgtttattctcctcctgggcctgtggaaggcagtgggatgccatgaggcagacagtgatcctgtgattcctgcaggcaaggcccttgttggagagaaactggcttctagactccgagtttcagccacaaaggccttggcctgatggcaatcaggatgggggggtgtggcctatagaaccactgaagtgcccgtggagcccaggttgggagagaagtgcatgttctctgggtgcccttacgtcagtggttctgggaggagaccccgccttcctgcctcagtgctgcctgcctccctgtttcccttgggcaggtcttgttccccgctgagcctcagcttcctgacttgagatctccagggttgtggggagggtgcttgaattgaacgtatcaatacacaacgtggacattcgttggtgaaaaacagaagtgaggtggatctgaatctcatgaagggctgattcatcgtctgctcactggagccagaggggtccccagggcaaacgctactcacactagcttggaagactcagttctcgtcattactttagctagcttgctaactgattttttttaaaagaagtatactttactgtgtaaataatgcataatgattttgttgaaaaattctatgatatgaataaatcacaaagaaaaaaaccccacaatataaaacaggccaggcgcggtggctcatgtctgtaatcccagcactttgggaggccgaggcaggttgatcacttgaggtcaggagttcaagaccagcctggccaacatggtgaaaccccatctctactaaaaatacagaaaaaaaaaattagctggatgtggtgttgcaaacctgtaatcccagctactcaggaggctgaggcaggagaatcgcttgaatccaggaggcagaggttgcagtgagccgagattcctccactgtactctagcctgggcaacagagtaagactctgtctcaaaaaaaaaaaaaagaaaaagaaaaagaaaactaaaagactctcatcctactcttcttatcctcaatatgtggactatttaagagataaccaatattttaagactataaccaccacagaaataaaggtcccatattttgagctaagcagtgtctccattagtcttcataaaagttgtccaaaggagggccgggcatggtggctcacacctgtaatcccagcactttgggaggctgaagagggcggatcatgaggtcaggagatcgagaccatcctggctaacacgctgaaaccctgtctctactaaaaatacaaaaaattagccgggtgtggtggtgggcgcctatagtcccagctactcgggaggctgaggcagaagaatggcgtgaacctgggaggcggagcttgtagtgagccgagattgtgccactgcactctagcctgggcgacagagtgagactccgtctcaaaaaaaaaaaaaaattatttaaaatatcagtgacagtaaagaaaacacaaggaagaagccactcaggccgggcgcagtggctcacgcctgtaatcccagcactttgggaggctgaggagggcggatcatgacgtcaggagatcgagaccatcctggctaacacagtgaaaccctgtctctactaaaaatagaaaaaattagccgggcgtgctggtgggcgcctgtagtcccagctacacgggaggctgaggcaggagaatggcgtgagcccgagaatcggagcttgcagtgagccaagatcacaccactgcactccagcctgggcgacagagcgagactccgtctcaaaaaacaaaacaaaacaaaacaaaacaaaaatttatttaaaatgtcagtgacagtaaagaaaacacaaggacgaagccactcatcaccccccgacattcagccttgttgttatttttgtgcattcccgatgtctccccaactcctcccaccctggggaagtcagtgatcacccctttgttcctgtttgtctggggattggggcgtctgcccctgggggaattggggctggtggtggcagtgatggcagtggtgtttcaatagttctgccctagctgggtgggagacagtgaaaccagtcccaggtttgactgttgttggctgttttacttgacacaagtcatttcacttatctgagcctcaatatactcaaaaataaaatgcagataaacctatgaactaccagagattgttgtgaaaattaaataaatatgcacggtgccataccagtgtggtgctatgcaaatttaggtcctattattttagttcaaaagcttgggtttgaaaagtgaggtcccagggtaacaattggttttgtttagagaggcacagttgaccagttcaaagaaatgttgctggagatgttttgtcccagccctacctgggacatctgttgtgacatcccctgtgtcatgctttatgtcatgctctgtgtgacatcaagcgagtcagcagcccttcctgggacttcagtgccccagtttttgtcattctcaaacatgagtctatcccaaaccaccagagaatgagggacttgaatgcagggctatagcatcaggttttatctgggaggcaatggggagacagaaagattcaggctaaggagtgtggacattatctaggcaatggggagccccataaaggcttcaagcagggaagtgacgaggccagatgtatactttggtaagaagtagcctggcaagggtgtggaggctgcctgagctggcggcagggcccagccagaagggataagatcagggcccagtggaggaggggagaggaagctgtttcacagagcagctctgagaagctggctggaagctgaggttgacacaccctcgaagcacctttggggtttcccaagttgatgtaaaaaggaaatgattaccctcgagaaggcaggggagttcttcggccagtcctgcgtgcctttggcatgtgatcttagcaagtcatttaacctgctcaggcctcagtttcctcatctctgaacagggatgagaagcagagatgttgtgaggattcatgtctgtgcagctgggcctgggcctggtacagcccgtcctcagtggccatggctgctgttttaggattctcatccatcaagtgggaaggatgcgtttgtctccactgcgtgaaagggaggttgtaggacagccagaactttgatccctaggggctggagtgggagcttagagggatggtgtctttgacccgctcacgtgttcagggaaatgtgcagtctacagcgcccattcccatctctactctcctttcccacatgacaccccagcgggaggcaaacggacgccattatcacctccgttttataggtgagggaagggagaccgagaggaggaaggtgacttgttggaggtcacacagctggttgggtggaagcaggtgtatgtgacttagcacgtcagagctccaccttcaccaggactgccatgttcagccactgctctttttttttttttttttttttgagacagagtcttgctctgtcgctcaggctggagtgtagtggtgcgatcttggctcactgcaagctccgcctccccggttcaagtgattctcctgcctcagcctcccaagtagctgagactacagccgtgtgccaccatgcccaactaatttttgtatttttagtagagatggggtttcaccatgttggccaggctggtctcgaactcctgacctcaggcagtccacccacctcggcctcccaaagtgctgggattacaggtgtgagccaccgcgcctggtctaccgcattttacagatggggaggccgaggccagaaagggaaagaccctcccgccctgcaacaccatgcatttgtggcagagccagaattagaacccaggtctctgacttccagaaccagtctctcaatggctaccccacttcatggaatagtaataactttctttccaccttgttttcagggaaaccggctcctgaaatcaggtgtcccattccagccttccctgactctgtgaagccagaaaagcctttggcagcttctgtaagaaaggctgaggatgaacaggaagaggggcagcctgtgaggatggccacctttccaggcccaggtattttaaatttaacttttttacttaaagcacttttatttaaggaaatgaagatatatctataaggacattcagcttagcatataagagcaaaaaattgaggctgagcatggtggcccatgcctataatcccagctccgtgaggctgaggcgggaggatggcttgagcccaggagtttgagaccagcctaggcaacctggtgagaccttttctctacaaaaaattttaaaaaaatcatccaggcatggtggcatgcacctggtagtcccagctattcaggaggctgaggtagggggattgctcgagcccaggagtgcaaggctgtggtgagctatgatcacaccactgcactccagcctgggtgacagagcgagactcttcctaaagaaagcaaaaaatctggcaacaacaatgggggataataaaattaatgtcagacagtcacaacaaagtactatcaacagtgatgtagacgtgcatatgtacatggaaacatactgacaatatcgggaggtagaaaagtagaaaaaatcaggtaacaaaatgtatataacatctgttaccatttttgtgagcagaaaagaaatagctcggtaattggaggctttctagtgccagacactattccaagtactgtacttcaaagatattgactcatttaatcttcaactaactatgaattaggtattgtgattatgcccatttcatggatgagaaaactaaagcacagcgaggttaaccaacctggctgaggtcatgtactgccgggtccctgttttcaccagtggtctcccgtgtccccagcacaggttggccctgcgtgcaggctctggaccggatgtctgaccatttctctgtccattctccataggccccggccctcgcagccatgcagtggggaattgaggggtgcttcctgcccaccactttcctcccctccatcagtcacagtctgctgaagcccagagagggagagcagcttgcttaaggtcacacaaataggaagtaatgtctgagctgtgtgatttgaacactcacatccctaagcatcatactcactgctatcccaaatccttttggaccacttcagatttgtctccgtcgcctgtgcccaggcaagggctcagggacagtttccaaatgacagaatggctcagccagcagatgacctccctaggggagctgctgctcagcccaatctccattctcaccgcctcacccctggagccctgcctcacctcctgtctcctgcggcctcctgagtggtgagccagagaccccaaatccatgtaatctcagttcactgttgccgtttctgaagccaggggcggcatcagctgaaaggaacatgttttgtgggcttttgtattagacagactcatatttgaatcctagtgctgctgttttgtagaatgacttagcgtttgtacctcagtttactcatttgtaaaatgaggagaataatagaccctatttcatcacgttgtggtaagaaatcctgcacctgagtgttgcaccatggaggtgctcattaaatgttatctgatattatgaacattccagacactccagataggttgaatctagaaagttaattctaggccaaggagtctggattatttcctgtagctaaatatatgtatttttaagtgtagacttttgatcagcaatgaaagataaggggaaatggtcctgaccaaagggaaaattataacaaaatagggaaattgtaggggcgtgctggtcaggatggaagaggtaataggcatagcagttccttctggtattctttatctaggttactgtaaagataaacatcacagccagccgggcgcggtggctcacgcctgtaattccagcactttgggaggctgaggcgggtggatcacgaggtcaggagatcaataccatcctggctaacacggtgaaaccctgtctctattaaaaatacaaaaaattggccgggcgtggtggcgggtacatgtagtcccagctacgcgagaggctgaggcaggagaatcactcaaacccaggaggcggaggttgcagtgagctgagatcgtgccactgcattccagcctgggtgacagagtgagactctgtctcaacataaaaataaaagtaaaataaacatcacatgtctctgtcagcctttgctgtttactttctttcctttttttttttttttttttttgagataggccttgctctgttgcccaggctaggtgacggtggcacggtcatagctcactgcagcctcaacttccctggctgaagcaatcctcccacttcagcctctcaagtagctgggactacaggtgtacatcactacggccggctaattttttatttttgtaaagatgggatctcattatgttgcccaggctggtctcgaactcctgggatcaagcgattctcccaccttggcctcccaaagtgttgggattacaggcatgagccactgcacagagccctatttacttactttctttttttggcagtgggatggaatctctgtcacccaggctagagtgcagtggcacaatctcggctcattgcaacctttgcctcccgggttcaagcgatcctgctgcctcagcctcctgagtagctgggactataggcacgcaccaccacgtctgactgatttttgtattttttgtaaagatggggtttcgctgtgttgcacaggctggtcttgaactcctgggctcaagcaatccacctgccttggcctcccaaagtgctgggattacaggcgtgagccactgcacccagcccctatttgctttcttgatggcacttggagcaaatgtgcccaggcaggtcaagatgataactacaatttgcaggcagagacaggaagttgattgtctatctttgcctaaattgaaaataagaaatcattcatttcatcaaaccacccaaagcttgtcttctttcgggaaaaccccaaggttccactgagccccagagttcaaactcatcaattatcttaaaggattttggtaggagtgaagtatactgagcccacatcttgatccctgtgataccctggctcccccttgcagtaggtgggaaggaagtgggaagagacatggaggaggaaaatatgtttgtttgttttgttttttgagacagagtctcgctctatcactaggctggagtgcagtggcgcgatctcggctcactgcagcctctgcctcctgggttcaagtgatcctcctgcctcagcctcccgagtagctggcactacaggtgcgcgccaccacgcccagctaattttttgtatttttagtagagacggggtttcaccatgttgaccaggatggtcttgatctcttgaccacctgcctcggcctctcaaagtgctgggattacaggcatgagccaccgcgcctggctgaggaggaaaatatgtgagcagaggagccatggataggctatgagcacctcggcaaagcagtctcgaagctagaattcagatgaaagggttttgagcagctgaaataactgttacaaagccttagctgtaggagaggccactgggctatcagtcagaatctgtttacttactctacacatagtttcaccagccttggtaaaataccaagtactgcatgtgtcacagcctgacctttgtgctctataaacatcagctctttttacctggacaagaaacagaccattattgctctttttacatttgagaaagctcagataagtgaggcacagctcatctgaggtcagatcttgagtagtgctggagccagcgcttgagccaaattctgtttgatactaataaaggagatggggcagctgggggtagacccgctgccagcatcagggcaggacatagaagaccccatgtcagatacagtgccgctgcttctgcaattcttgtacctgcaatgacacagctcggcaggaccagaggtggtgcattttgcttgagaaagcaggcatattagcctcagtagaatagcaacaaaaaggccaaggcagtcggatcacctcaggtcaggagttcgagaccagcctggtcaacatggtgaaacctcatctctactaaaaatataaaaattagctaggcatggtctcaggcgcctgtaatcccagctacttgggaggctgaggcaggagaattgcttgaacctgggaggcggaggttgcagtgagccgagatcacgccactgcactccagcttgggtgacagagaaagactctgtttcaaaaacaaaaacaaacaaaacagagcaaaaaagaaaagcaagaaaaagaaagcttctggaagcatttccataggaaatggtttgttttttagctaagtcctggcacttgatctgacctctgattagctgtgcctcactcttggaaacaagattatgtagaagccccaagccccatctatcactatcacccaacaagtatcccatcttgttcatctactctcctgccccatctccctcccctcccttagccattattttaaaacatttttatatgaaaaaattacaaacatacaaaagccaagagcataatgaccctccatgtccccatcagctggcttcagtaatgatccacccatggccaacttctgattagtttgtatggaatccagggagattttcatatccttgatagctggagaattccttctcattctcctctctctgcccttggacatacagtgggggcctttaaagattatggttgtgagtttctcctaccacagataactaccctaggcacgaggagccaatccgattagaccccagaggaggggagggctgggtagggagagatggagagtaatggctggtgggtcctgtctgattttccagaccagagtccatttcttttccccaagaccacagggataaataaacccaactaatagccctcatgtgtcgcaggagcaggcctcagggattcccccaaactgagaggcctgggggagcctcctgagcaaaccccaggcattaagtcagataggaaactcatgacttgtgtgaggcaagctctgacctcagatttactgggcacagaaggaccctgtgtgcagagacagccctgccctgtggccaggcctggcagcaggatggaactcaagttagtctggagcagcggttcccagtgtggggcccacacctgcagtggtacacagaacctgggtgttagcacaaatatagatcatgtgtagaagaactagggacttcatggatattactgtttaacacaaggctgaatacataacactggaattaaagttggttgaaagaaaaccgtcaggtgactcatagtgaggtggcacagacatggccaaaaacttggagaccggatgaacataactgcagtctgagggatgcgggccaagggtactgagctgaggccaagagaaggcagggcaagggtggaagtggccatcacagagcagcctttctgcaggacgggggccctgtgctggccagcagaggcctccattagtccaggtccttggtgagaggcagataccaagacaggataggatttcatcaacaagataggatttcattaggacaaatacttgcaagaaaatgcagagggagctgggcaaggctgggagagccttgggaccatggtgcgccatttccgaggaaggctgggtgggcacttgctggcctgccttcggtctaaggcagactctccagggtgtccgttggccatcacagtcctatctgcctagtgtaccctctgcacacagtgcctggggaacagcccctgggaagcatggtccggatgcagatgcagggattgattggagccagccacagccaggcccgcagatagccaggctcccagcagctgggggtctccagctcgcattctcctggctgctagattcacacagcagcagggcaaagatcccaggaatgaggctgagggcagccccttgacaggctccagaccttgtctcaggtgatttcatgttatcagctatctgtgtgggttaattgtttagccaggctgattttactttcagtctcgtgaaataaaattttttgttttttgttttttgagactgagtctcgctctgttgcccaggttggagtgcagtggtatgatcttggctcactgcaacctctgcctcccaggtttaagcgattcttgtgcctcagcctcctgagtagctgggcctacaggcatgtgccaccatgcccggctaatttttgtatttttagtagagacagggtttcaccatgttgaccagactggtctcgaactcctgacctcaggtgatccacctgcctcagcctcccaaagcgctgggattacaggtgtgagccactgtgctggccaaaacaaatttttttttttgatacagtctcgctctgtcccccaggctggagtgcagtggcacagctcagctcacggcaacctttgcctccctggttcaagcaattctcctgccttagcctcccaagtagctgggattacaggcactcgccatcatgccaggctaatttttgtatttttgtagagatggggttttaccatgttggccaggctggtcttaaactctttttgtttgtttttttgtttgtttgttttgaagtggagtctcactctgtcacccaggctggagtgcagtggcacaatcttggctcatggtcttaaactcttaacctcaggtgatccacctgcctcggcctcccaaagtgctgggattacaagcctgagccactgtgcccaggccaaaataaattttttaatagccaaagttccagatgagtcattcctttcctgatgttgtaagccacaaatacctgaagcaggtagatttatccagtaatcttggggtcaagtccagtttcctttggaagggtcaggtccccagttactcagaagctgtccttgccatggggcttcctaggtatttccagatgatgatgtttgaagcctctggcctttggccaaggcctgcttctgtgcggaccagccaccatggctcacctcacccacggtctgtgcctgcgcccaccgaggagcccccctaccagatggcctcattagtcttcagattaatcttcacatggggcctagtgaagaaatttcaccctctttaacctcacgtttaagtgaccctaaactacttgtcaaacattccgtcttgtgaatcttgttcactcactaagggattggggcatagacatggccaagcatggtggctcacgcctataatcccagcactttgggaggccgaggcaagtggatcacttgaggtcaggagttcaaaaccagcctggccaacatggtgaaaccccatctctaataaaaatacaaaaattagccggcatcatggcgcacgcctatagtcccagctacttcgtaggctgaggcaggagaatcgcttgaacctgggagggggagtttgcagtgagctgagattgtgccactgcactccagcctgggtgacagagtgagactctgtttccaaaaaaaaaaaaaaaaaaagaacatagacactggaaccactgatgactgtgtgccccatgtgaagattaatctgaagactaatgaggccgtctggtaggggggctcctcggtgggcgcaggcacagactgtgggtgaggtgggccatggtggctggtccgcacagaagcaggccttggccaaaggccaaggcccttggaaaagtgacttaacttctccatgcctcatttcaccatctgcaaagaggcaatgaaaatggtgcagtggtaccttatttcctgattggcatgaggattagatgagttaacgcacgggaaggattttttttgagacagggtctcattctgcctcctaggctagagtgcagtggtgtgatcatggctcaatatagccttgacctcctgggcacaagtgatcctcatcctcccaagtagaggggaccacaggtgtacaccaccatacctggctattaaaaaaaaatcttttgtaggactgagcgcagtggctcatgcctgtaatcccagcactttgggaagccaaggtgggcagatcacgagttcaggagatcgagaccatcctggctaacacagtgaaaccccatctctactaaaaatacaaaaaattagctgggtgtggtggcgggcgcctgtagtcccagctactcgggaggctgaggcaggagaatggtgtgaacccgggaggcggagcttgcagtgagccgagattgtgccactgcactccagcctgggcaacagagggagactccatctcaaaaaaaaaaaagaaaaaaaatcttttgtagaaacgggatcttgtcatgttgcccaagctgatctcaaactcctgggctgaagcaatcctcctgcctcagcctcccaaagtgctggtattacagatgtgaagtatttagaacagtgcctggcatgatgtttgctaactcatgtacctagatgttaacttactccagccccgggcccttctactgccccacctctgcatgggctggttccactgccccatatctgcttgttgaaaacgtttctccatatttcaagcccaggtcaggtgccacttcctctgtgaaccctcctcatctcccagcctgttatggtctctcctgcctctgacctcgctctcccgtgggatgtatcctcggaggatagttactgcatccctgccctggtggaggtttctggaaggcaggcttggtagctagttcacctctgtgtctttttctgctctttgagtaggaggtgagatagtgcagggcctagaagtcaaacagatttccgtctgaatttcggctctaccatctactggctgggtggtcctgagcactgcgtctacctccggtgtctccgtgtctccacttgccaactgggatgataaacaggccccaggttgtaggggagtcagaggcttatcctgaggtgatgcttgaggagtgtgttggttggcacatggtgggtgtcaggaattggcagcaacaagtgtttggggagtgaacaggagactggcatagtctgaggactagaccaggatccctcctgtcttcctccccgaggctgcatcctgacccatagtccctcctttccagggtcctctccagccagagcccaccagccggcctttctccagcctcctgaagaagatgcccctcattccttgagaagcgacctccccacttcgtctgattcaaaggtaaatccacccctcggctgcagcccccaagccatgtctcccagcgtgtagttccctctcaaaaatgcaatttctctaccccttgagaccagtttaagggtggagaggagaaaggaaattgccatcaaattaccccaagcttctaagactgtaagtagaggaggtcaataatagcggggagagggagggagggcacttcagtgaatatacttcttgttttttaatttgttattattattatttttgagacagagtctcgctctgccacccaggctggagtgcagtggcacgatctcgggtcactgcaacctccgcttcccgggttcaagtgattctcctgcctcagcctcccaagtagctgggattacaggtgcatgtcaccatgctcggctaattttttgtatttttagtagagacggggtctcaccatgttggccagcttggtctcgaactcctgacgtcaggtgatccacctgcctccgcctcccaaagtgcttggattacaggcatgagccactgcacccggccattattttcttttattattttattttattttcgacctgtggtctcagctacttgggaggctgaggcgggaggatggcttcagcccaggaggcagaagttgcagtgagctgtgatcctaccaccacattccaccctgggtgacagagtgagaccctgtctccaaaaatgtatgaccatattggtacgaagataaataaaatccaagcaggattaaaaatgaggacatttctttgactctaaaagtccatttattttcttctgattttaaaataaattaaaatgttctgatggcccctaaaagtgttgtgagcctagaccctttgcatccagtgcctgggggagaagccagctttgcatgagtgtggttaatgaagctcttccatgtcccaggtgtggtgtcacatgcctgtagtcctggctatttgggaggctgaggtgggaggatcgcttgagcccaggagttggagaccagcctaggcaacacagggaggccccatctctaaattaataaatagatcaaccttccatgaaggataaacccaacactttgggaggttggtatgggaggttcacttgagcccagtactttgagaccaacctgggcaacagtgtgagatcctgtgtctacaaaaaagttttttttgtttttgtgttttttttgaggagtctcgctccattgcccaggctggagtgcagtggcacgatcttggtcactgtaacctctgcctcccaggttcaagctattctcctgcctcagcctcctgagtagctgggattacatgcacatgccagcatgtttggctaatttttttttgtatttttagtggagacagggtttcgccatgttggccaggctggtcttgaactcctggcctcatgtgatccgcccacctcagcatcccaaagtgctgggattacaggcatgagccaccgtgcctggccaaaaagtttttttgagacaaagtctccctctgttgcccaggctgtctcgactcactgaaacctctggttccccagtttaagcgattctcctgcctcagcctcctgagtatccgggattataggtgtgtgccaccacgcctggctaatttttgtatttttagtagagacacggtttcaccatattgcccaggctggtcttgaactcctggcctcagaggatccgcctgccattggcctcccacatatggtgagattacaagcgtgaatcactgtgcctggcctcgccaaaaaaaaaagtttaaaaaataagcaaggcgtggtggcacacacctgtagtcccagctacttgggggcgctgagatgaaaggatcccttgagcctgggaggttgaggctgcggtgagctgacatcatgccattgcactccagccttggtgtcaaagtgagaccctgtctcaaaaagaaatcaaaactatgtgtgtggcatgataccagttttgttaaataaatcctagtatatctaattggccggaaatacactaactttaatagcagttaaatggataatggggttatggatactaattttcaaaaactgttaagagcatatgtaacttaaaaaaattgaaatttaggccgggcgcggtggctcgtgcctgtaatcccagcactttgggaggccaagtcgggcggatcacgaggtcaggagatggagaccatcctggctaacacggtgaggcctcatctctactaaaaaaattacaaaaaattagccggacagggtggtgggtgcctgtagtcccagctgctcgggagactgaggaaggagaatggcgtgaacctgggaggcggagcttgcagtgagccgagatcacaccactgcactccagcctgggtgacagtacgagactctgtctcaaaaaaaaaaaaaaaattacgtacatgtgttttaaagagagaagttattaaaaacggaaacagaacttctttttataggcttatatacacatgcagtctctggaattctgtttaaagcaagcttgtcttacttgcccatggttgtgtgcagcccaggatggctttgaatgtggcccaacacaaatttgtaaagtttcttaaaacattatgagttttttttgcaattttttttttaaagctcatcagctatcattagtattagtgtattttatgtgtggcccaagacaattcttcttccagtgtggtccagggaagtcaaaaattggacacccctggtttggttatatgaacctgtatcctacttcccaggagtctggaaccccagtatctatgctgtgaattagaccaagagtgctgagctcggccactgaccagctgtgggacctcacttcagctgttttatttcctcagtgcttacttctgtaaactgaaataaaggaaacatcaaccatgtgccaggaatactcacatcttagtcttcaaaattactcttcggggtactattgttaccttcatttttgctgatggaaaaaattgaggctcagagaggttaagtaactcacccaaggtcacagagcaagatacagatggagctgggatttgagcttgggcctatccatgtcctttttttttttttttttttgagacagagtctcgctctgtcacccaggctggagtgcagtggcgcgatctcggctcactgcaagctccgcctcctgggttcaccccattctcctgcctcagcctcccgagtagctgggactacaggcgcccgccaccacgcctggataatttttttttgtattttttagtagagacggggtttcactgtgttagccaggatggtcttgatctcctgacctcgtgatccgcccgcctcggcctcccaaagtgctgggattacaggcgtgagccaccgtgcccggcctatccatgtcctttttacagtttccattggataagttgatcccctccatccctccatctctggtgttccaaggtcccttgaggtagcagagaaaacgagattccatagtaatctccatctcttctctctgggtctccaggacttcagcacctccattcctaagcaggaaaaacttttgagcttggctggagacagccttttctggagtgaggcagacgtggtccaggcaaccgatgacttcaatcaaaaccgcaaaatcagccaggggacctttgctgacgtctacagagggcacaggcacgggaagccattcgtcttcaagaagctcagagaggtgagcacttcttggtttctagtgggggtggaggctgcaggggtggggcgggatcttcatgttctgatgtctttctctacagacagcctgttcaagtccaggatcaatcgaaagattcttccaggcagagttgcagatttgtcttaggtaagcctcccctttgtttagtaataatgatagctaacctttatatagtgcttcctgtgtgcccagtcatgttttaagcactctattatatataaactcatttagtccttacaagaaccctataaatgtagctactattatcacattattttacagatgggtaaattgaggcacagaggggttaaatgtctcatccaaggtcacacagctaatgagtggcagagccaggatttggatctacctggtttggctccagagtccattcttctcctgtgtagcaattctatgtgtagattagaattataaaggaaacttggcttactccaactccttccttccacatgggaataaatcttctctcctttttttttttcttttcttttctttttttgttttttgagacagagtcttgctctgtctcccaggctggagtgcagtggcgtgatctcggctcactgcaatctctgcctaccaggttcaggtgattctcgtgccttagcctcccgagtagctgggattacaggcgtgcgccaccaggcccggctaattttcatatttttagtagagacggggttttgacatgttggccaggatggtctcaaattcctgacctcaagtgatctttctgctttggcttcctaaagtgctgggattacaggcgtgagccaccgtgcctgacttttttttcttttttaagagctagggtcttgctctattgcccaggctggaatggccttggaatgattgtagatcactgcagctttgaactcatgggctggtgatcctcccacctcagcctctgagaagctgggactacaggtgtgcgcccagctcattttttgcttttttttttttttttttttgtagagatagggtcttgctatgttgaccaggctggtgttgagctcccgggctcaagtgatcctcctgccttgacctcccaagatgttgggattataggtgtgagccactgtgccctgccatgtgtgtgctttttttttttttaattatttttcatctgaaacacttgtgccttatattgtagggtattttaagaaataaagaaaattgagtatctgttcattctgtaaccagtgttaaaaaataaagaaaattgaccaggtatggtggtttatgcctgtaatcctagaactttgatgctgaggcaagaggattccttgagccaaggagtttgagaccagcttgggcaacatagcgagaccctgtctcaactgaaaaaaatatatatacaaaaactttttttggctgggcatggtggctcgcacctataatcccagcactttgggaggctgaggcgagtggatcacttaagtccaggagttcaagatcagctgggcaacatggcaaaaccccgtctctacaaaaaatacaaaaattagctgggtgtggtggtgtatgcctgcagtcccagctactcaggaggctgatgggaggatcacttgagcccaggaggcagaagttgcagtgagccgagatcatgacactacactccagccggggcaacaaagtgagtctctgtctcaaaaataaataaaggccaggcatggtggctcacacctgtaatgccagcactttgggaggccgaggtgggcagatcagttgaggtcaggagtttgagaccagcctggccaacatggcgaaacctcatctctactaaaaaaaattcatacaaaaatcagcctggtgtgttggcatgcacctgtagtcccagctactcaggaggctgaggcatgagaatcacttgagcccagaaagtggaggttgcagtgagcccagatcgcaccactgcactccagcctgggcaatagagtgagactctgtctcaaaaaaaaaaaaaaaaaaaaattaattaattaattaaaaagtaaaacaaatttaaaaaggaataaagaaaattataaataagaaaatagaaactttttcacagcacctataaataagcactactgttttaatattttgatatattttcatttttaattgttaaaactttttttgtagagacacgatctcactatgttgcccaggttggttttgaactccctggctcaagtgatcctcctgctttggcctccaaaagtgttgggattttagatgtgagccactgtgctgggcccatattttgatatgttttctttaatgctttctctattcatacatgtatatgaatactcacatgtgtacacacacacacacacacacacacacacacagatacacacacacacatacatctaataaaaactggaagtatgattccctttccactttggcttagtgctttcatggagtcggcagtcactccttcattcattgattcagaaaatgtgggtagttaagcccttttctaggctctagggagtgtacgccagaagcatacagagcccctgccttggggaggtttatggtccagtggggagactgacatgtaaataactctaataagtatgcaaaagcgagtaataggatggcttgcgggaagcagaggagggcggagagataaggcaggaggccatttacagcagtcttggggaggctgaatcagagcctgacccaatccaagtgacccaaggcagaggagaggggaatgaagggacattttaaaagttatttgtggcagtgaatggtgactgatttgatacgggagataagaaggtttctaggaaactgggtgggtggtgatgtgcctttctgggataataaatatgggtgaagaagcaggtttgggacttgttgaggctaggatgatgttgacctgagcatcaggatgcaaattgacattcaggtctggagcttaggatggggctggagataagagatttgggaatattccttatagcaatgggaggttcctggaggagcaacatacaaaacaagatgaggagtccagctggcagaaagaggaaggcaaaggaggagggtcttagtgaaaagggccaggaaagagtggtcagagaggtaggaggaaagtcaggagggaatggtgactgagaaccagcagaagaggatttcaggaaagaaccccagtcctagagtcaggcaggtgtgggatctggtcctggctttactgctttctagtttgtgaccttgggcaagtcccttaacctctcagtctccgtttctggagatggggcagttgagatgtcatgtgttgcagagcagtaaagcaggatgaggaccaccatactcgttgaaggcagacagttttcatctttccaccctggggccaggcccttaggggtcagagtatgtggtacctgggaggttattggtggcgttggaggaggagagggcagaagaggggtgggacatgaggaagtagatcattctttccgtctgactcctcacacctgcactgacgcccgattccagatgctgccaccccaatgtcttacctgtgctgggcttctgtgctgcaagacagtttcacagcttcatctacccctacatggcaaatggttccctacaggacagactgcagggtcaggtaagggactgggtcatggtcagagaatgggaccaggctgcacccagccatggggtcaagggttaaggacttacagaagttcagaggggagaggggccatctaggtgagaccagggagacttcaaggagagaagtggggccaggatacataagatctggttaagtgctcactttggcagcacatataccaaaattggaacgatacagagaagatcagcatggcctctgaatgaggatgacaaaatatgaaaaagaaaaagaaaagctcaaaaagatctgattaaacatcttcaggaaaaatctataaaaaattatttgacgagaagcatttcattcaaatcaagagcaggacaaaggtatctcatagaactaacttcgttcgtcatggttctggaggtgttagccaatgcagtaggacaagaaaaagaattaagaggtaaagagtatggaaaagtggaggtgaatttttattataaaatgttcttctaatatatacctatttgcttgtgtgtttatggaatgtctctggaaagatacacaagaaactggtttactggctgctgctagggagcagaactaggtgattggggcctaggataagaagcaaacttactattagagtattatatcatgtgaaggtaatccttaataaaaattacagtgttttaaaacaggtcttctgcttatcttatcctcaaatagaggggaaagagttattccataacagaattattgcttcccatggcagggacaagacaaagcagttactcacggcatactaatgatctttagcttttctgggcactcactgtatgcaggttgctgtgataagggttttacgtaggtcatcacctccaggccgtgccacaaccaaagcaatttcttccctcatttttcaaaagaggaatctctgacacatagagacaaagtgacttgcccaaaggaacatagaggacaaatgtcaggccagagcttacattgggttcgtctggctctaggtttcagagtttttgagaagaaattagcaggggctgtccaggccagttcttagaggatgtgggacctacaccagggcttcaaaaataggtgatgaggctgggcacagtggctcacgcctgtaatcccagtacattgggaagccgaggtgggtggatcacttgaggtcaggagtttgagaccagcctgaccaatatggtgaaaccctgtctctactaaaaatataagaattagccaggcgtggtggcgtgtgcctgtagtaccagctactgaggaggctgagacaggagaatcacttgaacccgggaggcagaggttgcggtgagccgagattgcaccactgcactccagcctgggcgacaaagtgagactccgtctcaaaaaaaaaaaaaaaaaaaaaaccaaaacggtgatgatttagcctgggagagtcagtcttagaacaacagtgggagcaaatgagaggctttagcccatcccacaatccccatcagccctggtgaagtttcccctaatacagataaaatcagcgtaaggcccaggtgcttggcttgcaaacacaagctccctagctcctctcccatccagcttcttttagagagaaattccagagcagcctctgtaatggacatgataaaaataactgctgattgagcacctactgtgtggcaggtgctatgctaggggtataccatatactcccttgaatccttacagcaaccctaaaatatagggattaacatttccattttatacccaaggaaactgaggctcagagatgttaagtgtctttttccaaaattatacagctaatgcatgtctgaactgggagttacacctagatctgtctgatgtcaaaacccatagtacagggtcaggcacatggctcatgcctgtaattccagcactttgggagagcgaggtggacggatcgcttgagcccaggagttcgagaccagcctggccaacatggcaaaaccctgtctccacgaaaaatacaaaaattagttgagagtggtggcacgtgcctgtgatcccagctattcgggagtctgaggcgggagagtcacttcagcctgggattttaaggctacagtgagctatgatgctgcactccagtctgggtgacagagcaagacctgtctcaaaaccagcaaacacaaaacaatgaaaaaactcacagtatcatgctgagccctgtgacagaggacatgaagggtgggaggaggatcaggagcctgggaccctgccatcaggacttcgtttttttgtttttgtttttgtttttttttgagatggagtctcgctctgtcacccaggctgcagtgcagtggtgcaatctcggcttactgcaagctctgcctcctgggttcacgccattctcctgcctcagcctcccaaatagctgggactacaggcagccgccaccaggaccggctaattttttgtatttttagtagagatggggtttcaccgtgttagccaggatggtctcgatctcctgaactagtgatctgcctgcctgggcctcccagtgtgctgggattacaggtgtgagccaccgcacctggctgccatcaggactttaaaaaggtacattgtgactatttgtcctcctgcttttctttctcttagggtggctcggaccccctcccctggccccagcgtgtcagcatctgctcagggctgctctgtgccgtcgagtacctgcatggtctggagatcatccacagcaacgtcaagaggtgagagaggtgggctggaccctgctggggcctgggctgcaagggtggaactggtgcctattcctggctcacctcccgctccgccactcacccctgtcctctttgtttttctcttcctacctcctctcctctgccctcccctggatgtctttttctctgttatgccctcaaaaatgagtgtttccgggctgtgctccaagtccaattgctctcaggatgaattgcctacctgtcacatttgtctttctgagctgctgttttcccaacaagccctccacaccttgctgcgtcgcactgtccactcagcagctggcctggacctcatcctcgaactttgggccatgtctgccaaccccctgggattttgagctcctcgttcagtgtcttttctgagacctgtccccttcttgtgtagctgttggtgttagcatcttgtctggaaggctcctgcaggttaggcctgcacccctgcatgtcagtgccatgcacatgagagggagaggtccccatctggagacggttaggatagggagggattccgaagataccagaatatctggcagaactggctccagagacacagaactcgtatttccccaaagttctctttccatttgacttgtggaagtcctttcctcttttctctcccccaattttttttttgttttttgagacggagtttcacgcttgtcacccaggctgaaatgcagtggtgcgatctcagctcactgcaacctccacctccctggttcaagcgattctcctgccttagcctcctgagtagctgggattacaggtgctcgccaccacacccagctaatttttgtatttttagtagataggctttcaccatgttggccaggctagtgtcgaactcctgacctcaggtgatccacccgccttggtctcctatagtgctgggattacaggtgagagccaccaccccggctctctcccctaatttttatttgattgcatcaataattctaatagcaggcaaggaaatgaaagggtgagagaggtcaccactaacctaccccatgactcatcagctggcctctaggttttgtttcttttttcacttcctgcctatacaaatccttagtcctgaggtagcacctgggtaccaattcacatcctgttttttaccccttcatttaaacatagtaaacatttcgctacattgtataccgtcatgttttttagtgtcttagtcttcccgtgaaggaatttgcccataatttacttaaccactcctggcacacacacccgtgcatttgcgggcgtgcacacacacacacgctaaaaaagttttttttttggccgggcgcggtggctcacgcctgtaatcccagcactttgggtggccaaggcgggcagatcacgaggtcaagagatcgagaccatcctggctaacacggtgaaacctcgtctctactaaaaataccaaaaaaaaaaatttttttttttttttttttttttgagatggagtctcgctctgtggcccaggctggagtgcagtggcacaatctctgttcactgcaagctccgcctcccaggttcacgccattctcctgcctcagcctccagagtagctgggactacaggcgcctgccaccatgcccggctaactttttgtatttttagtagagatagggtttcactgtgttagccatgatggtctcgatctcctgacctcgtgatccacccaccttggcctcccaaagtgctgggattacaggtgtgagccaccgcgcctggccaaaaaaaatttttttttgagacagggccttgctcttttgcccaggctggagtacagtggcgcaatctcagctcaccgcagcttcccaccttagcctcccaagtagctgggaccacaggcacgcaccaccatgccgtgctgaatttgtttgttttagtagagatgaggtcttgccatgctgcccatgctggtctcaaactcctgggctcaggtgatcctcctgtctcggcctcacaaagtgttgggattacaggcatgagtcactgcacctggcctgcactatatatctgtacacatgtggcttagctttttcccattttggagtatgttctcagtgtttgctcctgggggttagatgactagatcaaatgattttttttgagacagtgtaccactctgttgcccaggctggagtgcacctctgcttccgggttcaagcaattctcctgcctcagcctcctgagtagctgggactacaggcgcacaccaccacggctggttaatttttgtatttttagtagagatggagtttcggcatgctggccaggctggtcttgaactcctgacctcaggtgatctgcccatctcggcctcccaaagtgctgggattacaggcgtgagccactgtgcccggccaagagggaatttttttttctttctttttttacatgatctgggcaggtttagtcacaaaggatgctggccacttagacctgagtcagccaggccagagctgggggttggaacagttgtggaagagactgagtctgcacagcctgtaggcgtggcaagctgaggctgatcagggttggcatctgtggggatcagggaggctgcactttggccacattcctggggcagcaagactaagtctgaactccatctccatttgctggagggagtgtgctcctgatgccctctcttccccagtcagggctggctcagaagctccatgctgagggtctttagagacctcaacttgcaggaggtgaggttgctatattgtctccccaaagggtctccatggcaacttgttgttatccagctcaaaatgagaaggttccctctcctttcatttccacagctctaatgtcttgctggaccaaaatctcacccccaaacttgctcacccaatggctcatctgtgtcctgtcaacaaaaggtcaaaatacaccatgatgaagactcacctgctccggacgtcagccgcgtatctgccagaggatttcatccgggtggggcagctgacaaagcgagtggacatcttcagctgtggaatagtaagagtgtcctgctctgcgtagagtggggcccaccttgatttgtccttcccacggctcctttgtaatcacaggatacggtagaggcacacagacaggttccatcaaagtacaacaggggctgacaaactgtggcccacaggccactttggcctgtggcgtattttgtatggtctgtgagctaagggtagttttacatttataaaggattatatttttaaacacaaagaatatgtgatagagactgaacatgctccccaaaagctcacatatttactgtgtggcgtgttacagaagaaatttgccagcccttgaaggaaaaccactcatgagtgtccaggttctagtaggctccagatatcctctcctgacttccgtaattcccatccagccatccacttgtccatccagttgtctatttgtccttatttgttcatcgctgtccgatcatccatctaccctttagctgcccatccattcagcgaccactgacccacccagcatcccaccctaccaccaccaccatccttgtctgccattatgtcgtgccaggcactaggaatatgaatgtaacaaaaacacagtccctcccctcaggagctcatggtctgcatgtagcagtctccaaagtatatttctgtagaactccagttccttcggacctctaggattgatgtgttaaaagggtttgtgccctgacaggcttggaaatattgcattaggcaaagtcaagcaggtttctttaccacaagattaattcaagctggttgaatggtagtgagcctttaatctggtacttgtgaattcaccagagaggggtatgcagtgtttcccaagctcatttgactatggaaccttgtgttctcagaatatctgtccttgtcagtgttccatggaacccagtctgggaaatgctggctgagaagagtaacagtcaggttggcttcagccaagtgcatacagctgccccttgggcctcaccctcttttcttctctagccttgaactctgtacttcctctctctgaccacagtctcctgtctgtctacctctgctaccagaaccgtggccctgagtcacctctgccctcagccagaaccccagattctgcacctccgtgtctcccagctggttcctctgcctccctcagccccactgcaagttgttcagtgaagctcagcagggctagtccaggctccttctcctttaagaaccagggggatgggcagggagtggtggcacatgcctaaaatctcagtactttgggaggccgatgtgggcagatcacctgaggtcaggagttcaagaccaacctggccaacatggtgaaaccccggctctactaaaaatacaaaaattagctgagtgtggtggcatgtgcctgtaatcgcagctacctgggaggctgagtcaggagaatcacttgaacctgggaggcagaggttgcagtaagccgagatcgcgccattgcactccagcctgggcaacagagcaagattctgtctcaaaaaaaaaaaaaaagaaaaaaaagaaccagggggatagaacccctaggcccggctcagttactttcagctgtgtgacttacacctagcacttctgtctctgggcctcagttaagccttctgtaagatggggctaacgatacacatggagatgaatgggataatgtatataagcaggtgagcatggcaccctgcaccctgcacctaccaagaatattatgatgactgtggttattgttattcccacctttacaccctccttctgatatctgtttactcttgaccttctaactggtgtgttagcgtcacagatgacttcctcatccatccattcaccctcccacctatccatctattcatccacccatgcacccaccctcccacccacatacccatccatccacccacccacccatccatccatccatccatccatccatccatccatccatctaccacccatccatccattcattcattgaatgcctcctggctcctgccacccttttgctcagccctgcctctggttgactgataacgcttttgaactttgattcctcctgtggggatcacagtgcattgctcagtgttttttggtgagtgctcagtgacctctataaaggacttggctcagagcctgctctgtgaaaggggcacaggaagtctttgtttattcatttccccttgttctgtcccttcctggcagggacctgtcaggagtcccttttcaattggctcctgtcccacttgcagcagtgatgccctctgctgcccttttctggtcactgccagtctgttattaatcctgggtggtttaaaacctttatcctttccttcctccaggcttggagggattcttggctataaatgtgaccctattctgacttgctttgagagatgctgtgggagagaggttccacactaagtgtggggtcttcacacctttaatattcacaactgctagtccccatttaacagatgaggacactgaggctcaggttttagttacttgcctaaagatcacctgagcatataaggaacagagtcagaatttgaactcaggcctgactgtagagcccttagccatcatagcattgtctctactgagaaaccctgttcaaagcagtttcctgtttatgaagacatatatcatggtttgccaattttgtggtgacttacacgtatacagggttgtgctccttctgcgagtggatgcgctaatgaataaataatgttagtaaaggcctgtgagtgaaacatgctatggatgctgcaagatttgtctagaatagatacctgcctgcatgcagagtctttccttccctgagattcacagagcaatgcctgcttgccatagctgaaggttttttggtgtttttttttttttttgagacggagtcttgctctgtcgcccaggctggagtgcagtggtgcgatctcagttcactgcaagatccacctcccaggttcacgccattctcctgcctcagcctcccaagcacctgggactacaggcacccgccaccgcgcctggctcatttttttgtatctttagtagagacggggtttcgctgtgttagccaggatggtctcgatctcctgaccacgtgatccgcccacctcagcctcccaaagtgctgggattacaggcatgatccaccgtgcccagccagctgaaggatttttaaatgaaacaatctttaaaaaatagtgtatatatacgtgtgtgtgtatctatatttatctatacctatatatatcttatggtaatacatataaacacacacacacatgaatttttgaaaaccatcttctctgcctggctatcaattaattacaaccttccactggcagcttggtggcatctttaattggaggaggtgtttagtgatattcccatgttccagattttgggcaggtgtgtctgctggcaatggcagagctgcacctggagctcagaactgagaagagaagacagaatctgctgcctggctgtgtgcacgagcgtctgaaccatgctaactcacgttctgttctctccaggtgttggccgaggtcctcacgggcatccctgcaatggataacaaccgaagcccggtttacctggtaagggaacttgtcacatctggctgggaggtatatttgggcctcacagctctgtagagagggcaacgacctcaattctagctagttttacacatgcaaatgaggcccggtacaaggttgcatttgcatccccacaaagcagctttaacctcccatccccacctgccagccaaccattgctttttcatgataatagcatctggggcttggtgcggtggctcatgcctgtgatcacagcctttgggagactgatgtgggtggatcatttgagatcaggagttcaagaccagcctggccaacatggtgaaaccctgtctctattaaaaaaaaagaaaagaaaaaacttacaaaaaacccccaacattatccaggtgtggtcgcatgtgcctgtaatcccagctactcgggaggctgaggcaggagaatcacttgaacctgggaggcagaggttgcagtgaaccaagattatgccactgcactccagcctgggtgacagagcgagactccatctcaaaaaaaaaaaaaaaaaaaagattttggaatgtttatagaaagcacttgtataaaagagaaagcacttctctatatatcaggcaattcattagggattttcctcaaattgataaaagttaatttcagcccttttaaacaagtttctataataaaaacaatttccattttgtaggccaaagatctgatatacacagtcatttaaaaaatataacaacctggctgggtgtggtggctcacacctctaatcccagcactttggaggaggccaaggcgggcggatcacttgaggctgggagttcgagaccagcctgggcaacatggcgaaaccctgtctctactaaaaatacaaaaattagccaagcgtagtggcacacacctgtaatcccagctacttgggaggctgaggcaggagaatcgcttgaacccaggagacagaggttgcggtgagccaagattgcgccactgcactccagcctgggtgacagagtgagaccctctctcaaaaaagaataaaaatataacaacctagcctgactttgtgttaaatactttccatacattatctacctaaatcatctcaatttttccatgatagagtcattatattcatctgcagatgaggaaagctggctctgagtttggcctaggatctcagttggaattaccaagtgtcagagctggaattctgagtcagatctccctgagccgacatcatgagttttttttttgtttttgtttttgagacggagtcttgctctgtcgcccaggctgcagtgcagtggtgcaatctcggctcactacaagctccacctcccgggttcatgccattcttctgcctcagcctcccgagcagctgggactacaggcgcccaccaccacacctggctaatttttttgtatttttagtagagatggggtttcactgtgttagccaggatggtctcaatctcctgacctcgtgatccgcccgcctcggcctcccaaagtgctgggattacaggatcttgagttcttaaccacagcagtctcctgcttgtttcttgtgacagtccaaccatacgaattcagtattatcattcccatttacagctgagaaaactgagggcaagctgaagtgacttgtctcacgcccctcagtgagaccagtggtggaagtggggtttaaattgaacccaaggcttttgcagagtttcaaatctcatccaaactctagtcttcctcatcagtttgagagggggcaccttttcctactgggtattgaggccattggaacagacagattattattttatttatttatttatttctggtgactgggccccagaagcatcccctgggctctggggtagggaggctgaaggcctcgctactccatgcagaaagtcacgacatgttcctttgatgaactctgtgagttccaccccttttgggcagtcaatcccatatgctgcagagaggtctgtctgggcagctcagatgtggtttggggctgtttgggggcagtttctcatctcctgactattttcttgagatggatttcccagcagtcctctggggctccccggacaagtgtcacagtggaaggaggcttttgaggcactgacaggaagttgtctagaattatttttttgctaatgatttctaaaaatgtggaaaataacaattttttaaaatgtagtttctttctcttattctagactcttgtatggtctcttatcatgttctgttgtggtaggtgcaatccaatggttaatcaagatttgagtcagggaggaaagcttgctgatttcctgtggcccagggtaggaggaagcaggcctcctccaggcttgggaaagtgttagttgccacagtgtttcctgagggcatttggtggtttccacctaaattgaaaatatgagtaccctctgacacggcagttccatttgtgcctagagaaacatgcacacatgtgaggagaggcagatgaacaaggatatttgtagtggcatttttttttttttcgagacagagtctcgctctgttgcccaggctggagtgcagtgggcgtgatcttggctcactgcaacctccaccccccgggttcaagagattctcctgcctcagcctcctgagtagctgggactacaggtgcgcatcaccacacccggctaatttttgtattttttttagtagtgacagggttttgccatgttggccaggctggtcttgaactcctgacatcactcaggtgatctgcccaccttgacctcccaaagtgttgggattacaggagtgagccactgcgcctggccaaatttaatttaatttgatttagagatagggaggggtcttgccctgtcacccaggccagagtgcagtggcatgattgtagctcactgcagcctcgaatgcctgggctcaagcgatcttcccatcttggcctcccaaattgtgaggattacaggtgtgagccatggcgcccagcctgtatgagttttgacaaatgtatacagtcatgtaaccaccaccacaatcaagatacggaatatttttgtcaccccagaaaattccctccacttacaggtcctggcaattactcatctaatttctgtccacatagctctatcttctttagagggtcatatcaatgggcccatggcagatgcacccatttgtttctgtcccccttcatgtagcatggtgcttagattcatccatgttgttgacgtgtcagtaattcattccttttcattgctgaagagtattccattgtatggatagatgactgtttatccatttaccagttgctggacatttgggttatttccaggttttggcaattctgaataaagccaacacaaacattcttattttaaaaaaatgaaaaagaggccgggcacagtggctcacggctgtaatcgcggcactttgggaggctgaggtgggtggatcacttgagttcaggagttcaagaccagcctgggcaacatggtgaaaccccgtctctactaaaaacacaaaattagccctgtgtggtggcgagtgcctgtaatcccagctactcaggaggctgaagcaggagaatcgcttgaacctgggaggcagagtacagtgagtcgagattgtgccacagcactccagcctgggcaacagagtgagactctgtctcaaaaaaataaaaaagtaaattgaaaaagacatgtatgttctgacagggacatatctccaagtgaacaaagcaaattcagaatagtatatagtatgatcacatttttgctaaaaatagatggatgaatgaatgaaaacattgtatcacatattttcttctctataaattgaggataatagtagtacccccccccaccgacaaggtatgtttgtttgttatcatttttggagatagggtctcctatctcctatcttctttgtcacgaaggctggaggagtgcagtggcatgatcatagctcactgtcacctcgaactcctgggctcaagggatcctcccaccttagcctcccgggtagctgggattataggcatgagccactgtgcctggcatctgacaggtttattgaaggttaaataatatgtgagatgcctaaaatagtaactagaacataataaacaatatatgttaactattagtattatcattattatttgagataaggtctctgccaccctggctagtatgtagtggtgcaatcatggctcactgtaaccttgtacccctggcctcaagtgatcccctgctttagcctcccaagtaattgggaccacaggcacgtgccgccactcctagctaatttttatttttattttatttatttatttttattttgagacagagtcttgctctgtcgcccaggctggagtacagtggtgcaatctccgctcactgcagcctctgcctcctggcttcaattgattctcctgcctcagtctcccaagtagctgggattacaggcatggaccaacatgcccagctaatttttgtatttttaatagagacagggtttcaccatgttggccaggctggtcttgaactcctgacctcaagtgatccacctgcctcggcggcctcccaagtacctgggaccacaggcatgtgccctcacgcccagctaatttttaatttgttatttgtagagatggggtcttgttacgttgcccaggctgatattgctattattttaacagcttttaggatactgttataattattatataagtaaatataaaaccaaaataattatagctgtatagcagaaaataatataatccaaactattagcaggagttacctttggagagtagaaatgaaaggtaaacttttgtccccaaattttaaccacttatgtttaattttaatttttttttgaaatggagtctccctctgtggcccaggctggagtacagtggtgtgcttttggcttaccacaacctctgtctcccaggttcaagcaattctcctgcctcagcttcccatgtagctgggatcacaggtgtgtgccaccatggcccagataatttttgtatttttaatagagatggggttttgccatgttgcccaggctggtctcgaactcctgagcccaagtgatcctcctgccttggcctcccaaagtgttgggattacaggtgtgagccaccgtgcccagccaaaagttgctttttaagggtggtttgtttgaaactagaccccaaaaatgtccatatattactttggttatgtttgtttttttcatttttaaaaaaaaattttatgtggagatgggatgtcactttgttgcccaggcgagtttcgagctcctgggcttaagcattcgcctgcctcaacctcccaaagtgctgacattacaggtgtgaaccaccacgcccgggcatggttatgtttcttaagactcttattcttggccgggcacggtggctcaagcctgtaatcccagcactttgggaggctgaggcaggcggatcacaaggtcaggagatcgagaccatcctggctaacatggtgaaaccccgtctctactaaaaatacaaaaaaattagccgggcatggtggcgggtgcctgtagtcccagctactcgggaggctgaggcaggagaatggcatgaacccaggaggcggagcttgcagtgagccgagatcgtgccactgcactacagcctgggcgacagagcgagactccgtctcaacaacaacaacaaaaagactcttattctctcacaacctctcccgcaatgccctttttcattttggatgtcgttggatttttgcatagactaggtcatttgccctatgtagacagactgtctcacattctgggttttgctcattacatcctgtggtctccttcccttgtttctctattcctcatatttcctatatttggcagttagcacttgtgacttgtttagagtcatggtcattgcctttgtcaagaacacttcctggaggcgctgtgagcctcccattgcttcactacacggggcgtagcctgttgtcctacttttagtgctaagaccgatcagtgtgttaaggttttagtgctaagattgatcagtggtttcaggtggagctgccgactcctccatggtgaagttccctcgacatcctttcatcgcgtgttctcagtcccccaacccctgtttaaacactaggtgtcttctgtagtttttttgattatcgtcatagtctttgcatcaagatacatagcaatgatggcaggtttccatttggggcaaattgtgagaccctgcctctagaaaagaagaaaataatacacttctactgttcttgattatcagctttaaacactagtacactttaaaaaaaaataaacatttaggctgggtgcagtggctcacacctataatctgagcactttgagatgccaagacaggaggattagttgagcccaggagttcaagaccagcctgggcaacataatgagactccatctctacaaaaaatttaaaaattagccaagtacagtagcatgtgcctatagtcccagctacttgggaggctgaggtgggaggatcgattgaatcgaggaggttgagactgtagtgagctgtgattatatcactgtgcccggcctatttttatttttatttcttatttatattttgagacggagtctcactctgtcgcccaggctggaatgcagtggcgcaatcttggctcactgaagcctctccctccccagttcaagcaattctcctacctcagcctcccgagtacctgggactataggcacgcaccgccatgcccggctaattttttgtattttttagtagcgacgaggtttcaccgtgtcagccaggctggtctcgaactcctgacctcgagtgatctgccagtctcggcctcgcaaagtgctgggattacaggcatgaggcaccgcacctggcctacaatacatgtttttacaatatttagtatgtttgtaacattcatatatgctaatcatatataccatattactcatgaaatatacaatataatttatattaaatatgcttacatatttgtataaaattattatatagcatatgttctattgtatgcatagttcagattgctgcattttatgtggtacaaaatataaaatatatgtaaatacaaaatgtataagaagtatagacataatattttctttatagtggctctcctgttatgtatataggtcagaatcctacatttgaaatgtttgtatcataagagattgtccatgtagttaataagattaaattattaagtgcttatcatgtagtaagtgccatataaatggtagctattattactattagttattatcactaaaagactattgaatgttccgtgtcagatgccactctctgtgctttaggtgcactgtttcattgaatggttgtgttagtcctaggtgtaggtattttattatttttttgagacagaatctcgctgtcacctaggctggagtgcagtggcgtgatctcagctcattgcagcctccgccccccacctcccccaccataggttcaagcaattcctctgcctcagccgccctagtagctgtgattacaggcgtgcactaccaagcccagctaatttttatatttctagtagagacggggtttcgccctgttggccaggctggctcgaactcctgacctcaagtgatccactcgcttctgcctcccaaagtgctaagattacaggcttgagccactgcgcccggccctggtgtaggtatttttgttgttcccattttcctgatgaaccaaccgaggcctagaaaaattaaggccccacgtttgtggcatgagttcactatggagtgccctgtgcatgtaggaaatcgaatccttctccatttcttgggggttttacttctttctggaatccttgcatttattcttacgatgtccggtcggttttctgagcattttttgcagctctggaggtgagtggggcgcgtgcgttggctctcgcagctctgcagctcacgcaagggcgtttctacccttcttcccacagaaggacttactcctcagtgaaattccaagcagcaccgcctcgctctgctccaggaagacgggcgtggagaacgtgatggcaaaggagatctgccagaagtacctggagaagggcgcagggaggcttccggaggactgcgccgaggccctggccacggctgcctgcctgtgcctgcggaggcgtaacaccagcctgcaggaggtgagcctcgcccgcagcggcctcgctgcctgggccacgcgtgggtccacctcatcggggacggccccttcgcagaggcctggtgcacaaaccagggttgtgcttgcttgcaagccgcagaacctcctagagctcccatcagccaaagggcggtgtagggatggatagtgcggagcccgaggacgggtattgcagggcctcagggcgcaggaccaaacccgtggatgttaactgaactcgatgaactctctgtgaatcggctttattcccccttctctataggccccttcccctttcctctgtgttctctggagggaacggctctgcccgcagtttataacagagagatgagcctccaccctgagtcccaccacagagggagaacctgattggctgaacttgggtcagttgtttaccgcttggccaatcaggcatggtggggcggtccagcatgcaaaccgggctgcccagggctccatccctggatggtgtcggcgccaggtcccaaagaaagggagtgtgctcagcccatgcactaggcggacgtcctagaaagcagccactacacggggtaagagatttttttggacatgagaagtagccgtggcttccatggtaaaaggtaatcaagagactactgcttgatcttttttttttttctttttgagacagagtctccttctgtcgcccaggctggagtgcagtggtgctatctccaaccttcgcctcccgggttcaagtaattctcttgcctcagcctcccgagtatcttgaattacaggcatcagccgctctgtccggccttgcttggtctttctaaggacaaactctccactgcctgggaggacccttagaaatcatctagcagagtgattttcaagtggtgttgggcacagaggggctccttgagaatactcaggaattgctgttggcagcaagaggggttgggggaggtgcaggcccccacctgtgactcggaccagacacccacttttgacttctctcagttactgtattgggttctctggaaagggtttggtagctggaaaaaatcttcaataaccactgctgtagcccaagcctcccattttacagaagggcaagtgaagggccacagacgagaagatgaggccacagaacttgtttttgtcagagctctctggactcccagttcagccttatgtccatcgtcttgcgctgtcacgtggcaggagctggaggcttcagtctttgttctcagcctttgctagcacaggtgtcccccaagtgtccatgtgccccgatgttcagtcattcattccgcagttgtacactggggccaggggacacatctgttcgggaacaaggcagacccaggtccacgctcctggaactcatggacattgcatagtaattgtctttgtggtgagcgccaggacagtgtatgatgaggaccccaccctgttgaccttcctgaggaaggggggtttaagcacacgaagagcaatccaggcagaaggaacaccctgcaaatggcctgagctgagagagagctcagcacgttcaagggcctggaagaaggtccgaagggctagaacacaacacatggggcacagtggcttgtgttgggtgtgtcgaggaaggagttgtccaatgatagaaggctttgtaggcacagtaaggatttttgcagagccactaaggttttttttttttttttttttttttttaacagaatctcactctttcacccaggctacagtgtagtggtgcaatctcggctcactgcaacctccactttccaggttcaagcaattctcctgcctcagcctcccgagtagctgagattgcaggtgtgtgccaccacacccagctaatttttgtatttttagtagagatggggtttcactatgttggccaagctggtctcgaactcctgacctcaggtgatccacctgccttggcctctcaaagtgctgggattatgggcctgagccactgtgcccagcctcactaaggtttttaagcagaggtaggacataatcagttttatattctaaaaagttctgtctccttcaaccaattattctttcagtaagactttcattcttttattcattccattattttgttcagtgtgtcacttaaggtgcaggtgaaactgctataacaaggagactgcaaaatgcagtggtttaaataagatagatgtttattctctttagtgtaacagtttgaatttacgcagtccagtgttaatgtggcagtgccacagtattggggacccaggctccttctatgttgtttgtttgctatccttaccatgtggcttccatgtcagggtctaagatggctgctgttgctcaggccatcacacctgcaatccagccagtgaaagagggttaaaaggaaaaggtggacacactccctttcttttaaagatataacctggaaatgcatcactttttctcacataatagagagcagaacttagctacatggccacgcctagctccaaggaaatgcggtctttagattggcaaatatttattgggcatctactgtgaagatttatctcaagaagtaacatgtgacctgggccttgaaggatgagacgtttgccacgtaaaataaaggggatagggcactttaggtgtaagaagaggtaggagatggccttagctcttagtacatcacaaccaagctgggaagatgaaagaacagctgggtcagggactggaagataataagcaggcctgggtttgatggtcacctttgccatttactgtactggctgggtggctttaggcagggaacttaacttttctgatcttttaattttttatttataaaaattcatgcattgtgtatgaaatggatacattagtggccgggtgcggtggctcacgcctgtaatctcagcactttgggaggccgaggcgggcggatcacgaggtcaggagatcgagaccatcttggctaacatggtgaaaccctgtctctactaaaaatacaaaaaattagccaggcgcggtggcgggcacctgttgtcccagctactcagaaggctgaggcaggagaatggcgtgaacccgggaggcagagcttgcagtgaaccgagatacgcccctgcagtccggcctgggcgaaagagcgagactctgtctcaaaaaaaaaaaaaaaaaaaagaaagaaagaaatggatacattagtatactgaattttttgcaaggcactgaggagatgagatttgttattgttattacgggtataagggtatgtatgtgtgctctgtgtgtgtgtgtgtgtgtgtgtgtgtgtgtgtgtgtgaagaagaaacattccttccttgcttccgtctaattttcctaacctccctaaccacaaaaaccttccagggcaacatctatattatttgtgcttttttgattgaaagtgttaggaacttaaactcttacacacacacacgtgcacgcacacacacacagacatagggagggggaagaatatgaatgagtgaattagcgaatgaatgaacttagtgtctcatttaaccaaacaacagagaggacaggcattgctctggtttcagggaagttagacccaggatctcaaacaccaaaggtacagccattgtgtctctctgtctgtggctctctcttcgttgcttgcctctgctttactctgtgttgagctttcattttcccctactgtaaatgggttttctgggtgtagtggggcgtctggttctaccactagagaggaaaggctggaggtctttccccaataagctctaggtggaaaagtttcagggaaggattctgattggccagcttcgatcacatgcccaaatctagactaatccctatggtcagaggagtggggtactatgatctgcccatgttgggtcacgccgtctcatctatgacagggcggttggtgggcaagcacaggtcttttcaaaggaagggtgtggttttttcagacaaaacaaccagcattaggttcttcagtctgctccccgccccctctctgctgggaggccagatgttagcatttctatttcagagagaattcctgatgagctcccttctctctcttctcccaaaggtgtgtggctctgtggctgctgtggaagagcggctccgaggtcgggagacgttgctcccttggagtgggctttctgagggtacaggctcttcttccaacaccccagaggaaacagacgacgttgacaattccagccttgatgcctcctcctccatgagtgtggcaccctgggcaggggctgccaccccacttctccccacagagaatggggaaggaaggctgcgggtcatcgtgggaagggaggctgactcctcctctgaggcctgtgttggcctggagcctccccaggatggtaagccggaagtcagagtgcatttggatgctcatgtgtgtgtccccaacttcagcccatcattttttctttctgttgccttcattcactccttcatttggttattcagccattcaccaaccagccagtttttcacagagaaacctgggaggcatccttgacacctccctctccctgccctggactgtgtccggttaatcacccagtcctgtccattggcctccaaaatctctctcacctccatctacttctctgcgttccccctttgtctgagctcctgtcctcaggggactgcatagcttccctgagtcctcctccatcctggcccctccctcactaggtccttctccaggagccagccagagtagcttttaaaaacacagtgccggccaggcgaggtggctcacacctgtaatcccagcactttgggaggccgaggcgggtggatcacctgaggtcaccctggccagatcacctgagatcgagaccagcctggccaacatggcgaaaccctgtctctactaaaaatacaaaaaaattagctgggcatggtggcgcgtgcctgtaatcccagctacttgggaggctgaggcaagagaattgcttgaacccgggaggcagaggttgcagtgagccaagattgtgccactgcactgcagcctgggcgacagaacaagagtccgtctcaaaaaaacaaaaaacaaaaaactcaatgcatgtcatccctcgttcaaagtcctcaaggccccatgtggtctgttcctgtctgcctctcctctcaacacaaacaccatcctcaccagtcacttctaaagatatcttccaggctgggtgcggtggctcatgcctgtaatcccagcacttccagaggctggggtgggcagatcacctgaggtcaggagttcaagaccagcttggccaagatggtgaaaccctgtctctactaaaaatacaaaaattagctaggcatggtggcgtgtgcctgtagtcccagctacttgggaggctgaggcatgagaatcacttgaacccaagaggcggaggttgcagtgagccgaggtcgtgccatttcactccagccctgagtgacagagtgagactccgtctcaaaaaaaaaaaaaagaagatactttctggctgggcgcagtggctcacgcctgtaatcccagcactttgggaggctgaggcgggcagatcacgagttcaggagtccgagaccagtctggccaatatggtgaaaccccatctctctactaaaaatacaaaaattagctgggtgtggtggcaggcacctgtagtcccagctacttgggaggctaaggcaggagaattgcttgaacccgggaggtggaggctgcagtgagccgagattgcaccactgcactccagcctgggtgacagaggaaaactgtctcagggaaaaaaaaaaggtaccttccattcctgccactcaggtccaaggataccaagtttctttctgaaataaaaaattaggaagccccccccccccccccccgcctttttttttttttgttttgagacagtgtttcactcttgttgcccaggctggagtataatggtgtgatcttggcttatggcagcctccgcctcccgggttcaagtgattctcctgtctcagcctcccgagtagctgggattacaggcatgtgccaccatgcctggctaattttgtatttttagtagagacagggtttctccatgttggtcaggctggtcttgaactcccaacctcaggtgatccgcccacctcggcctcccaaagtgctaggattataggtatgagccaccgcacccgaccaggaaggccctttcaatgcagtgtccctgtcccttagtaaacatggttcaatgaatgtcccaggctctgaccactcctgtttctcttttactcctcctgccatggggaggggagaggaagaagaaagacaggatgtgagcatttttttcactccaccctcccacccctcaacatcataaataggaacagggaaaccctctcctttctggaaggccagggtaggttgcagggcttcctgcaaagacagaggagatgaaaatgctcattacagctgggtgcagtggctcatacctgtaatcctagtacttcgggaggacgaggtgggctgattgcttgagcccaggagtataaagatcagcctgggcaacatggtgaaaacctgtctctacgaaagatgcaaaaattagccaggtgtggccagccaggcatggtgactcacgcctgtaatcccagcactttgggagccccaggcgggtggatcacttgaggtcaggagttcgagactagcctggccaatgtcgtgaaaccctgtctctactaaaaatacagaaaaaaaaaaaaaaaaaggccaggcctggtggctcacgcctgtaatcctaacactttgggaggctgaggcgggcggatcacgaggtcaggagatcgagaccatcctggctaagatggtgaaaccccgtctctactaaaaatacaaaaaattagttgggcgtggtggtgggcgcctataatcccagctactcaggaggctaagtcaggagaattgcttgaacccaggaggcagaggttgcagtgagccgagattgagccactgcactccagcctgggcaacagagtgagactccatctcaacaaatgataaataaataaataaataaataaataaataaataaatgggctgggtgctgtggctcacaggccgggcgtggtggctcacgcctgtctgtaatcctaggacttcgggaggccgaggcgggtgggttgcctgagctcaggagttcaagcctagtctgggcaacacggtgaaaccccttctctactaaaacacaaaaaaattaactgtgtgtgtcgtccagcctgagcaacagagtgagactccatctcaaaaaaaaaaaaaaaaaagccaggtgtggttgtgcacgcctgtagtccctgctactcaggagactgaggtgggaggatcacctgaacctgtgaggtcaaggttgccttgagctgaaattgtgccactgcactccagcctgggcaacaaagtgagaccctgtctcgataaaaaaaaaagaaaaaaaaaaaaaagaaatgctcattacactcagggcctgattcaggaacctgatttaagtgactttaagaattataataatagtaactttcattcaagtcgctcttgtttgctttctgttgaacatcagttacagaaacttcgtggcaaattgagatcaatgaggccaaaaggaaactgatggagaatattctgctctacaaagaggaaaaagtggacagcattgagctctttggcccctgatgaccggaacacagctgaggacccttgtcctcagttggaaagatgagcatcagatcaagaaaaaggtctgaggcagaatccaagatctgccaggaaacacacaacaaaacatctgctgtcctgggtgggagggaaacttcatttcactggaatgagttgggagagaaaggccctcagcttttagagacacaaaaatccatgaagtctcttcctttctgggctttgttagtcagagcaggggatcagaggagactgaagcagaaaccctgcacacgggcccaggatgtggctgattttgtggttccggggagtatgtgatgataatcacccccagcagattccattacctcagcagctcttgttcccccgccactggcagttctgcaatgccatagcattttccagagctaagatctctgggttgtatttgctgacagcctgcaagcttgcatgctctgaaagattttttttagtttttaatttttttgtagagatggggtctcgctttgttggcgcaatcctcccacctcagactcccaaagtgctggaattacagttgggagccactgtgcctggcctggaagactttcaacttgtgtctcagtgcagttcttgactcacctctctgggcctcaggttctacaaatgccagacacctagcgaagagctctgcaggctttccactgcctgtattggaaatcttgcaattcacataattattcagtcactgcctggtacctttatcttcccatcccactaatgttagtgttttttaatggagcttttattctgagaatatgtgtttgtctgtttgtttgttttttgagacagagtctcactttgtcacccaggctggagtgcagtggcacgatctcagctcactgcaagctctgcctctcaggttcaagtgattctcctgcctcagcctcctgagtagatgggactgtaggcacctgccactatgcctggctaatttttgtgtttttagtagagacagggtttcaccatattggccaggctggtctcgaactactgacctcgtgatctgcccgccttggcctatcaaagtgttgggattacaggcttgagccaccgcacccggccgagaatatgtgttgttatttatgactggattatgaagaatcaggagaatgcatttcatgtctgattctgctgctaattaagtcaatcatttaatttttgggacctcagtttctttgtaagtaaaataacacctgcttgttcttcatccctgggctgttgggaggaacagatgagacagtggctatagaagcacttggaaaatgcacttgtcctgttttgtaaaataaaaaggtattaaatgtgtatttctgccatgtacctaatgattattcagtgcgtatatatctgaaaagtcatgttgcaaatctttctgtgaaacagatgctattttaaattcactgggagaaatatcctatttaaagtaatctatagtaatttctttttatataataaaaatatatttgtaaagtcgacagacaacttgtaattagttttgtgtctggaagaatttgtttagagaaggcactctgtatccttgagatggggtagcaaagagctaggatcctggctcttactgttgactgttaatagctgcatgatcttgggcccagttagggagttactctgaggctctgtttcctcatctgtacaatgggaaaaagaaaacgtacgcatcttgtagggttgttgttggatgggtcctgcctggtgaaacatttggcagctccccagtaaggacagctttggcttgatgtgtgatgtagctgagctgggtcccagtccaggtggacagtgatctatacagacagccctgtcttcagctctggtgtctgtgaggattcaaggtgaatgtgcattttgtgccccaaatgggacctggcctgttgcgaacactttacaattataagcagggtgtttccagggctgtttgagcaatagagggctgacaccaataggtttgtggttatccagacatacttacatttctagactaggatttcatatatttttggagaagtcagtaaatccccttgggacttggatgaaagctctagacctttgctacatacagacatacatacatatgcgttctgagtccatgaattccagaccttcatgggcaccatgatgtcttttcatggatcccccgtagggaagccctgaattatttttttttaggttaatagaggatttaaaaatctaaacagtacaaaggttccatggtgagaaggcaggctttttctcaatgggatcttagtctccagtttcttgttcccaaaggcaaccactgtcactaggttggagtatccttccagaggtgatggaaaacagaggtgatgctcaacttagtcatcagggaaatgcaaatcaagacctctatgagatgccacttcacattcactaggatagctataatcaaaaagacaaaaacaagtgttggccatgatgtggagaaattggagcccacacacactgttggtgggaattgaaaatggtgagcactttggaaaacagtttggcacttcctcaaaaggtaagaatttccatatgacctagcaattctacccctaggtatctacccaagagaaatgaaaacatgtccacacaaaagcctgcacaccaatgtttataacagccaaaaaataggaacaacctaaatatccatcaactgataagtggatacatgaaatgcggtctattcatgcaatggaatattcagccatagaaaagaattaagtacttgtgaaaagtaaagtagaggttcctcttcaaagactttcctccccatctaattaggaataaatagtaacttctcttagaagcaaaatttattcaaagacctaacattcttaaatacctgctagccataataaatcaatgtactttatgttcttaactcccacaatttagcctaaatatttgccctggcacggttatactggtgcaagcaagcattaagtcatagcctgttcctcttccttatttgaaagtgtttttacctttctcagcattccacaagttacttcctccttcctttgttctcctctgcttttgcctctgaaaaaattctaagttgttagccaatcaagacaaatacagaatgtgaagtcccgtttcagccaatggaaactggacccagaggtagggtggatacgtcaggttataaatgaccctgtctcctttgttgggtgtactcgtggcaaaactgctggcgagtgtaccctttctgcagaaagtgtaaaaatggccttgctgagaaaattatttatgttcaagtgctatttctttatggcactggggaacaagcatttcaaacatactgacacgttacaacatggatgaaccttgagatcatggtaagaaaaagcaagtcacatattgtatgattccatttttaattttttcagaataggcaaatctatcaagacaaactagattacagtcttgctgaaattacaggagtgagccaccaggccagctggtcatacacctgttttctttcttcttttttgttttgagacagagtctccctctgttgcctaggctggagtgcaatggcacgatattggctcattgcaacctctgccttccagattcaagcgattctactgcctcagcctcctgaatagctgggattacaggcacatgccaccatgccctactaatttttgtatttctttttagtagagatggggtttcaccatattgttgaggctggtcttgaactcctgaccttgtgatctgcccaccttggcctcccaaattgctgggattacaggcgtgagccaccatgcctgctgctcatacactttaaatgagtgaactttatggtatataaattatatcttaaagctgttagaaaggaacacacaaagtggttaccctcaggcatttgaaaaaagaaagccacatttacctttgtatgccactcctctctatttagccacacatgtgttttgttaatgcttttctaggtcctttgttttttcatgtctttcttggctattgctcctcaacagtaagtttagatcacttcattctttttgccttacattccattgtatggatattccttaatgtatataaccagctgatagagattgaggttttgttttcattctagctactacagacaatgccaccttccaaggagattgtatcaattaacacgttcatcagggatgtatgggagtgcatttcctcacatcctcagccacaaggtatattatcctgctttttttttttttttgagatggagtcttgctctgttgcccaggctggagtgcagtagcgtgatcttggttcactgcaagctctgcctcccgggttcacaccattctcctgcctcagcctcctgagtagctgggactacaggcatctgccaccaggcccggctaatttttgtttttttttttgtatttttagtagagatggggtttcaccatgttagccaggatggtctcgatctcctgacctcgtgatccacccacctcggcctcccaaggtgcggggattacaggcgtgagccaccgcacccggccccttaccttgttttttgattattgccaatctaacgagtggaaaattataattttatatgtactttttaatttaatttaattaattaattttttttttttagagacggagtctctcacccaggctgaagtgcagtggcgcaatcttggctcactgcaagctccacctcctgggttcacgccattctcctgcctcagcctcccgagtagctgggactacaggcgcctgccaccacgcctggctaatttttgtatttttagtagaggcggggtttcaccgtattagccaggatggtctcgatctcctgacctcgtgatctgcccgccttggcctcccaaagtgctgggatcacaggcgtgagccaccacacctggccttacatgtacttttttaatggttgaggtggagccatctttcttatatttaggagcgtttcatgatttgtttttgttcattgcttcctttgcctttttttttttttttccctgagacaggggtctcactttgtctccctggctggagtgcagtggcagtaatcttggctcactggaccctcgacttcccaggctcaagggatcctcccacctcagcctcctgagtagctgggactacaggcgcccaccaccacaccaggctaatttttgtgtttcactagagacaggatttcaccatgttgcccacgctggtctcgaactctttgcctcaagagatccacccacctcggcctcccaaagtgctgggattacagacgtgtgccactggacccagcctcctttgccagtcttaatactaagttattttattattttgggagaattgctacatcgaatatcagccctttgtcatatgtttcgagtatttttctgaatttgtaccttgtctttgattttttttcttttttgagacagggtcttgctctgtcctccaggctggagtgcagtggcgggatcacagctcactgcagcctcgacctcccggcctcaagtgatcctcccacctcagcctgagtagctggcatcacgcccagctaattttattttttgtagagatgggggtcgcaccatgctggccaggctggtctctaactcccgagctcaagccatcctcccgcctcggtcttccaaagtgctgagattgcaggcgtgagacaccgtgcccagccgtctttaatatttttcaccaggcggatagttcacatttttgtgtagtcttttttttttttttttggtgccttctaattctaattcttcccatttctgggtgtgtacttagtctctctgagccacagttttctgctctataaagtggggtgataatgctcagtacacggtttgctttggctcgatgagaaatccaggtctgaaagcttcaggtacagcggccggcgctgaggaaaacagcgttaagtgaggcgcgtcagcggacaccacctgcctgcacatctggctggcctcaacttcccgctgttcgagcccacgtgagtggctccgccccatctggcttctgaccaatggacgagcttcctaaggcgtaccgtcccgactccaaggcgcctggctttgaggcgggctgcgtcttgctcggagtcccgccccttgccgggtcgagcaatgggcgccttccgtttggcgcaggccccgcccctgtcgctctccggcctgcgggccgcagggctcgttccggagggcgggcgccacggaggccggagtggtcgcagttcgggcggaggccgggccaggcggggctgtagggctggggcaggcggcgggctgcccggcgggacagctgcggcagccggcggggggcgtcctgagttggcggtcgagggcgctgccagctcccgaggggccgctcgggccccttccggcccgggtctggttgggccgcaggagcagggcgggctgcggcgcccgggtctggccctggcctacgggctaagcgcccggccccggggccgcggatccggcagccatgtgtggatcttgaagcgccatgtggtcttctgaagcgctttgacagttctaaagggctttatattgcaaactgatcaaagcgcttcgtagccccggaagcgcttaggcatctccgaagtagcgctgggcaaagtgaaggcttcctgatctcagaagcacgttgtgggcttggaaaccgacggcagcctttagtcaattttggatcgctttgacttctccaacacggtttggcatctctgaaaccttgagaactgtgatgggcagtggaaagaagagggaaaggtcagtgaggctagcccctggctctgcccttatgtcttgccgtcctcctgggcccggggtggcgggaatctgaggtggggtcgccaggaagggtggtgttggaatccaggccccctgtaccttgcaggtgcccatggcgtccgagcggggcaaggtcaagcacaactggagcagcacgtcggaagggtgtccccgcaagcgcagctgcctccgggagccctgtgatgtggccccctccagccggccagctcagaggtctgcgtcgcgttctggagggcccagcagccccaagcgcctgaaagcccagaaggaggacgatgtggcttgctcgcggaggttatcctggggctcatcccgccgcagaaataactcctcctcctccttctccccacatttcttgggccctggtgtgggcggggccgcctccaaaggctgcctgattcggaacactcgggggttcctgtcttcagggggatcccctctgcgtcctgccaacgcctctttggaagaaatggcttctctagaggaggaagcctgcagccttaaggtaggtggctgccacgctttgcaatcggtgaagccccttccacatggcttgagaggttggggatgggaattttggtggaaggagactacaaaacattacatccttgaaggtctggaaggtctttctagaagtccactccccccaaactcgaagacctagcagtcttccaggcgcgtggcctgaagttaagtagagaggtaattttcaaactcggcagcactttggaactacttggaaagctttaaaatacttgggcctgcctcctactccagagaaactgatttattgggctgaggtgtggtctgggcttccagatttttcagtgctccccaggttattgtaaacgtgcagccccgttggagaatcactgcagtagaaggtggattatgtgctcaagagaagaatgtatttattttagttgtcagtttaaagaattgtgtgcccttgtactttgaaccactctgaatcacagaaccaagaattgcggttcttggtgtagcttttctccaaagtcatagtttccagcatgttggggttttgcttggtggtgctagttttttttttttttcttttttttttggaggttaaattgttaattccctaatggaaacatgcaagagggtttcataagtactttgagcagaccaaggagtgcttcacagagaagatacatttcgctcatctactcaatcaaggctttgaacaaatatgtgttgagggtttagtttgtgccaggcaatgttctaggtgtttgggattctttactaacaaaacagatcactttccccttagagtttgcatcctagattttgaaggtctgagtcttaagaagtgagaagttctgcctgtggaggagtggagaaacagtcttatttgggatcagatgggctgcctctagagaaaattactttacaaaagcaattaaaacaggccctaaggaatatgtgtttgtttttaagcctagccttggtggtttcttttgtgtagctgagaaaggaggctgtatttgactgtttgtcttggggactcataggctaagtgcccctggttttttcaatgtggacctcactgtctgaactcttgtgtgggcacgtggattttttctttttaaattcacaaataacagtgagttgaaaagccctgtctctagcgtaggaatgctgaatttgtctcaaatcaggtaagtatgggactttgctcatacaagttaatcttgccattaatccttgatacaatttcagtagacttgggtacagcataaaataataccagttgattcaatttagcttcactgacaatttgtagatagagtgaaacctgttactgggagaggcaggaaatttactttacatagtctttcaggtgtgctgaatccctggctgtcctaaagacctggaactcaggtttgagggtgtggtctctaatctgggtgggtctaattgtaggtggacccacctttctctcattaaggctaaaggggccttgttttgcaagaacccaatttaatggtttcagtagaagcacttgagggttattgtgggccacgcactgttgggtctgggagtgatgagcttctagggagcagtctggtgggagggctggaggagtggtcgcatgactgcccacaatgtggtatgatggagtagtgagcccagaatggaggctggagagcgaggtagggggtggattgcagcaaggttttagtagccaagggaatttggattttatcctaaggacaatggattttattctaagggacaattcccttagaattgtattctctttttttgagacagattcttactgtgtcacccaaggtagactgcagtggcatgatctctgctcactgcagcctccacctcctgggttcaaacaattctcctgcctcagcctcccaagtagctaggactacaggtgtgcgctaccgtgcccagctgatctttgtatttttagtggagatggggtttcgccttgttggccaggctggtctctaactcctgactgcaagtgatctgaccgcctcagcctcccaaagtgctgggattacaggtgtgagccaccatgcccggccaattgtattcttattttaaaaaaattattttatttttttgaaacgatttcccaggctggagtgcagtggcgcaatcatgtctcactgtagcctcaaactcctggggtcaagcaatcttcttaaataggtgagaatatgggcatgtgccaccacaccctgcagattaaaaattttttttttgggctgggcgtggtggctcacgcctgtaatcccagcactttgggaggccgaggtgggcagatcacgaggtcaggagattgagactaccctggctaacacggtgaaaccctttctctactaaaaatacaaaaagttagccgggcatggtggcgggtgcctgtagtcccagccacttgggaggctgaggcaggagaatggcatgaacccaggaggcagagcttgcagtgaaccgagatcaaggcactgcactccagcctgggcaacagagtgagactcagtctcaaaaaaaaaaaaaaaaaaaaatttttttttttgtagagatgaagatctcactgtgttgcccaggctggtctcaaactcctgggctcaagctgtcctcttgccttgtcctcccaaagcgctgggattagaggcatgagccactgtgccagctggattgtcttctaagcaattagagaatttatacagggctctacacagaaaaggaaattgcattgtagaaagatcactcttgtcgagtgagggtttttatattaccctgattgtccatctctaggactgctgaagtctcttcctggagtatatgtttgtcagtttaaaaaccaagtgtacagtacttgactcatcttgatgaattacaaaacacctcttaccttccaccttcatctgtacctcttcctcccttgctctgtggtcatctgtgaacttatctgtcctggtcctaagtccttcagcaagcacagccgaggggtactcacaaaaatggcatgttcatcctcaggtccttctagagtcctctcactgctctcctgtgtctgctctgtaaactttttttttttgtttgagacagggtcttgctctgtcacccaggctggagtgcactggcatgatcatagctcactgcatctcaacctcctgggctcaagcgatcctcctgcctcagcctcccaagtaggtggaactcaggcgtgtgccaacctgcctggctaatttttttttttttttttttgagacagaatcttgctctgtcacccaggctggagtgcagtggtgcaatctcggctcactgcaagctccgcctcccgggttcacgccattctccttcctcagcctccccagcagctgggactacaggtgcacgccaccatgtccggctaatttttttgtatttttagtagagatggggtttcaccatgttagccaggatggtctcgatctcttgacctcgtgatccgcctgcataggcctcccaaagtgctgggattacaggcgtgaaccaccgcgcctggcctgcctggctaattttttgtgttttgtaaagacaagagtctccctatgttgaccaggctggtctcaatctcctggggtcaggcagtcctcccaccttggcctcccaaagtgctgggatcacaggcatgagctactgtgcctggccttgctctgtaaactttgagggttacacagttgactttgttcccttctcccaccagcctttaacacatctttctctgtgccaggtcacagaatattctgaggggaaggtgttagactggtcattttagaatcggtagagatccctgctggctgacctcacatcgttcccttcttacctccaggacagttggagatgtttcatgttagctgatgatcttcatttactcttcacagaggagactaactgtgtgacgagcaccttcatgtagtaaagattatttttactatgacatctaaatgtctacattcaatttagagttgaaagaatggaagggaaaatttgagcatgtatgataaggcttggtcaactatgattctcgatgtttgatctatagacta

SEQ ID NO: 565 - DNA, 3420 bp, Homo sapiens
ctggctagagaagccgcagcccgcagtgtccgacccagtcgtcccgcgccggagccggccccgtagcgtgccatggcctgctacatctaccagctgccctcctgggtgctggacgacctgtgccgcaacatggacgcgctcagcgagtgggactggatggagttcgcctcctacgtgatcacagacctgacccagctgcggaagatcaagtccatggagcgggtgcagggtgtgagcatcacgcgggagctgctgtggtggtggggcatgcggcaggccaccgtccagcaacttgtggacctcctgtgccgcctggagctctaccgggctgcccagatcatcctgaactggaaaccggctcctgaaatcaggtgtcccattccagccttccctgactctgtgaagccagaaaagcctttggcagcttctgtaagaaaggctgaggatgaacaggaagaggggcagcctgtgaggatggccacctttccaggcccagggtcctctccagccagagcccaccagccggcctttctccagcctcctgaagaagatgcccctcattccttgagaagcgacctccccacttcgtctgattcaaaggacttcagcacctccattcctaagcaggaaaaacttttgagcttggctggagacagccttttctggagtgaggcagacgtggtccaggcaaccgatgacttcaatcaaaaccgcaaaatcagccaggggacctttgctgacgtctacagagggcacaggcacgggaagccattcgtcttcaagaagctcagagagacagcctgttcaagtccaggatcaatcgaaagattcttccaggcagagttgcagatttgtcttagatgctgccaccccaatgtcttacctgtgctgggcttctgtgctgcaagacagtttcacagcttcatctacccctacatggcaaatggttccctacaggacagactgcagggtcagggtggctcggaccccctcccctggccccagcgtgtcagcatctgctcagggctgctctgtgccgtcgagtacctgcatggtctggagatcatccacagcaacgtcaagagctctaatgtcttgctggaccaaaatctcacccccaaacttgctcacccaatggctcatctgtgtcctgtcaacaaaaggtcaaaatacaccatgatgaagactcacctgctccggacgtcagccgcgtatctgccagaggatttcatccgggtggggcagctgacaaagcgagtggacatcttcagctgtggaatagtgttggccgaggtcctcacgggcatccctgcaatggataacaaccgaagcccggtttacctgaaggacttactcctcagtgaaattccaagcagcaccgcctcgctctgctccaggaagacgggcgtggagaacgtgatggcaaaggagatctgccagaagtacctggagaagggcgcagggaggcttccggaggactgcgccgaggccctggccacggctgcctgcctgtgcctgcggaggcgtaacaccagcctgcaggaggtgtgtggctctgtggctgctgtggaagagcggctccgaggtcgggagacgttgctcccttggagtgggctttctgagggtacaggctcttcttccaacaccccagaggaaacagacgacgttgacaattccagccttgatgcctcctcctccatgagtgtggcaccctgggcaggggctgccaccccacttctccccacagagaatggggaaggaaggctgcgggtcatcgtgggaagggaggctgactcctcctctgaggcctgtgttggcctggagcctccccaggatgttacagaaacttcgtggcaaattgagatcaatgaggccaaaaggaaactgatggagaatattctgctctacaaagaggaaaaagtggacagcattgagctctttggcccctgatgaccggaacacagctgaggacccttgtcctcagttggaaagatgagcatcagatcaagaaaaaggtctgaggcagaatccaagatctgccaggaaacacacaacaaaacatctgctgtcctgggtgggagggaaacttcatttcactggaatgagttgggagagaaaggccctcagcttttagagacacaaaaatccatgaagtctcttcctttctgggctttgttagtcagagcaggggatcagaggagactgaagcagaaaccctgcacacgggcccaggatgtggctgattttgtggttccggggagtatgtgatgataatcacccccagcagattccattacctcagcagctcttgttcccccgccactggcagttctgcaatgccatagcattttccagagctaagatctctgggttgtatttgctgacagcctgcaagcttgcatgctctgaaagattttttttagtttttaatttttttgtagagatggggtctcgctttgttggcgcaatcctcccacctcagactcccaaagtgctggaattacagttgggagccactgtgcctggcctggaagactttcaacttgtgtctcagtgcagttcttgactcacctctctgggcctcaggttctacaaatgccagacacctagcgaagagctctgcaggctttccactgcctgtattggaaatcttgcaattcacataattattcagtcactgcctggtacctttatcttcccatcccactaatgttagtgttttttaatggagcttttattctgagaatatgtgtttgtctgtttgtttgttttttgagacagagtctcactttgtcacccaggctggagtgcagtggcacgatctcagctcactgcaagctctgcctctcaggttcaagtgattctcctgcctcagcctcctgagtagatgggactgtaggcacctgccactatgcctggctaatttttgtgtttttagtagagacagggtttcaccatattggccaggctggtctcgaactactgacctcgtgatctgcccgccttggcctatcaaagtgttgggattacaggcttgagccaccgcacccggccgagaatatgtgttgttatttatgactggattatgaagaatcaggagaatgcatttcatgtctgattctgctgctaattaagtcaatcatttaatttttgggacctcagtttctttgtaagtaaaataacacctgcttgttcttcatccctgggctgttgggaggaacagatgagacagtggctatagaagcacttggaaaatgcacttgtcctgttttgtaaaataaaaaggtattaaatgtgtatttctgccatgtacctaatgattattcagtgcgtatatatctgaaaagtcatgttgcaaatctttctgtgaaacagatgctattttaaattcactgggagaaatatcctatttaaagtaat

SEQ ID NO: 566 - protein, 623 aa, Homo sapiens
MACYIYQLPSWVLDDLCRNMDALSEWDWMEFASYVITDLTQLRKIKSMERVQGVSITRELLWWWGMRQATVQQLVDLLCRLELYRAAQIILNWKPAPEIRCPIPAFPDSVKPEKPLAASVRKAEDEQEEGQPVRMATFPGPGSSPARAHQPAFLQPPEEDAPHSLRSDLPTSSDSKDFSTSIPKQEKLLSLAGDSLFWSEADVVQATDDFNQNRKISQGTFADVYRGHRHGKPFVFKKLRETACSSPGSIERFFQAELQICLRCCHPNVLPVLGFCAARQFHSFIYPYMANGSLQDRLQGQGGSDPLPWPQRVSICSGLLCAVEYLHGLEIIHSNVKSSNVLLDQNLTPKLAHPMAHLCPVNKRSKYTMMKTHLLRTSAAYLPEDFIRVGQLTKRVDIFSCGIVLAEVLTGIPAMDNNRSPVYLKDLLLSEIPSSTASLCSRKTGVENVMAKEICQKYLEKGAGRLPEDCAEATAACLCLRRRNTSLQEVCGSVAAVEERLRGRETLLPWSGLSEGTGSSSNTPEETDDVDNSSLDASSSMSVAPWAGAATPLLPTENGEGRLRVIVGREADSSSEACVGLEPPQDVTETSWQIEINEAKRKLMENILLYKEEKVDSIELFGP

SEQ ID NO: 567 - DNA, 1837 bp, Homo sapiens
ctggctagagaagccgcagcccgcagtgtccgacccagtcgtcccgcgccggagccggccccgtagcgtgccatggcctgctacatctaccagctgccctcctgggtgctggacgacctgtgccgcaacatggacgcgctcagcgagtgggactggatggagttcgcctcctacgtgatcacagacctgacccagctgcggaagatcaagtccatggagcgggtgcagggtgtgagcatcacgcgggagctgctgtggtggtggggcatgcggcaggccaccgtccagcaacttgtggacctcctgtgccgcctggagctctaccgggctgcccagatcatcctgaactggaaaccggctcctgaaatcaggtgtcccattccagccttccctgactctgtgaagccagaaaagcctttggcagcttctgtaagaaaggctgaggatgaacaggaagaggggcagcctgtgaggatggccacctttccaggcccagggtcctctccagccagagcccaccagccggcctttctccagcctcctgaagaagatgcccctcattccttgagaagcgacctccccacttcgtctgattcaaaggacttcagcacctccattcctaagcaggaaaaacttttgagcttggctggagacagccttttctggagtgaggcagacgtggtccaggcaaccgatgacttcaatcaaaaccgcaaaatcagccaggggacctttgctgacgtctacagagggcacaggcacgggaagccattcgtcttcaagaagctcagagagacagcctgttcaagtccaggatcaatcgaaagattcttccaggcagagttgcagatttgtcttagatgctgccaccccaatgtcttacctgtgctgggcttctgtgctgcaagacagtttcacagcttcatctacccctacatggcaaatggttccctacaggacagactgcagggtcagggtggctcggaccccctcccctggccccagcgtgtcagcatctgctcagggctgctctgtgccgtcgagtacctgcatggtctggagatcatccacagcaacgtcaagagctctaatgtcttgctggaccaaaatctcacccccaaacttgctcacccaatggctcatctgtgtcctgtcaacaaaaggtcaaaatacaccatgatgaagactcacctgctccggacgtcagccgcgtatctgccagaggatttcatccgggtggggcagctgacaaagcgagtggacatcttcagctgtggaatagtgttggccgaggtcctcacgggcatccctgcaatggataacaaccgaagcccggtttacctgaaggacttactcctcagtgaaattccaagcagcaccgcctcgctctgctccaggaagacgggcgtggagaacgtgatggcaaaggagatctgccagaagtacctggagaagggcgcagggaggcttccggaggactgcgccgaggccctggccacggctgcctgcctgtgcctgcggaggcgtaacaccagcctgcaggaggtgtgtggctctgtggctgctgtggaagagcggctccgaggtcgggagacgttgctcccttggagtgggctttctgagggtacaggctcttcttccaacaccccagaggaaacagacgacgttgacaattccagccttgatgcctcctcctccatgagtgtggcaccctgggcaggggctgccaccccacttctccccacagagaatggggaaggaaggctgcgggtcatcgtgggaagggaggctgactcctcctctgaggcctgtgttggcctggagcctccccaggatg

SEQ ID NO: 568 - protein, 587 aa, Homo sapiens
  VARIANT (1)...(587): Xaa = Any Amino Acid
MACYIYQLPSWVLDDLCRNMDALSEWDWMEFASYVITDLTQLRKIKSMERVQGVSITRELLWWWGMRQATVQQLVDLLCRLELYRAAQIILNWKPAPEIRCPIPAFPDSVKPEKPLAASVRKAEDEQEEGQPVRMATFPGPGSSPARAHQPAFLQPPEEDAPHSLRSDLPTSSDSKDFSTSIPKQEKLLSLAGDSLFWSEADVVQATDDFNQNRKISQGTFADVYRGHRHGKPFVFKKLRETACSSPGSIERFFQAELQICLRCCHPNVLPVLGFCAARQFHSFIYPYMANGSLQDRLQGQGGSDPLPWPQRVSICSGLLCAVEYLHGLEIIHSNVKSSNVLLDQNLTPKLAHPMAHLCPVNKRSKYTMMKTHLLRTSAAYLPEDFIRVGQLTKRVDIFSCGIVLAEVLTGIPAMDNNRSPVYLKDLLLSEIPSSTASLCSRKTGVENVMAKEICQKYLEKGAGRLPEDCAEATAACLCLRRRNTSLQEVCGSVAAVEERLRGRETLLPWSGLSEGTGSSSNTPEETDDVDNSSLDASSSMSVAPWAGAATPLLPTENGEGRLRVIVGREADSSSEACVGLEPPQDX

SEQ ID NO: 569 - DNA, 159997 bp, Mus musculus
  misc_feature (1)...(159997): n = A,T,C or G
tcttaaagggtggattaaggaggatcttataactcccacctgtccttccaaatatcagtcatcaggatgctcgctcttcatatgagaagacccagctaacttctgtttctatggttccaagcacccacacttcctgctgacatgattcatcacttgctttgtttaatcaatatttattcagcacccactgggtgctgaatatagaacaatactttctagagcagtgagactaacaagagaagcaggagtcttaagctttaccaactcgtgccctaatatggataacaagtaatgctgataatatcgcttgtggttgaataccaagaaatagcaactgtgtctggcatttgatacctccaaaagaaagcatttgtctctccctgcagtggtcttactacaaacatgaactttttgcctcttcactctgatggcatgagatcctgccatcattttttgcctagctccccagaatggccttctggcagatctttttgctttctttatggacacactttgattcattcagattcagcactcatgggaagccttcagagtcataaatcatatgtcctcatgcctctatgaagaaccttcctccatgaatccccacccttcacttcccaccccgtacccctgtgtccttatgctctccaagctcctgtcttccagccttgtcactggatctccacaccgagcacaggactttcattctgttctcacatttagcaaacactttgcctctgtgggacctgagtttcttctccagctggccctccggtattcatctgtgacttagttataaatgtgacctctgtcaagaattctctcttcctgcatcagatttactctatcacaacactatgctgtttccttcactttagagtactggttactacttgaaaacacctctacttttgtttccttgcttccttgccttctccttcttggttctggaatataaaccagacttccacacacatatagcaggcacttgaccactgaactgcaccatcacctttcaattttctttgtatcacctccctagcactcccttctcaccaaattacagctccacaggctaagcatatcttcctcccttatcattgtaagatgcacagcaactgaggtggcaacagagcatgtgcagcaataaatttagaccctgagcctagaaaagggctcagtgattaaggtgcttgcctcataaacatgaagacctgagttcggaccccagcaagccaagtaagtttcagaaggacatggtggtctactcggaattccagccttagatgaataagataagactagctacattgttgaatttggggtttggatatgacaccattcttcaatgaatactgtagaaggccagtggacaacaattccttatatcagcctttgaccttcacgtgcatatacatatatgaaaaacatgcaaacacacatacatgtaccacacatacacacacaaaaatagaaaaaggaaaaaataagtagtaaaataaatttcatgaatcttctttcagaagtcattaggttgttatgttaggaaataactttgactctttgaaaaccttttgaattaaaggccattccggaagtcaaagtcttgagttaaaaaggaatagggtaattgcctcagcttgatgatgagaaaatgaaggttaataggaaattctcctctttgacacaaatcagcatattgccttaaaagaaagacactgaaaaacctgatcctctcctctctagagacctctctgtctaggatagtgccaggtacacggctgacatcagcaaggctagttctgccttcagacacattaatgtactaatttgagtgatttctgttactagggaagagagaaataagctcagctccatagctccaatatccaacacactgtatcactcataggcattcaagaatctgtcagattgtgagctaaagcacttttcttcatcttggcacattgggtagaaattttactcgcctgccatgtggcttcagggaccagaaaacataaacctctacacgacttccataataatcttgtactatgaaaaacagtgcacatgcatgtattaaatatccatgtgttccaagacatgtacagcttcatcaatgatttggctatagttgattttatctttgcattttgaagttgatagtatactagaaacagacaaaaatttttgtctttttactttactgagtcacacgttgatgatcaacgtgtgactcagtaaagtggttacaggctgtaatgggggaaggcaaagctgaagaagactttcaaggacacaatgaataatgtttgatgactcatggtagaaaagaaggggacagagccatagatgactttcttgctgggctgaaggtgcagaaagcccaggatagaatcatttaaacaatggagttcagatgtctagaaatgaggaacactacagactgcattttcccagtgctgcctatttggacactactctatcgaagttcaactttgagaactaccttcagtgagctctgcatatataacaagtatgcgaatatgaacaggagacaatgcttacacttaaatagatggactttcaaccacaaaaaagggccatattcaaagtcatagttctctgcagtcattcaatgggtcaagtagcctgttgaagaagacacagcatctcctcagagtccatcttcttaggaagagttcagattagtgttctaggacactcacgttcatcttgcagttgtctttggtgactgccaaaactgaatgacagattgtaccatgtatcaagggctcacagtttttcatagtatatttttagcaattgaaaactggtatttggggacttccagactttaccacatgggcccttctaggagaggaagttcaaagaccttgctatggttaatgttacaaagcagaaaggtcataagttttcttttaatctgaaacacaatattttataggaattaagagtctttttaatctgtggcttttgaatatggaatgcaaactttaaatggctcataatgtctgggtaagggcattgcaattgtgatttaaaagctgagtaatagcctgtattcaattagattctttctgagttataacatccctctcattttaatggaaaggtccttgaccaatgatgtaagcaactgaagacaaaattcaacgataagcaccttgacttgcactctttgtttccttccaaacaatgtgctatgggccagatacttccaaaagaagtgcagtctccaagcaggagtaaatattaactcctcaaatctcactgtgaatgatgccatcagaaagtcaatgtagtgttatttaacagaaaacaataaaagtgtgttattcccaggaaaatgcatggaactggacattgttataagtctcacaaagacaactatttatgctttctttcatagtaaatccaaagaggaaaaatgtgaaataaaagggaactatagggtatttagaagggaaaagatgggagaataagaaatggagatggagagggtgaatatgatcaaagtatattgtatacataaatggtgttgttataatgaaacctctttgaattattaatacatttttaaaaagaataacaaatgaaaataacaaaattagggtagtgatgcaattgtagctctttgttttaaggattagatagagaggtcctctctgtgctttcttgtcctcagaatgcatgtttacatgaaactttatgcattaatgttcatagaggcatagcccccaaatggaaacaatccaaatgttgaccaactaacaactaaaactaatttggcatattcaacagtaataaggactggcatgtggatatgagctacaatttggatgaaccattaatatgtcatggtatcccaatcacaaaagtcactgttgcaaggacattttccctgaggagacagagtagcaccactccctcctcccgaaagacccaaggacaaatgacaacaccattccatccaaagtttcccttggagccaatgagcctattgggcttagttacagactgtgagtgagaaggtttggtaagaacgtaggtgacccaaaagtctccacacagcatggatgatggcttctccatggtcacagagatggagaacctcttattattttcccccacctatatactctagtatgtttctaaaaccttttggctatatgcaattaagaccaaattctataaaaatcactggaaagactggctggacacttggttaaaggtccagtgacccttcccatgtcctcaccatatgagagaaggcccggtcattagtgaatcactcaggtaggcacagctgacctgatgaatataacactcatttgctcagaaagtagggcaatgtgtcaaccacataaacctgacttcactgaaatggaacatgaggcataggaatcagattagtggttgatacttctcgggtactggggaaaagggaatctgctctgactgctaggaaataggattccttgagttgtgacaaaggcatgctaaatgttaatagagatgatggttgcacaactctgagtatgctcaaaatccacaggaatttccccttcaaaatgatatggcccatgatagatggattatatctcaaaaatactctcttgtgtttaaagaggttgttctaggttatgaggttaggaaaggtatagtcatagaataacaatgagtcattaaaacacatatatattcatgtgctttaaaatgaataaattaaaaataccaaaggaattatatatagtatggaaaaattaactgcattttatctatttaattttattctgtgtgtatttgtgttttgtatacatgtatgtttgtgcatcacatacatgcagtatccaaaagagggcatccgatcccctgaaactggagttacagaccattgtgagctgccatgtgtgtgcttggaatcgaatctgaggcctctgcaagagcagccagtgctcttaatcactgagccatctctgcagaccttgactgcattactttttataatttatccccaaagcagattctatgacatctgctttattagtcactgatctcatcgctacaacaaaatacccaacaaagccacttctaggaggaagtgtatatgttggctcacagtttgagggtacagttcatatggtagagaagtcctggtagcaggagcctgaggcctacaggtcacactgcatccacagtcaggaagtacagagtactgccagtactcagcttgctttctcctttctattcactctagaaaccaaagcccatcagaaggtaccaccgataattaaggtgatattccttcctcaattaaactaatctagaaaagccttcacaggtcaggtagacccagaagcaggtttatctcaataaaccctcatggatttacagacacttggaaatcctatgaagctggtgatccagatcaacccccatgcctgcttatacacaataaaaactcacttaaaatgaatggatgatttgaggccagcctggtctacagagggagttccaggacagccagggctacacagagaaactctgactcagaaaaccaaaaaaaaaaaaaaaaaaaaaaggatgaatcaatcaaatatacggtcttgggatttaaaatatctgatgtcctgactttctgtatgacacaaaaagtgagttatagagtttaagaaagagaagagttttgggtgaactgtagtttgttctgttttgtttgtttatttttctgtttatttattaagaaactggtagctacttgaaacctgagatctacagagaataagttgaggatttcttgaaaggagaaagacaaacacaaagaacctccatgggccccacaccattatggaagaagggttgtgggctgcactgtgggaaaaagcatagagagtcggccatggtgaccaggctgctatatcagcatagtgcccttctgagggaatcagagccaccgtgcttcttcctcggcatcccacgtggtgggctttgcctgccgccctggatctaactggtcaggaggcatgctggtgaagcacaggccttgatgctgatggagcgtttgttattgtcactgctctcatctttccttatgcagaatgtacagttgtgcagttctcaaaaaaaaaaattcaatgctcaaaaataattcattgacagaaagggcagctacccagatccgaccatgatagcacactacttatggatggttcttcacaggttatgcaacctaaagtctatggcttagtcagaactagaaggaactccctttagagcacagtgaagttatttaagagacattctctcacatagttagcaataaatgaggggaaaaaacacaatggtggtgttgctttctgaatgtggtaaaatgtgtttataaagcaagtacagtaaatgtgtcttctccaatagctctcaacattggtgtcttaacctcctaaattatgtggcatttccttttcagttcacaattaaaccaggacagaccttaagcatgagttacttgttcactgtggagctgctcacacctcagttaggacggatggattaccttaaccagccatctttttttgtccttgcctgtaacagctggaacaacataccatgggtactaacatagcgagccttctcagccctggggtagtaaaagcaatccactccagacttagcagtggcatttagccaactgagaaatggcccttgtgcacttagcctgaagtctagaattgttttaaccagcagaatggcttctgcaagaaaaccacagaaactcctcagtacagcacagaaggaactagaaagtaacggggctgcagtcaaagacactgaacatcgtgggcctaacactgcaaacacaggcttgaggccatcagttcagaagagcgttcctttccaagtgcctgacaatacagcccttataaaatgcttgccaccagatgaggagctcggccaagggccagtgctgtctgagatctgttccatgctactgaactataccaattgtggaacagagctgtattaaagagaacaggaagtctgttgtggccaaggcaatttgtagtggtctgaaagcacagacttctcagaaaggaaattctttttaaatgtattaatacccttagcaagtagaactctttaaccttctattttgaacaagttacttatgctctaccacaatcattttaaacaaatataaaataaatgggaagggaccaaagttttgaaagatttaacctcatggcctattagttgtttcagacaaatgttccagtgttctactgagatagttagcatgttacagcatgtgcacacatgcataagcacattgccattcttatgccatgcatgtgtggtacagggtatttagcatacacagaagttgcaaaataatgttctagatttatcacagggtttcatgagcatggctctactacaatggtcttatttaataggggttcagcatcgtttcttgatgatagatcatcagaaatcttccaatgcattgtatacatgatgaggtggattgcctaactctacaggagtgacttctagcctcatgagttacacatagatattaacttacgtatttgtctatcttcatgatgctgggtcattaatgcaatagccatgtgagtgattatgctttcatactgaacccagctcctgaaactcactgttttgtttcttaacctgctaaaccaattaggtacccactctttttaaccagctaagcagtgatcctaagaggacaataagtttgttgtgtcactctgagccttgtttggaatcatgttactcccacaggccttaaggactatcttagaacagctgtaatttaataaataaaagtaaaaataaggaactaaggtcatcattttgggaaatgagaaaaaatatcgactctctttttttgtttaacaatatgactgttgtattttttatgttatagaaaaaaacacataaccttcatttttaatactttctgaaaacaaagcaggtagccctgtatatctgtgaactgtcttgccaaagtcatgcctgggccactgacctctaaacaagaatcctcaaggctcagtctagacagttattagtattcacagagagactgacaacaaacaaacttgagggaagaaatgtacaaggaattagaaatggaaaaagtccagatattgctaacctggctccattgcactctacacggaaacaaccacttcctggtctgtctgcagacttctacttcatctgcaagatctacacttgctctctttgtctatactaggcttaagatgccaatcaagctctagcatcctataggtgccaagacatccagaagcttggcgagcttgccctgtcgctgtatgtcaagctgagcattaccttcagatactgaatggagtattccggaacactcccaccccaccccaccccctttattttaatcctctgatcttagattcacatggcattcttcctctttctcatgctgaaacccacacttcccacatgcatgagtatgtacatactcccaaagacaactccatgtatcatacccattcacacatgcacaggaaaacacaaattgacatagtacaggcatgcacatgccacacttatgaacagcatgcaaagttatgccatctgtacacactacaataacacattcttatgcccaaccacaaccacatgcatacactatactactcacatggacccactgagccgctggccacacccacacatagcagaaactctgacacttttatatacattcacatgtccttacactcaacacaaactataggcatacactcagaaaattcaacagataaccggctatgctctctattgaatattaaggttatggcagtgtcaaaaaattattttcctgcacgggactagcatcaggctgaagagaatatttaaagaatatgccaagcctgagatcaggaatgacccacagcatggctattgctggcaagctgattgcagcacccatgagctcagaaggtgaaacaccaagacccgtcatgtacctgtttgtcctaaactaagagtgggttttgagattcttgcctatttcaaccactaatccttaagcatgccttgcatcaggaccagtttaaataaactgtagttgaaactcttaggaatcatttctgtttgagaggatgtgtgtatggtagaaaaactctcagtgattggtaccatgagtggaactgtcagtcctttcccacataaccatgagagtgtacagactgaaggaagcccgtggccatgacacaatcactggaaaaagaaaagccaaaagctggagacaaagcaagctttgggattctagtctaaatgtttcaaggcatactttacatatcagtttatgtgaacctatttaataggatgcttcttgtttaagtagctatttgtttgaatttgtgaaaaaccctttaattatttcaacagaaaataacatttaaaacctgacctatttgtttcaaagtccaaatttattgttcttcttccaatctattccaatctgtatatacacacacacacacacacacacacacacacacacacacttcctaaaaggggcaacatcagcatgttactatttagaataggattttgtaagttttaaaaactcatttccaatttattttaacagaaacagcaggaatagtaacaaagattccaatagaaacaagtcacaaacacaggtgttcacattttttcctctcagtagtaaaagcgatcttaaaacttttgagttgcacacatgaagcagcaactaggggggtggtagcagccatgtctttagggctgtttggctcattctcgtttttatagggattaaagcagtaaaggtggggaagcctctctgcccagctctatgacaatctgttccggtgtttgcgggatagtggttcactctgctttcaagatgcaaggcttaatttcttttcattgctcctcctagacagccacggtttcttgggatatccgaacactctattcgacggtaccagaagaggcagagcacagggcagaaagtctgctggtgaaagaggtaaatgtggtgcttttattcattaatctctaaaatgtttgctcccacccccagctacccaccaggcaatcttagcttccttctctaccactatcctccagcatgctcatctgaaaaggggaaatttacattcaccacatatttaaaccccatctttctgtagccatttttgattgtgcggtaacttgttctgttttaggattctctttcctttgttctttttttttaaacgtccacgctgaggagaatttgagtatgttaataggaagatttgattttgttttactactgcagacagcgtgtgtaaaatgaagaagactgtacctcatgagaatattggattgtacagcatgttctcttaactgctatgaaaaggggcgatgataaatttctctgggcatcttgacggactgacttgaattcagttggtggaacagtctccttatcttctaaccagacaccaggctgcacacagcagctgagcaccaaatatatcaagtcaaaaaaagcagataaactgcaatttttctatgtcacaaaataaataaacagcctagcagtggtggcacaggcacttgggaggcagaagcaggtaggtttctgagttcgaggccagcctggtctaccaaatgagttccaggacagccggggctacacagagaaaccctggcttgaaaaaccacaataaataaacaaacaaacaaacaaacaatagtgtctggggcaggtaaataactaggaaataagagaacagcacccagagtccccacagaagggcaagcagttcaacagagtgtccagtgccaagggatattttggaaggtctgtttctcttattacctaagaaagaaatttcacagggataaacatttaaattagaaaaaaaaaaagaaacaaaagttacaaaagggtaggagaacagtttaaaatggaagcaaggaagactgacaaatttaactctgtaaaagtttaaatttcagtatgacaactagtatcctaaaaaaattaaaaaaaaaacaataattaagccatcacctacgactctttatatcttctaatatatacaggatgcatataaattcctaacagccaaaattttaaagatccattttttaatgtatatgtgtctgtgcctgtgtgagctgatatgctccctgtgcatgcaggtggctctggaaacaggacaacagaccccacggaatgtggcttttatgctactgtaaaatggcggttatgggtgctaggaaccaaacaagggtcctctgcaggagcacttagtgctctaaccactaggccacttctccaatattcagaactctgcagatcttgatatgtgaaagacaacccaaggaaatatatccaaaagatagccaaaggtaggtaaatatagttaggcaagagccacgtcttgggtccatgtacttgtggccttggaaatacaaattgaagtgaaattctcatgtaatacaaaaaaaattgacatgaaaatattttattatggtgacagtaaaggggaaatgccattgccacacggttcaaaataagcccataacttttgaagtatgatccacaagtaaccttaaagtctcatatatatgtatgtatacatatacatatataaacaagcataaatatgtgcagatataagtataagccttgtagtgctgatttggaaatttttaaatatcaatagggattctgtttaaaatattttgttagcatagctatattttgtaataatgcacagccaataaaatatatgtatttaaaagccaggcagggtggtatttaattcccggactcaggaagcagaggcaggtgaatctctgagttcgaggccagcctggtctacagagggatttccaggatagccaaggttacacagagaaaccctgtctcaaaaatcaagtgtgtgtatttttgtgtgtgtgtctttttatatacatatatagatatatatgtatttaaatatctgtttgaacttctgtaatacattgttatgagaaaaaattctagccacagattgtgaagtatgatattactaaagatgtaaaactcattaagcccgcgcataaatatgcaatattaggtcttgtaggtcaaagatatataaaagtgaatttttcaattaaaaacactttctgagaaattaattcaaatgctgagtaattaatttttgaatgctgccagaattggcatacatggccagttaacccaaatcccacaaccaactcaaaactttctccactgatctttaacaatgtatgttttcatgtttaatgctgtcacctggaaaccacatgggttcagtgcaggaggcctcccaggtatgtgggctcctagaaatctgaagttctgtgcttccagagctgctggactacatcttccaatatcgttcactcttgcagttctctaaggaagtcacctttccttgccttcttttttgttacttttcctgtgggaaaacatctttcctttgctttcattctactttgcttgccgttcaaccccttgcagacttctctctcttctactcccagtttcccacatctcaaagaaaagaattcctccaaagaacggaaacaaagaagaaaagaaatatttcatttttctgttgattttctgtatcgccaacaacacaaaaggccctggattgtacttggtttgaaagatggagatgaagcagagcctgtgttttacaatctgggaagcaggaaaatgctacttacaagggctcaccccccagtagccaggcctgcaggtggcagataaaaaggaaaagggtttacagagagctgctttaagatgaagaaatgcacacacacacacacacacacacacacacacacacacacagagacacacacacacacacacacacacacacacacaccaccaccaccannnnnnnnnnnnnnnnnnnnattataagtaaggctgctatgaacacagtggagcatgtattcttgttatatgataaagaagtggtacatttacacaatggagtactgctcagctgttaaaaataatgaattcatgaaattcttaggcaaatagatggaattagaaaataccaccaccaccaccaccatccatccatccatagaataatgctgaaagaacagtcttaacctcaaatactaatagcagccaatcattactgcctacttgccttgtgccagataggcatctaaaccattcacttataataattatgaagaaatgttacagcaaagcatcctcttttaaagttgaggaaactgtgtcaaagaaacattaagaaacttacacgggcagtatcaaacaagcaagaatatattcagtgtctcatcccaggccacagaggcagagtcccttgacttttgatggacaatgctaactgccagtgtgaagctttaccctagtgcctactggaaggaatctgcccttgcaaccatgctgcagcctctgcccaggccatcctggtagatacagttattagactgcacagtaggaacattgttagagtttctgaaaacagataaataaagctagcactaaagtggactcagacatttgcagggtttttgcagaatgctgtactgagcttgcttcttgttcctccctgtatcaaattgcccaatgactccatgtggtggcaaggacaaatgtcgtggttgctaggcaacaaattggaaagaatctagtttcaatacatctggctcaataaaaatcttgaattttctctcacattactctacactgacagtgcacagctttttgtcaaaggcagtgggcattcttttccttagtctcgaatgatttcataattttaaagggaattaaataaaacgaagcctgtttcccttttctacttagtgattatcctccctgtctagtagaagaagcccgggtgtttcccactcaatagtattgactcattttgtatctatagtgttgccagttatgaaaacatctagccacagttcagcagcagtgtacattcaggaccacagttaagcatcctgcaacccaggcaacataaactcactttacagcctcatgcacaagcacaagttaattttcctaattgcacagagtggcaatctaacctcagctcactctgactctggactccaaatgtctctaaacctctacactttatatttccattagtaacaaagaaacatgttgtttattattttggcatgccattagtctttctgccacagtttctccatcttctataggaccattaacctagtgatgtgatcctgaaaagtaaaactagcaaaagtatggaaaaacaatgagttggggagattgtctttatcctccagagtactttatatacttctagagagccattaaaaataagtaaaatcaatgttcctgggaaaaaaacaggcaccactcccactggggaccagggcaatgaaagagtctatgtatagaagtcatggttcctgagcaaagcttctatagaaaagtttctgtttaaatatgcacaaaggggcaatatgaagctgagcccactaacttaaactaagctgctggtttattctctcttaacaaaagaagatgaaggaacagcagagtgagcaatatgagagcttacaagaaaacaggccctgggggcagatgagtgaagagggagacactggccaaggattagctttccagttgctttgataccaaagcccatttggttaacagaacccaaccactctataggaacaaaattgacataaaatgagaagaaaataataaagtcaagaatataggtcttactttggtcctagaataagatacttagggactaagtgttatggaaaccttaacttaaaaacagaagtacatgccttcatgcctgtagctagactggtacatagatgaacacagtcctgatgtcctattgttatgtggacagtacagagttaccatggaaagctcatattttatgcacactagaaatagtggagttctctaggaagagaaggaaaataggacttatgtctgaagagaaaatatgtagtatatttaagggaagaaaactttaaggagccatagaaaatttatactaaaagctcaaagacctcctaccttgaattaagtcacaatcaatttcatattggtaggattattttgcagaaacacagttcaccaaagtattttcaagtactacacagacagagacacacaaacacacacacacacatacacacatacacacatacacaggggggagagcaggattaactttaactagtagacatccattcaaaccattttagaagcaaatatgttataaactattttccagatttacttgaccatggataaaacaatctgttttctcctgctattttgagaaacacatttgataaatgctggccttaagctgatacaaagaaatcaccctgaatgaaggactaaatacatttcaactaaaatacatggagctatccagtaaagctaacatgcatgtttgtctttggagcatctactaatgatgcaaaggagaatattgaacctccaagagcaagggagtggtaatttctcctcataaccaaatctctactgttaattcttactgttgtgatcaaaatgtctgcttttgttcatgggtggctcattacttgggcacaatttccaagcaagcatctgagaaagctgttctgtgaactcttcctcatcaagaaaattgccagaataaacagggccaacttcatgtttaaagtcaataataatgaccagaaaggccaaagaaacatactttttcagccattaaatacctcctctcaatcccgtgagcaattaataggctatttttctatttttctgaaagtaaacttgggtccaggagcataaacatgatgttattgctgctgcccccaatttagctcgctgaagttaattatggcaactctctgaagggttaagttctttaaatagaaagttcctttcccagtgaccattgttactgtggatcatggtgaagttaagttagcagggaagcaataaaaggtatcaaccactccctgtatggctggactggattaattatttagcatgtatcactttgctaagcagatgtctcccatctgcttcctgaagagtgcagcaccaggaaaggagtcacacacctgtggtcagacttacacttcaatctgatgagcaccccctgaggtttgctgagaaaaggaagcaaggttcacatagcaagaaaaaaatataataataaaaaaaaacccactaaaggatagactggttcctggggttagtgtcaaagcctgaagaaatgtcaggcagacatgagattattaatattccaggagggtgattctacagacctataataacaagaatagcattgttttcatggtaaaagtaacgagctaataaaggagaaagaccttggcaggatttggggactaagaaagaaaggaatagagaagaatgatccaaaagtcactgacacatatagcttggactactgtgacattaacttaaataagagatgtagaataaagtaaagattactggtgcaggctttgaaatatggaagagaagcctctgtactgaggaaagggaagtggaagggagacagagaggggaggggaggggagnnnnnnnnnnnnnnnnnnnnaggagaggagaggagaggagaggagaggacagagacagaacgatagaagacatacaagaaagagaggactgtataggttcagaaaatagatgagctgggtttgaatgggtggccaggactcttagttacatccccaactaaggggctgttcaggaggaccttgcataaatagaaggggacagagatggggccagccaagaagtgggacaggaagactgagaactgatactcagaatcaaacaaaaatgaacagcaaaagtgcatttacagcaagctcaccgaatgtggtaatttggagtcattaagggtcttgaagagaaagttttggaagttagtggtgtggactggttatagttgtagtatattaaagcccaagacgatgtgggaaatgctaccatcaaactgctatctgtaaagtaccttgggagtaaattcaataaggtgttgtgctcttgaggcaaagtgctttatgcacagagaaggtaaaagttgttcactgagtcatgtattgatcttgaagttacataccaaagtaccattcactaatggaaaaggcaaaatttcccaacataaaaagcactgtagtgaaggaaattcatactaagaggagtgctgagaatgcgttttcttcctctttccctccttcctgtcttgccacctagattttgccagaaggcattcagtgagctcaggagaaaaatgggaagtacaaattagaagccacatcacatggtttcctaggacagggatagaagttagcagagttggagggcaacttgccatgatttcaagtgagcttcacactgctcacctttgttagcgagaaggaatgcgtcgagtggtaacagttacttaccttgtttcaagaaaacttcattttatttttcttcctggataaaatgatgaatttcatgtctgactttgaactgccaggcacattatgctgaatccattcatccaaagtgtctttgcttagtgtacttgatagagatgtttttatacctaaagaccatgaaatcaataaatatgaaagtctttcaatagtttatttgggagaataggttgtattcataattaaaaaggattaaacatatgctatttcctgttctgaaaacactgacagcagaggaaggacacttagactaaaggccagtgtttcttactttaaaactgacttctgttctataacatcaggctacaaaatccatttacattcctaggaacattgagaagcatgaaacatttaactccagccattaaaaaaatatatattctctcccaacaaaattaggattaataacaatatttcatttgtgtatgtatgttggcgtttatggttgatagttttattaatgaatgaggttctgtttcttgaataaaagttttgttggaagttgagagacttcatttggtgtatactttttaaaagataattttgaattgaggcttattgtatggttttaaaattttaatgggaatattaaaggatattaaatatgaaacttaatggagatactaaatgtcagttttcctgtttggtctgctctcattttcacatgagcattcaatttatatcatagctagacagaccatagattaggatgttcaaaagcaaactgttaacaccacatttactaatactaagcacacaaaagacaagaaaggtaaattaaatgcatatagaattgagtgatttcaggataaaacataccacaaaaagtcctggtgaaaatactggaaaaattatcatttttcattttagtaacctgaagaaattaattgtctgttcactaaaatctctagaaaaaaacagtcttggtaaatacaaagaaagggaccttccaatataaagttggcttcttcatgggaacaataagttccctaccctggcccccataaaatgttaagcagtggaaagaagcccatgtgtaccagttgggaaacttggaatgtaatactatgaattcagtttttgagttgaaactgagtcttccagtcatattgaattataacccaagtcttatgtttacatgagaggaatttttgaatcataaaacaattgccaaggggttttagtgtcagccattattcacatcctaaaaagttactaggaagtcttgccaagggattacaatatgtatttccaggctaggcccaaatgttatttgtgaaagttcagctgattgctttgatagagcacgttttaagaaaataaatcaacatgtgtctcattgttaacttaagtttagcagagctgttgtgagagctttcagactactctcaatttcaaattaactgcagaaaaaaaatggcaatggccttcacttctttcatttacagagacgacttcatagacattctgattgctatgagcatattgagtctgcatatgtacatatagcactatctaataccatgtgattttttaaaaatatttttatttaatgtgcattggtgttttgcctgcatgtatgtctgtgtgaggatgtcagaagttctggaactggagctgcagacaggcatgagctgtcatgtgtatactgggagttgaacccgggtcctctggaagaacagccagtattcttaaccactgagccatctctccagcccctccttcatgggatatttttaaaggcagaattgaagttcatcctgtaagattattccatagtatctgaaactaggtcatgtgtatatcacagtgtttgtggtgtttaatctcatttttccttcccagctgagtgtttgacaatcttgttagctgtccaacttgggttttaggcaagcagcaattaattgttgtgcattaagggaacgcacagcatgggtgatccaactgaagaagccattgttccctgtgctttttcttttgtttctatgatagccatgtgttaggtgaccacgtgtgctgctttgtaggaccaatcccttgtgctgttgacctggctaatggcacctctgttcctgctgaaaggtctcatgtaggcaataaattatccagtcatctgttcaatgtgtaatttgcctttattcacttaatttcccgatgcttcattttcaacatggattcaatagccacggcacaagtataaaaattgttgtatttcacaaatgtagaattactcagtgaggatgaagaaccacaatggtttcttttatggtcgctttcattttttctggcaagaaaatacttgtgtgattaaataaacctccatagccagaagggaaaataattttataactaataagccatttgttacctttcgagtactctgtagccaaaatctaatcatcagccctttgaagaggttgacaaattgtatggccaaacagaaattgctagtttggaaatcataacatgatttgaattgatcctaatgctcctctgaagagggaaacaaagtgggaaatgaaatattttctttataccacttgggggtgtagcttgtaactccccacttttctaaagtacttatattctttacttcagtcatttttttttaaagaaaaggactattagttgttatagttttaatataaaatgcctcacatggactcctgtgtttgaagagttgcagtgtggccaccagtgacagtgtttcagaactaggaggtgaacctcactggaggaaatgggtgacctggtgagaagcactgactgttgtatgcagtccctacttccaggactttctatgtttctttacttgtggcagtgtaagcaagaagtctcacactgagcggtgccttctctactgtgatgagctgtgcacttcccaactgtgagccaaaatagacccttcctctctggagttgcctcttctcctataattggtagcagtggagagaaaagtaactaattattattattatgtatcaaatacatattgaatagcccctgtgatgatctgtatatgcttggcccagagaatggcactattaggaggcatggccttgttggagtaggtgtgtcattgtgggtgtgggctttaataccctcattctagatgcctagaagtcagttttccactagcagccttcagacaaagatgtagaactctcagctcctcctgcaccatgcctgcttggatgctgccatgctcctaccttgtttataatggactgaacctctgaacctgtaagccagtcccaattaaatattatctttataagacttagcttagttgtggggcagtaaaaccctaagacagcccccaaaagtaaaatcatggttagagtacaatactgtttttaaaacctgtatgctgggtctggagaaatgtcccattggttaagaacacttgttgctatcacagaggatctgggttcagtttgcagcacccacagggaagctcataactatctgtaaatcccattacaggggacctgatgcccttttctggtttctacaggcatcaggcaagtgtgtagtccatacataaaaaatcaggctgttatccacataaaataaaggtaggggctggagagatgtttcagcagttaagagcactggctactcttgtagacttgtgctcagttcccagaactcacaccacagctaacaaccacctgttattagggcccaagatcaccagagaatgataccccaaactcgaatagtatgcagaagcaaagaacatttattcagctgaatttcctgcatgcagaggtctccccatttgtgaatgtagacccctaatgggctctcaagaccagcttttattgttagttagggaaattccagggaagggtgtgtacccttttacccttgactagttagttctatctttagtgttctgattaattctacaattggttaggttctgaagaccacactgggggtggggcactcacttattcattctagctacctcaggccagatgacaaggtgtcctctgattggctgcctacggctctggttgcctggatccagctcctggatccctgttctcatttctgggaaacagaaacttaggcctaatctcccaatctgtaagtttgcagcctatcatggagtcagcctgactctgagtttagtcctctcactgtagctaagttccagggaatccaatgtcctcttctggcctccatgggcattacacacaaacatgtttcaaatatggtgtaagcaaaatgtccatacatatagcacacaataaataaaaaaattaaaataaatgtgtctataattttatgagttattagaatccatggcttaaagatgggacctaatgccctaagtcagagtgatgagaaccaagccatgttatcacttgggcaaaatgatggattttgtctgatgaagtagcagtgtttctttatatcatttggaatcaactctggcatttcttattatacacacacacacacacacacacacacacacacacacacacacatattactgactacaatacctctacaaagattctgactttataacattcaggtagaactcagagagcccaaaggattcacggacctggtttttgaaatgctatcatgattgctctatagtctctgatcatgtcaagggtagctaggatttttgtatctaaacacaggcagaggtggaaaaatagatatacagcaaacaaaatggtaaatgaagaaaaatgtgcatcaggatatctctgaaaaattattagttctactagttcttgcccagtcttccgctttgaagtacacagtgctaggctccacgtgaaagggggtggggagctgatgtcttgacacagggctaggctccaagggcaaggaagtctgtaagggcaagcagaaaccactgccttgtaacatgtagaaatagcctgtgactttggatttcagctttgcttttggccaaagatatgctgtagccacaaccattgctgtttctaatgatcattttagaataactgtgtgggcggtaacagagaatagagagtaattttctatgcatagcatttggaagtgaagtgctatcaccgtgtagaagaaatgtgatgtgtttgtaaaatgcaccactaccacagaatcagagcaattgcagattgagaagggagtctcaagagccatccagccaaccctcgattttcaccagcccaccacctcacatgaaaccttgccagtaactgcagaagaactacaatgagaacataattcttcaaaatcactgctattgcatctcttcaaactctccttacacaagccaaggaaaacaagttgttattggcaattgaaatgaatgtgagttacagactggatcaaacttgcaagaagaattgattatttttttaaagcaaatattgatggagtccctttttatgctaagtgttgtataggagttattgtatctggtccttgcaaaattggtggtatttagatggatagaaaaagttagaattacaaagctactcatttgagatgccacagataatgaataagacaacagacttcaaaaccagacctggcagaacctaggacaaaaacacaattacactttcagagtgatggaccagatgtgttatagaaagcagtaggcattgatcagacaatgcatacgtttgctgaatggacttttgaagccagacagcttccatctgaatttttctctgtgtcacatgtgggtcccaaagtaaagaaatagatctcttcctgtctctctgatgtaataagtgagaatggtaaaagaggatttagtaagatgatgtgtaaggtgcctaatagaaaaatatctgacaaactttggcaatgggagagagacaaaggagaaagaggagggaggagagagagagagaaggaggaagaagaagaagaaggaggaggaggaagaggggaggggggagaagagnnnnnnnnnnnnnnnnnnnnccagtaaatttcatgagtagcaaatcttgaggtcagttaaatgtatggcctaatgcaaacagtgtgtgcaatacatataagtatacatatttatcatgtttgaaaaagctacacataggaagaaaagtccagtgacccctagatctgtgcatctgtatcccactaacaaacttcagataagttccgcagcagaagcatctcaccgagcccagtgctctgagagctcagaggctgaggctgagatcctaataagtgaaaatattttgccaagattgttggccaatatttttaaaaatgagaagatatttaaactactttgaaaattctgtcctaacgatagcatccaaagtgggtattgcttagaggagggttcagaggccataggcagaaagatgtaagtcttttccttaatggcatcagatttgaagtgatcataaaaacaagttacttgcttccctcctgtaagtccacattcacgtcaccttttctgtaagacccgtcctatttaaacacatctcccatcccttctctgctgagatcattcttgtaacattcccattctttgatacaaggcataatctgtaatttttgcattttttcaccagactttcacagtgacataaagaagagatggatttctctttgttgttcactgggaaattcttacaacctagaaccacttctgggtcatatcaaggcttaagagtgtttgttaaatgaattactgaatgaataatcttcaaatttaggagacttggattagtgaattattatagtatgagatcccgttccacctaaaagaaaaattttggaatcaaatctaaatggggctgttgtggcatatccaccaaagaagactgctcagacatgggtttaagccaataggaagtccttattaactggccagcaactagactatactgggtgttcaggaacatggtgtagcactgaacctttctcagggtgagcctttaagcacagaaactatgttctgggctgaacatactccagttaacaagaacagttagccagaagtgaactacaaagctaaaaagcagagttaatacatttttaaagactttcccagaaatatggatgtgatggagtaagtctttgctttagtttgggcaggcggtgctgtctatgtgctgagttttgcagcctgaatggcacttttatcatagagctggttgtgctaaagtcttggggcatatatacatagatgcagatatgtggtatcatggttgcctaacatgttcaaggccctgggtttaatccctcgtaccacccaaattaaaataataataaacaagaaaggaaagaaaaaggaagtaaacaaaataaatccttccaacatattaactgaataaaaagaatatccatatgcaaaagtaaacagaacaaactagaaacaaactgaagtggaagaaaaataaaacatgttctagaggagtaagaacagggagtgggcgtcagtttccatttaaagcatattttcagggctgcagaaatgactcagttattgagggcttactgctcttacaggggaccaagatttgcctcccagcgtacacatgccaggtcacaaccccctgtccttctaggttcagagaatctgatatcctctctgggctttgaaaggcaccagaggcatgtgtgatgcacacatattcagccaatcaaaactctcatacacataaattaaaaattaaaaaaaaactctcaaaacacatttcatcccacatgaaaatagccataggatagaaagcaaggagaaggtaaggaggagaaatggccgctccactgggagtccagacagcctggctcagcatgctcttggcctttctgctccttgtctgaaggcttggcatttttgtctaagatgaagaaagactttttagccaagggacctattaaaagctcagttttctttgtctgcactttgcaaatctgactcaaggattggcaagtcactgctgaatgttagctaaatatacagtctgttcaaacccattcaatccagtctttcagacctccttaaattcctttcttctctgtgttcacctgtcttcctgggagtcctcttttagagaagaggaaaagaatattatttttctttttaaagtatatttttcctacatgcacacaattcatttttatcatatttccttcccacttatccccctaacccctcccaaatccacccttgccacaggctcccaactttgtacccttttgatctattgtgtcacgacccacaaagtccaccttttactgaccatacactcaagagtgtgaggccacccactggggttcagaggacctaccaggggccacaccctaaaaaaaaaaaaaaaaaaaaaaaacaaccttcctttccccagaaactgttaactgtcaatgcctcagctagatacaggtactcatgaaccgccatactggaatcattaactgttcataactcagttagatgtgggtgatgcgctgcatactggaatgttgactggcttgctgtcgtgcaggtcttgtacagccaaccatggtggctgggatgtgttcatgagtgcagagatcctaccatgcccagaagaccctggttatatcagtctcccttggcctcacatttttacagtcttcctgcctctcctctgtgggctcggaacttgactatagagggtatgacacagatgtcccatttgtgtctgaccaaaaaacacttaccttcttcaggttcaccagctgtgagcttctttgttaatgattggacaaaacatgtgcaaagaacctcctctgatgagatctgagagttgtcatttttatttaaaaaactggtaaagaaggaggaggaggaggagaaaggagaaagaaaagaaggaggagaaggagaagaaggagaaggagaagaagaggaggaggaggaggaggaggaggaggagaaggataaggagaaggagaaggagaaggaggagannnnnnnnnnnnnnnnnnnnaagaagaggaggaagaggaggaggaggagaaggaaaaaataaaaagaaggaagaagaaagaaagaaagaaagaaagaaagagatagagagagaggaagaaagaaagaaagaaagaaagaaagaaagaaagaaagaaagaaagaaagaaagaaagagaaggaaggaaagaaggaaggaatgaaggaagaaaggaatgaaggaagaaaggaagaaaagaaagaaagaaagaaagaaagaaagaaagaaagaaagaaagaaagaaagaaagaaagaaagaaagaaaaaaagaaagaaagaaagaaggaaaggaaggaaggaaggaaggaaggaaggaaggaaggaaggaggaaaaagccaaatgcagtagtacctatttgtatctgtaacaccaacatgcctaacacaagatgagatacatagacaggcgaatcagccagatgcctgaagtatggcaagaaatatgagagaccctatcttcacaaagtagaaagaaccaacttccaaaaactatcctctgatctccacatgtgtgctgtagcatgcatgtctgtctgtgtacacacagagacacatacacatgcacaagcagtaagtgattttttcttaaacttaaaaaactagtatataataacaaaacgtgcatgtttatgaaataatatgacgttttatgtatatgttgaatcatttcagatctgagtcaatatctgttgcctcacattttgcctgctttttgtgacattaaaaatcctttttctagccttttgaaatcacagtacatacagttatgaatggtcactctactatgccataacatgcgaaaagttttaacttatgattaactacaatttagaaccctctgatccccttccctcttcttctctcctcccaggctgtactctgtcttcatgctcagcgttgtttttaaagcctccattggctctgtgatcaccctgctagcctcccactcctgccattttcccagcctaacttgctttgtcctcggttgccagtttgtgcgtgggcacttccctgaacaaaaacagctatggggctgagaggaatcaggggcagagaaatccagaacagataaggtccctaacctacctgtcttgcacagctgaagtcccttacctcagacctcttaatggggtccttgtctaaagggtctcgtgttaagcaaggttgtcaaggatccagacaaggaacagtaaaatcacagcaaccctagtcaaagagcctgaacgcctggggttagggttcttttccacctagttccttgactttccttactccccctgtctgcagtgggctataccccctttccatctaactggacagaagtcatgacttcactttcctacctgcagcatctatgaatctcctctatcttgtcctcggttacaaagacaacctcaccgaccattattcctgataggtcaaaatatggtttttgcctcaattttttttttccactagtgcaaaaagatacgggctgcttgtcatcctaatatacagcttcttaattctcaaaatcctgtcattttagaattgaagggagagtcttagaatctagtttgatatagtgaaatctctattacaaacccatgattattacagtaagctacatggtataggtaggtgtttggaaaatatgttatgtctataagtaatataaaatcaaagcttaggggaatgatatagtcagtagagctgtatagggacttaggtttctgtatcagtacacatacataattctaggtctggggagacacacttgtaatcttaaaactgtggatagtgcaaggcaggcaaaaaccagaggacccttgaagctcactgccatactcggattgcctaattgtgagctccaggctcaaaaggtaaggcagagagtgaccacactcaacccatttctgacctccacatacatgtgcacacatggacacatttgcatacaggacacataattcactaacttcattttcaacataatcctaagtgttctttaacattctgtgagtggaaaataataggtttgagggagagcggaaaagccagcttcaggctgggccaacaacggtggggatattaaaggagcagagggaacagtagttcagtaacaaaagccaagtgggaaaaaagaggctgaaatcaaatgaactcatccgctgtgactgaggaccatcaatgacgggcgaagtgacaagttactcttgcttctcgttgagagccatacatcagctctgactcagtgataactgtgttgtgacaatggaggaaaacagaataactgtgttgaacacttcctcctcctccaggagtctgcggagttctgtggcactggaggatgtctgaggattataaagaactcttacctaggtttaagtggccaatacgccaccttcacacccaactgtgattatgagaacattttcccagcacagctgacttttaatgacatttttttataactgtcttttctatccatttcaggcttgtaaattctacagttcccagtggtacgtggtaaactacaaatatgaacaatattctggagacattcgacagttgccccggtaagaatatattatctgtttattataaagactgcatgtgcttttacacacctatgcaaaagtcacctcttggcaagctccaacattgtttagtctgagtttggaatgagacctgatcttctctatttcgaggcgtcaccgcagacgaaccatttgctcattgttgcatcaaccatcactgagctgtcctgtcaaccatggcactgggaaagcccaacatggttcataagatctctgaccaagtcctgtgcagtatttatatctgctccatattgttttaggtactttcactgtgggatgtcaaaggcatgcaaatgaattccacacaagggcatacatctaaaaagagcaaaacagaaactaagtgcctaacttcccccctgacacttgggaccataaagtctctaggaaggtccctgtgttctgcttttcctcaagagccactggatgacctgaactccagtatctatttgctatttcccccactaaaataaaagccatcaaagagcggagaagttttctgctgaatcctaaatttctagcacataatactatggagtaatttatttcaattcacaacatttctaaatggtgataagttgcttaaaatttaaacaacaccacacacacacacacacacacacacacacacacacacatacccctacctgtcaattttgatatgccttggctagctcaaagactgggtacttctaatccttcctgaggctagcaaacactcccctccagtattccagagttaacatccttaaaatctatgtctgacctctgctacccccggcccaattggggaagtggacactagagccactgcagacacttgtgtgagtactttgggggaacaaaattaacattataacgtaagcattaggccaaacccacttcccatcttgttggttcatcaaacaaacatgatacaaaaacttcaaaaaaacaataatcaaaagttcagtgtctacttatactctcctccagtgatgcactgggtcaagtttgtctgtttcattggattttggccatggtacaaaattcaggtctactttgcagtattttctgtccccagaaaagtctttccaaactaggatatttgtacatgctatcccacttcctgaactcatgctctgaaatggggatttttttttaatggctctcagaaggtcacatttgaactgtattctcaaggaacagtagctaccaatgctgggatctcaggaaaaaggcttcccacaggccctgaggcagaagttggtgtgatcactggagtagactgacaggctgggaggctggagggtgaggcctggagagaagcagagctacacaatcccaggaccttaggaaccctggaggagagcttggattttattctcgctgtggaatgtccaccagggtgtaacgccttttaaaaaatcacttggcttacatttcaagaagtgtcatggaagagaaaggagaggaggaagccttttctcagaaattatctcactgtgaagagcaagccaaaacaggaagtctttttttttttcaaagacaactctgtgcattaacccccacatatttctaaacattttgtaaaactcgggactccttaatgactgtcttttgtaactactcattgggaaagtcctgtcacaacctggggtgtcttagctaatggttccattcaaggtggtcacacactttctcttgctttctgacagccctctctcttctccctctctttctgagaatcagtcataacttagaagttgtattcatgcttgaaagaccatggcttccatgatggacttaggcagctacattcaactcccgttagttttgcatgtgtctgtgcagtgctcatgaacgtttgtgtgtgttcaagtgcacatgggaacctaaacttggtattgagagtcatctctgtctattctctactctacccatagcagcatggtctctcagttggtctagagcttgccagtgtggctagtcttgctacctgtcttgctctaaggatctacccactgtctgtgtctctaactctgaagttacaggtgggctaccatgcccatcaacatttacaaggatgctggggattgaaacctccatccttgtgcttctgtagcagcaaatgctttgcccagtgaatgatctcccctggccctcgcttttgagcaaaacgctttcctctctcttacatacatggggcactttcactaccaaatactaacttactatagtcatgatgtcatgaaagaagtaaacacagtatttcatgatcacagaattctccctccattaaaaagatacagaaagcttgtccactgaggagagattctgggcatgattaccgagtaaaattttcataccatgcatggacatatcacccacatggtaagagaaagtgactgaaatattgttgagaatttcattgatattatctaaaggaagttgaagtagagagtaaaaaggggaaagtctgccacaaaggcagaagtcttaggtttttttcttatatccacataaaatatattctatcacttaaagagtagaattccctagtatatgccccagaacaatgaatacttcaacattgcatactagaataattttttaatgattttacaaagttgaacccactccctaaagactatccatatttaggtcagtagaggaaccagactaatttatttaggccttatgaggctgttaaaagtaaatcacatttgtgcctcctggattagaggaactctcctatgtgcgccaccagttcaaactgatcacttcttcttccaagctgctaaggctacaaaataaaaatttaaaagatgaaattacggaaaagtagagaagagtgaaacatactatttgaatgtacaaggatgctaagctaattttaactctaagaaccctgtatctatttgagtgttcgttcaaaactgcaagctagcgagatacattgctttcaccagaacgtgaaacataaggcctcacgtagtcaacgtaaggcctggggttcctgagagagtcaaatggcatcagaaaaattatgatgctgcttagttcattactgcgtgggtaaaatacagagctaaacaatgtagaaaacaaaacaaaacagcaacaacaagtaactttaccacagttgacttgagaaataagaatatttcccaacagtatattttttggctaaagatcaaatcaagtttcacccattgaactggactagaaaatgggcaaaaagagaaattcattttaaaggaaggaagctaagcatggtgggacataccaaacactcaagacatagaagtaggagcttcttctaatcagaaactcaaaattattttcacctacatggcgttttcagggccagccttgcctatctgtaaccctgtctcaatataacagaaagaaaaacccaccttagataaacagatatttgttcggagttagaatatgccaggtgtgatacataacatctaaaactcataaccacgtatcataggaagagttgttgcgttttacatgggaaatgtgggcactgagttcacagacaataactaaagaggcactcagatatggccacgatccttctcagggcaatagtaggatatttgggataaaattgagaacctctgtaaatgattacttacattaggttcaagctcaaaatatgaaatcccagggcagtctttatcttcagactccaaaggttcttagagaccacccagtgctccttcaagttgaaatttgaaggcaatagacggtggtaccaccttaatgctatctttaaatgagagaaaaaataatgtttaataatcatgcagacttcaggaaaggacagcagggtggggctattgctcttttaaggtagggtaaggggtgtgttgccctggactccaatgagagaaagagtcatcagtcgcttggagtcacagacatggtttaaacactgcctgcctcctgcactcagaagcttttcctgccaagctcacttcctttatccgtgtctctattgtggcagccttcattcctgggtgctctaaacttgctttccctcacaggacctcagttatgtttctctctaccaggagtaggtttctctggctcctcacagaacctgctgttcctcactgtcatcctaaggcacacatctaggggtgaccaacctcgatcactctgcctgacacaattacttagtcactcctttctctttggttttcttttccaaattatttgtattaattctttgagagtttcatacaaaatatttttataatatttgaaccttcctctaaatcctcatgaatttgccctcatctctctacccacccaacttgttgttctttttttttgttcaaacccaatgagtgcaatttatactgtctaaatactcttggatgtggtcccatcctctggagtatggtcaaccatccagtgtcacacattaattaattaattaattaattaattaatagctggctttccctttcccagaagccaccagttttcagtagctgtggtagggagtaagacttcctgcttgcctcccaatccatgctctgttttatttggcatgagtttagccaggtcttgtacatgctgccatggctgctgcaagttcatatgtgccctgttatgtctagaaaatactacgatgctccagtcatccaccacctctgtctcttaaaaaaccttccttactccttttctctaataatctctgagccttcacaggaaggagtataatgtagatgtctcattaagagatgagtatttcaaagcctcttattccctgaatattgaccagttgtctgtctctatgctaactggcatctattccaagggggagctctctgatgagtgctgagaaatgcattaatctataggtaaagtgataagtcattaggagttggattaatacttagcagaataatagtagtacgttatcacctaaggcctatgacctatgtcaccacaagttattgtcctgaataatgtgtccagtatgtgtttcatctttagaagcaagccttaaattctatcaaaaaaaaagtgtttggttatgcccataatagtcataccactgttcggcatgtcttgtaatactgtttccactgaattttgcggtaaagccctatcgctaataccacatttagaattataaaacatggggaaaaaatcagtcctgacatggaagcttcacccctgttggctagcactcacaatgctggacagtgctatgcttgctaccagaaaagaaaactagacatcaatattgcccaactaagaatcctatgacttagagtaatgactggtctggaaaatatatacccgctgggtatgctcctgtcatgcgcagaatgatgttctgaagtacaggggcattgaggaatagtcaaatccagctgactaggaaatgaatcacttcacatcctcatttttgtggtgatagcccttaagatcaccctctctccaatttacaaaaatatgtgtgatgacttaacatggaagtttcctccactctctctttactgccatacctaatcaattaaaaatcccataatgtacatgtttcagataaaacatttcaaacaattattttgctctgcaacttgccatttgaacttgcccctaaaatccagatgacatattagctctcattggagagagaggaaaatattgtagtcagaggctttaatcttgtcaatcaaacaaaactgtgaaaggactggttccttgttcaagtggtataatatgctattacagaaaaatggagtgtggtaggaagtgtttctcaggtctgaaggtaatgctgtgtgtgaaggctgcttcctctgccttcccaggaaggtgaccatgaccaaaaggagcagaacaagttaacgtcactgtgacaattagcccagatgagttggaacatatctgagactctccaaagaagaaagattctatattcttagtgttttcagtgatgatttgaagacatctttcctgataaagtcatttcaaagagacatacatcctccaatcctatctcttcagtgtgtttatagcccttgtgctcttcatgtttatctctgtaaaatagcatgatttaacaagactggagccccacacatctgttgttagacaaagagcaataatccacaagtgtttaagtttgaatactcaacttttccctatattttaaaaaatcttccaacttgtcagtcaataagctgtggccagagaatgtaatattaaatgtcattgggtttttttatatgaattaatttgggtatgtaaacatatgttatatgtatctattagcagatatgttttaaatacctaccagacttcaaaaagagataacctccatggcaaggggtaacaggtgcattcgtctctgtatgagcaatgtagaatccacggcatcagcacccggtgctttagtctatcatttcagccctattttctaagacagccttgatcattgaacctggagctcacactttagctatagtgagtggtggtagctcctaagaacttcctatctcttatccacccaagcccaaggggataatctccaaataacacttactacagctcttcttcccacttttactgttgagaaagactcttaccatatgcaagttctgatcagcgggtctccagattttacaaagaccacagacaacgcagtagagaaggaaattggcacacttcatccataacactcagtctcaggtcctatgttcatcacagtagcttgtgggacccagggatggaaatggggctggggagcgggtgatagtgatggatgtaaatgccttctaatttttgagaatctgttaagtcatggacagtgcttaacaatgaatgggattgtcttctgtgctacctcttctggtgatgcaggcactgtgctgtccttcagagggagaatcaaagagcactttacatccattaggtaatatcctgtgcgaatgcacaggatgaacctaagtagaaggagcctttagccctctccttttcttttcagaacactgttagctcaggaagggatctatgatgggattaacaaattcacctctggtttccttttctcatagactgactcagattctacaggacatgtcatctgaaaacattaaatgggatgtctgcacatgagagacttttatgccttaataggtggcaaagggctgaccatcaaaaaaagcttaaactttgagtggagagtctggcttctgccagccattcattatgagacagacttgagtcaagaaaacttacttcaaacttattttatcttcacatataaagcctatgtgtgccttcttgcttctctgggatgtctgatcatgccacagccaaatcggatatttctgtgatgccaaagggtgcacacagcatacattactctatttgagtgggcttctgaggagctaccacacgggcatgacagaacctgagagccaaaacatagcctgcctctggagaatcaagtccattcatgcctgaggctgcttgtgcaatcatccagtgacattggatatgtcacatactggtgacccagaaacgctcacaaaagtgtcattgcttagtaacctgcttcagaatgcaggggggggggcaaaacactacgacttatatccatcctctttgctctctcattcaatacaaaaagatatgtacacatctacatcagtttataactcctccagatataagatacaatttgctaaacacataaaactcaagaagaatgaagactgaagtgtggacactatgcccctccttagaattgggaacaaaacacccttggaaggagttacagagacagagtttggaactgtgatgaaaggatggaccatgtagagactgccatatccagggatccaccccataatcagcttccaaatgctgacaccattgcatacactagcaagattttgctgaaaggacccagatatagctgtctcttgtgagactatgccggggcctagcaaacacagaagtggatgctcacagtcagctagtggatggatcacagggctcccaatggaggagctagagaaagtatccaaggagctaaagggatctgcaaccctataggtggaacaacaatatgaactaaccagtaccccggagctcttaactctagctgcatatgtatcaaaagatggcctagtcggccatcactggaaagagaggcccattggacttgcaaactttatatgccccagtacaggggaacgccagggccaaaaaaatgggaatgggtgggtagggaagtgggggtgggggagggtatgggggacttttgggatagcattggaaatgtaattgaggaaaatacgtaataaaaaaaaaataactcctccatttaaaatgtgcacttagtagagataagatacaaggtcctaaagggaaagttaacacttcccagagaaaaagaacccccagatattaaggttgcaaagcttacaaaacctgaaacaatgttaatggaatcggtgtgatcttgggaatggcagaaaacagaagcaagataatcaaatgacaaaatagactttttttctctctctctttcttcttttttaaatatcagagcagaacacaagccagagaaacttccttcacattcctttgaggttgaccatgaagatgctgataaggatgaagtaagtggctgttgcaagggacaggttaaagcatgggggcaattagttcctggctgcactggcttctttgtaatctctttctagtgagcagcaggagccggttgtgttggggcttttaggcaaaatgaatcatgtttgttttgacagggaacacgattattacggatgagtcaaggaggaaaagaagtctcctttttaagtgcagtgtctaagatctgggctccgcaaggcttggctgccttgctaatgatgacttttgtttcaggataccacatcccactcatcatccaagggcggtgggggagctggaggtactggtgtgttcaagtctggctggctttacaaggggaattttaacagcactgtgaacaatactgtcactgttcgggtaaggacacttcaaaaccaatcccggatcttccacctttctgtatatcccttctcaaggcacagcatggagaaaagccatttgcatgaaatttatgttttctctaatattttaattatacagaagtcagagcctctgctctaaatgcaatgctctgctgataaaattaatctgaagccttgtcatttccatgagtaacagtgtaacacaattcaaactctctcctatcttctctttagtcattcaaaaagcgctacttccagctgactcagttgcctgataactcctacattatgaacttttacaaagatgaaaagatatccaaagagcccaagggctgcatctttttggattcctgcacaggtgtagtacaggtgagtgaaaaatcatcttccccannnnnnnnnnnnnnnnnnnnnnnnnnnnnnnnnnnnnnnnnnnnnnnnnnnnnnnnnnnnnnnnnnnnnnnnnnnnnnnnnnnnnnnnnnnnnnnnnnnnnnnnnnnnnnnnnnnnnnnnnnnnnnnnnnnnnnnnnnnnnnnnnnnnnnnnnnnnnnnnnnnnnnnnnnnnnnnnnnnnnnnnnnnnnnnnnnnnnnnnnnnnnnnnnnnnnnnnnnnnnnnnnnnnnnnnnnnnnnnnnnnnnnnnnnnnnnnnnnnnnnnnnnnnnnnnnnnnnnnnnnnnnnnnnnnnnnnnnnnnnnnnnnnnnnnnnnnnnnnnnnnnnnnnnnnnnnnnnnnnnnnnnnnnnnnnnnnnnnnnnnnnnnnnnnnnnnntaagttttagtaaagagaagagaaagaaagaaagaaagagagagagagagagagagagagagagaaagaaagaaagaaagaaagaaagaaagtaaagaaagaaagaaagaaagaaagaaagagagagagagagagaaggaaagaaagaaagaaagaaagaaagaaagaaagaaagaaagaaagaaagaaagaaagaaagaagaaagaaagaaagaaagaaagaaagaaagaaagaaagaaagagagagagaaggagagagagaagcaaagaatcaaatgaacagtggaatcaattgttttgttttgtttttttcactgaaaagcaacaaaaagaggtgagcagaaggtcagacaagatgtacgctgtggtatttggatgtgaatggaatattgatatttgaaagggggcatttttgaaaggatgcaaaaataattaaaacaaaaagagactcacagatctatggaagaaagggtatgtgggagcagtaagccctgagtcctgaggtctaaacaagactgagctatttcctcaagcacaagaagaaaatgacccttaccccatctacagcctagaaaaccactgaactaatgaaattcatgagggagacatggcagtcacatagcttggtgtatatactttacaaaccatcttccctttattaccaggtaataagttccacttatacacacatcatctgtctttgaagtggagattttctttacagtcacagattcctttgagtgccaagagtttacagacaagactattctggaaactcctgaccttcaacttattgttcttaatattgcatgtggcaagcagaagaagaagaattttgtggttatctcccagtccatggacattggatgccctttctttaaaaatcaaacaaacaaacaaacaaacaaacacataaaaatctgggtttttttttacttaaaagttgaagcaattaagtattgtagcaatcactcctcaaattttacagtaagacccagacctttacagagcctgtaatgtcatagctgagtttccatcctgaactattatggaggatactaagatctatagatgcaaaatagtgttgtctgcagcctctcaggcctgggctatttctggacacttcatctgttaaagtctggaactcctccaggaagtaataaggctgaactttaagaattaattaagtgttgctcagtaccctgctagaagggaaagctaattgcgttttaatgcagaagccagctttccatgtggaaagggcaatgaggatcctaatggagaaaggatatggttgtctattgttgactgctcaaagggagactctttggcctcaaaatcttttgcaaaatctttgacaatacttcggagatcagacacaccattgtatgttctgatctgtctattctaaatgcccgtcttcaccatctctaacttgggttttgcttcattaaaccattgtctcaggaagaacctgacaaagcaagtggaagcttggtctcttctagtcagccatgggatcctagttttgctgttcacatcctgagctcctgagatgctcattcagtctctgacctcaggattcttatacataaaactgaaataaatgtgcaaagactttggaaatatctaggtgattatgtgtccacaccctgcttcactgattgaccccattatagttcatgacttggaaagaaagataccctactgtagaaaagccccctagtaaaatgtgatttgcattcttcaaactgatccctagtatgttaattaatccatatctttagtcatgaactcattcttcattcagtactttatttagtgattatattatgcttggaacagtgttgaagcatggggaccactttccttgttaaagtcagagtcagagacagacatcagagcaagaggattgcttactcggagcaacatggctgctgttannnnnnnnnnnnnnnnnnnnnnnnnnnnnnnnnnnacatgaaacctttctgaatcttctggagtcacagcatagaatctacagagtatctacgtctttagggttctgcaagatagattttacatatgtgtcttttagttcgttgatagatccctgaacttaatcaagacttttcacagaatcttctccctttatgggagcaggggtctccagttctttgaggtcagtctctttggggcaggaacacacagatcggggaacttgtcaccttatggtagccccagttcttacatcacagctctccctgacttacacatttttactcctgggaaggaaatttcaaaagagatcatgcaaattttaaccatcgctctagtaagctcttgggcacattttgtgcttggggatgaatcacacatacacaaaagcacagaacaaatgaataactaggatgagtcacatctgttttgttcatggatctttaccagattctcttgaataaaaagaaaaaagaaaaaaaaaaaaaaagaaacagaaacagaataaaatctttgcctcagtaagtgctacctaacttctaagatccttttgagagttcaagttttttttttcaattttattgccaaatttaatttaaaatgtgaacacatttgttttattttaaattagatattttgttcatttacatttccaatgctatcccaaatgacccccataccctcccacacacacactccccacccacccactcccacttcttggccctggtgttcccctgtactgaggcatataaagtttgctagatcaaggagcctctctttccaatgatggcctactacgccatcttctgatacatatgcagctagagacatgagcttcaggggggtactggttagttcatattgttgttctacctatagggttgcagacccctttagctccttggttactttctctagctcctccattgggggccctgtgatccatccaatagctgcctgtgagtgtccacttctgtgtttgctatgcccctgcctagtctcacaagagacagctatatctgggtcctttcagcaaaatcttgctagtgtatgcaatggtgtcagcgtttggaagctgattatggggtggatccctggatatggcagtctctagatggtccatcctttcatctcagctccaaactttgtctctgtaactccttccatgggtgttttgttcccaattctaagaaggggcaaagtgtgcacactttggtcttcgttcttcttgagtttcatgtgttttacaaattgtatcttgtatcttgggtattctaagtttctgggctaatatctacttatcaatgagtacatatcatgtgagttcttttgtgattgggttacctcactcagaatgatgccctccaggtccatcaatttgcctaggaatttcaaaaattcattctttttaatagctgagtagtactccattgtgtaaatgtaccacattttctgtatccattcctctgttgaggggcatctgggttctttccagcttctggctattataaataaggctgctatgaacatagtggagcatgtgtccttcttaccagttggaatatcttctggatatatgctcaggagaggtcttgcgagatcctctggtactaatatgtccaattttttcgaggaaccaccacactgatttccagagtggttttacaagcttgcaatcccaccaacaatggaagaatgttcctctttctccacatcctcgccagcatctgctgtcacctgaatttttgatcttagccattctgactggtgtgacatggaatctcagcattgttttgatttgcatttccctgatgattaaggatgttgaacattttttcaggtgcttctcagccattcagtattcctcaggtgaaaattctttgttatctctgagccccattttttaatggggttatttgattttctggagtctaccttcttgagttctttatatatattggatattagtcccctatctgatttaggataggtaaagatcctttcccaatctgttggttgtctttttgtcttattgacagtgtcttttgccttacagaagctttgcaattttatgaggttccatttgtcgattctcgatcttacagcacaagccattgctgttctattcaggaatttttcccctgtgcccatatcttcgaggcttttcgccactttctcctctataagtttcactctctcttgttttatgtggagttccttgatccacttagatttgacctcagtacaaggagataggaatggatcaattcgcattcttctacatgataaccgccagttgtgccagcaccatttgttgaaaatgctgtcttttttccactggatggttttagctcccaacaatcctttagtgaatatagcattttagcttgcctcatttgtactcaatctataccattatttttcccatgaaaaattattggaattataaaacacaagggagaagtcaaggagagggaaatgtcaatactttctcaggaatattaaaagatgtttgtgatttgcatgttcttgaattatgctaacaaacaaaatactaaccatgttttttttttttagactatcagtaaacagttttatatcttcattataggccaatctagaacaaattgctgcctctcttttatcctgagactaaggaatatttgcatttggattacctaatcttgggccttcaggcattcttcagtcatttgcttagccatctagccatccattcatctatacacttcgggtcttgccaacattgaagaaaatggctcaggaaccccgaatgtctgagattccatctcaacagtgctagtggctaaaagcgtgtcacattggctcaagttgatggtgaagtgacacctacagatctgactcatcccagccagcccatggatatggaacttttttaaatgactacatgtgtttagtaaaaggctagaggataaaatattttctgcaggttaggcgtcccacttcatgcgtcaactgaggctgagtatgagatgcagagcttccttaaaagtagaaaaatgaggggggttgttcccaactaaaaacagtcacatgggagtagtgtaattttgaaataaaatggatttagaagccatatatagtcctcacattttccattaacaaattctggcactaactgaagatttatatttcctattatagtaacaaccagaaaggtagttacccatttaatatattatctgatatatttgatggggtacatgttactattgtcctgtttatcaaaatagaactaagagaaaatgtgtctttccaaggcacagaactaataagtgacaaaattagatatgaggtagaggaattcccaagattatagaaaacagtccatgagattactgtatttactacataaaaaactagtgtatatatatatatatatatatatatatatatatatatatatatatatatgatatcatcctaaagaacttacatggaaaaagaaactcaaaaatgataggctcatgaacagtttaatacatatgtgtgcatggatcattggaaaaactagatataggaaaaactatggtttctatcttgaaagaatatatatatatatgtatgtatatatatatatatatatatatatatattaacattgcagtacatttatcactgagtgatgcctcattctattatatcaatgatatattatttcacattatattatagtcacacatttctgcctttagtctattgacaccttattaaaatgtaagtttaggagtttgggggaaataacttagtcaatgattgcagaaaaatacgaggtaccaaagtaagattcctagaaaccccatgtaaaagttgggtgccacaacatgcatctctaattctgagtctgcagtgtaaaattaggcagatcattggagctcattgaccagccatcctactcaagtggctaattttcagagtcaatgagagactttaactcaaaaaggaagatggagagatattgaagacactgacattgacctttggtctctacacacatgcacgtaaggacatatggactctttcacacagagacatgtacataactcatgcacacacatgtgaacttacacacacacacacacacacacacacacacacacacacacacacacgaagggtagtaggaaggcctgaagcaggacacatagaacgtaaagtcagcaagggaaagcactttgtgtgaatatttgataatattgtgtgattgacacttgataaatcttgtttcctggaagaatggataaacataaagaaagtggaaaagatggaagccaccagaatcccaagcctgggtgggatataacatgttacatcattctcttttggtccctgtaaaaatctataaacaatcccagtagcatagcaggtagaatgcgggacttagtttgggtaatttccctcttcactactgagccttctgttggcatttgtactttccttaaagtctatatcactgggatgattccaggtgaagaaaagaccttctgcagactgtctgccaccattccctaagcatggtatagagccatagaacatgcatttcctattggttatgaagctgggtagtgttgactgggcaaagctttatgtcaatgatagaggacactgaaatcaagaaaaagaagggaaattgggagagtataaaaattctcattacttcttcatttttttccaatgacaattgcatgttggaattattcaagttttgtactgatttttccatgtttgtcttttctttatggttgctctacctgtgattgtctttggcattacagagagaggatcagaaagcattcccattttagacatcaccaccagcattaccccccagcatcacccccagcatcacccctgacatcaccctcccactcccagcatcaccctcagcattaccccccagcatcacccccagcatcaccctcagcatcacacccagcatcacccccagcatcaccctcagcatcacccctagcatcacactcagcattgccaccaactctgccgcaaacggatgtgcgctgcaagcagctctgtctctctcagacttgcaagcacgatgcccatttcatgtatacatatcctgtttgagaaacaagaatctgttatactttgctgaattttttaaaagataggtattttaataatagttttgaattattaaaaccttggcaaccatagtcaactcatctgaagtacaaaatgcaatttagaaagtcatgtcttacttctaaaactcgatttcaaagcaaattgcagtggatccacttttaattctgacctagaggaagatctgcggtagttttacagctagcccatgctattttcagtcttgggtgaatagattccactctatcaaatttccaaacaacactaagatttgtttgcattgtgctattcttcaatcttgacaacattcaagcagcagttatggcccacactctggacacccctacttctttcctgagtatccgtttctattccttttgtcatgtgaagcaataggaaacctgttttcagtcccattgtctttgcctgtagagccctgtttcaggagtctcgggcagtcttagagacctttccgcaccatgatttaccagaagggatcgtcagggtggatggagggagtctgcccatccctcccaagtagagcatctggaactttgcattcctaagatctctggatactaactttgcagctgcttactttctatttgagctcctaccctgttggaattgctatcaaaatgcaaatcgtaacacttactttgttttgcccaaataattctactctgtgcccctacagaatctagtatctctttttcaaagcctttacacaaagtttatgtatgtttatcttccaattttatatgtccagggctagctgtttaacatttatctcctccattgtgaaagcacagagacctagtgtagctttgcccagtacagagggacaacagagcaaatctttctgtgcagtataccatcaattaccggactaaatgccaaaggtaacaagttagcgtctgtacccgggacttgtgaactgttagagagcccggcctgtgagtgcatcagtcattacaaagcaagcataaccttagaccgtgatacagaaagtggagccatgagctcccgggaagacttggcaaaacagcataggcttatgttaataacccattttacttttttacgtgttattgatttttaagctttattgccagctcttccttcttcacttctggactttccactgtctccaggcttatgtgtttcctcactgtatgttttcttgtacatagaaaagctgtgactccctgtatcatgagaaagctcttaagtgtgtgatagtgacagaggtcattcagcccagctgaacaggtgacagtaggatcccagatacaaaattaaaacaggacccttttccctatggctttttgctgtggttaaaatcctatgccattattctggacaagttccattttgaatttacatttctcatctgtggttataatatataaaattcacacctgatcctgtgtgtgcccctccttccccgtatccttccttttacagatttcagtgtatacattaccttctgagggtggacttccttgactactcagtatgcaaatgagcccatatcttaactctattcaccacaaaatattcaatttttccactgttagcttggccattccttcaatcacatatgccttcacaatttccccactaaaatatcagccttaagagttagcttactccatttcctctgtaaactacgagtatttttgacccctgtgtgaactgttacaaacaaaactatgcaaaccctcacaaaagcatggttaaaggatatttatgtttgtcaaggaagatttttgaaaagaatgaagtatgtacttccaatttattttacatactccagagatcaagaatctttgtttccatattctaagcttggaaactgaataatgttttcagaaagattcgaagagagaatataaatcatgttggcacctaaggagtaaatgctcattgtgtttggagaatacacttggaatggggttcatttcagcaagaattgtattacatgggcaatcagggaactacagcaaggcctcgttggctggtcaacaaacacaatgtagagatgtcaaactatagaagaacaaggagcttggcttgggcatcattgtgtatggatgatctttggagcatttagactaagtgagagtaaaagaaatttaaagcagcgccaggagttttgtttggagaaatggcaagaggaaagagccattggagtatggaaatatgcagaggctggttggtacgtggaaagatagtccggcatatcctggggtccagggaatcaaagtattttaatttaatttaatttatctattttaataacttattttaataaagtaatggctgacatgctaatgttgctaaaaggataaagtaaggtgcaaaataagaaatgtccctagagtacaaagacgtgctacaacttgttagtgctgtgtcaggtgctgtctccagagtatgagagtcagaaaacttactagtatggatagcagttagaatgaaagtggggaatctcaaagcagttatttgaagaaggctccacacttgggcctaagataaaaagcattgagccaaaatgccatccaatcaacaaaacagacataagatatttttagtacataaaagttctaaaaaaaaaaaaaaagataatccaaacgattgaactcctctaaagctcttttgtgtctcataaggttttgtcttcatctccttgcctaggtggagacactagaatccctagaccgcttcaatgtctctctgtctcgtggcttacagttttgttctttgtctttataccacagaataacaggctgaggaaatatgccttcgagttgaagatgaacgacctgacctattttgtgctggctgctgaaacagagtcagatatggacgaatggatccacacacttaaccgtatcctgcagatcagtcccgagggcccactccagggaaggaaaagtgcagagcttgctgagctggggctaggtaggggctcaggcaatcatctccctgctttggctaagtgtttagttcacttggatggttagtagccatgggagctctccggctggactcagacattcttgagctccctgctctaagaaattgatcccagaacttaacttttactgggtcatcccagctgctacacagtggtacagtttagaattgactggaagggactggagaccatcacccaacaaacaaagttggatctcatattccaagaactcaaacatcatacacatttctgacaggaagatcttacagaaggtacattttgaatttggggttcatgttacatttaataagtgcaatatattgtctgcaagaacaggcatactttacttcctcttagcttcctcttattcacgctgttttgatagtcttgaggtcagcgatatatgaaagttccaatatcacgcagcacacagttttcataagaaaatacataagtctggaagactggttcaagtcgctaaagtgcttggcaggcaagcatgttgatctgagttcagatctcagcacccatggaacactccggctgcagcagtgtacacttacaagcccggtgctagggaggcagagataggaccaccccgggagctttctggacagcttgtctatcctcatcagtgagctcagggatccgtgagagaacctgtctcctgacctaaggtgggaagtcaccaacggatacttctagtttaatggccacacaggtctttagtgtttaaactaaatgggttacaaaaccagaccttgtgaatcagaggaaaggctaagaatggtggagtgggaacaactgcacaggagaggagagattaggtgaggataatcagaacccattacactcacgtctgaaatgggccaattaaaatattgatcaataagaacataagatgggagcaactgaggaagacaatggacattgtcctctggcttacacatgttataaatatcatgagggatacttcacttagaacatgtacatcttaaataaaagacataaaaccttgtatttatcataagcttaaaagcactagagctgggcagatattgaccctttaagctgttttgtctacttccctgtcgataacccccaaataccatttgccatgttcccctgggctgctcctactctgacaggccaaccctcagggccagcactcatgatccacctacatgatagtgacctctttcttttcctttcttcctcactctcctcgtgatctctacctgagactccaagcccagacccaaagccccacctacatcttttctgcccagctacaggctataagcatctttattaaccaatcagggataacatggatgggacaggacttacacaaaaaaagctggtatacatgaagatctgcttgtcttggaatgacaaaatcttggagttcagaatttagcatttgaatacaaggagcaccagactaacccccctacacaaatatatacatatgtaggcacacatgaacatgtacacacacacacatacacacaatattttttctttttttccagtctagttccctcataagattctactcgtggttgtcaaggagaaggaaaaaaaaaaaaaaaaacccagaaagagctaaatgtcttagctatgtagatgggtgcgtctcttccacaggctcagtcagtgttcctcacacaaagccatgtcaagatatttcaagaaaactgtgaattagaaaccaaagtacagccattactgagttctacttgcatgcctcctaaagggaagaagtcacagataatgaggaggaaagctatcactgggtttcccatagctgccataggctatagccagtgtttacatgaacttattacttactaattgtcaaatggagtgtgcatgtttgcagtgttctacagagtttaatttgttccagataaaagatggactctaactaaatcccctgaaggtaaaagttagaaaaatatttacatatttgagaaaattttatcaggtgttgttgaaagaagccaaggcaacctatacacgttagcatctttaggatccaaagagctcagtgatacagaatgctaggatggtaagaattctaaaatgactgtcgggaagtttcatttctaaccctctgattgctcaacagtctggtatattgtagataggacaaaaggagggcctaggctcaccaatgtccctctgagtcacgattttgatccagtcctatacaggagggaaagttatgacccctattattaaataacctgtgttgttctgtcttttcaagatccactggataactgcgtgacttgtgaatgtacactggaggaaacggattcttcagagaacagcctacatcctgactttgcaaaagtaatgaagttggcaatatatttgcgcacatatttgagttactcagtgctttcatggaaaagatgtcaatcctttccttttaagatttagactaaaacacaatcttgaatttttcatcaatctaagagttttactgaacatgacacgactcttgagaataagaacatgcttttatgagatttcccctgtgttgattacttaagagtaataaaactaacgggctgtttcttggtcttttggggtggttatggggctacatggggaagtcttgacaccagggactaacatggatctctccacagtacctcacagaaaccgaagacactgtcaaaacaacacgaaacatgggcagactcaatctgttctccctggacccagacatagacgtaagtcagtattctgagtagagatgaacttgacccacataactgtagattctgtgattagtgttggctaacaaagacttttgataacctttttttttagaccctgaagcttcaaaaaagggacagttttgaaaatgagttgatgatcaaaccctttgaagagaaagctgccaaaagaatcatgatcatctgtagagctctcaacttcaatcttcagggatgtgttacagagaatgaatatgaccctgtaaccaatgtaagtttctctctcattctatcataaccagcaggcttatgtcattctatcctagcccaaacttttctatgcttgctaacctcaggatctagcatctagtatgaaaagagtctatttgccagcacttctcatattgcaaatgtgcagaaattctgaggaagaatcctatatatactgctataaaatttccttttaacgtattgtttaagatgcaacaaagggccaggattctggagtcctttgtacacagtgaccacagttgtttcctacaacactgcttgtatgtctgatgatagtgaaggggatgtttgtttatttattgtgatgctgaggctaggattactatgcaagtaagtatcccaggagctctggcctttggttttatgaggcaaagcattaatgaatagctgagactagcctagaacccagatcctcctggttctacttccccaagtgcttgggatgacaggtgcatcccaccatggctgactcaagatggcttttaaactgacattggggatttgctgttacttggaggaaaacctgctaacaaatccactctaagatttcatagtattcctgcttagaataagattatatgataaagcaagtatagacatcttgaagaaacatcggaacagatgctagtcaatctttcagtgtgttttctttcattctctttcaatgcatcctattgggacatctattaagtttcaactgctgtctcccagcccagaaaagaaacttgatttttatgattttggtactcaagccgtatatgtcttagaaggcaggaggggcgttgttcacttgcttggccttttccaacaccacccatgcctccttcctgagtggaactaacttgatgagttggggcacagtgggctgcaggagacagtgagaccttctgtccttagcacctctgttgtctttaaccatcctacctactactgtagtaacaatggatccatatttttcctgtatttgatgaggagaattcattgaaatggtcaacttggatcagatcccctcacttttcagcataggaattgtggtgtgtgctcagatgtcttacctcagtctcccctatgtaaaaggtatgcagtagaggcaaccatttcaaggggccctgtgataaacaaataggtaatctatgggaagctctaaatgttcagtgcaatgttagcatccattcagctcaaagaagtgactataaatgaatatgtaaatctgaagatctagtttagcactgtcttggagagaaccatctaagatggtctgcacccacagagaagggaaccagtgtgaaacatttaaccatgaccagcaaagctaccaccaaaggactaagatggatttgctactattggaagagagacaaaccagagaaatgtggggtgagaggctgacagaggacaagcccactgtgtgtgatggtcctgacaccatgcaacatgaagaagagggtccagtaggcatggaagcagataggtgcactttccatgtagaaaaacgataatagacggaaccagaccatgccttcatgctgaatgtaaaataaagcaaagtgcctaaaaccttggttcgttaaaaccatttggaaatttaagaaaacttgatccaaaaatttaagtagagccacttagtcaccatattacataaaaatagatgggctttgtcatttcctacattgatctatactaaaaatataaatattttaaatctatggtgtttttatccagcacatccagtgcaatttaaaaatccattctgaaaaccaaaagtcaaagaaaatggccatatttttagatgtgagcgccacgggactgtgaaaaaatctgtttctctaccccggcgtcctcagtaagcaccagggttgattctgctgatcttcctggctaagaagagagctctaacccttaccatttgatgggtgtctctcctgaaaactacatatgtagttaagagcacagccttccctgatagaaagatagactagggcacactagtagctgccttcctctggtgaagacatgtgtgcctctctactgccaaagacatgcgactcttcccacatagatcatgttcagaaactacatggctcaactggctcaagtctcaacagtgtagctctttggaaacattttatttttatttgattctatttcatcccgtgtgcatcggtatgttttatgcacgtgtgtatgcgtaccttgagtcatctacaagagcagccagtgctcattgcttaatgagccctccctcccgtctcctgaaaacagccttttaggtgtgctcttttgtgtcttaggccaagaggtttagttgattttgagcatctcaaagatgtttttcatgtaatcttacagtgggtgcacatatttaaaagataacgtaggaaattacttttaacaaataacttcattgcacatgttagtaatcatattgaaatcaataaaacagcctcacttgggtggcagtttctcactggttgaaattggttttgtttttttgttttttgtttgttggtttgttttttgaaacttctgtgtgtttgtacagcagctttctttcatttatggctgtcttcaacctcattcctgctttgatgacatgttttgaagaccagtcctccacatctcaggagagcgaaccgctccatttcatacctgagtgtctgcagcctccacagaagactcctttgtgatgaggaggcagactttgacagcatgcaatttttccatcaatcaaacagaacatcaacttctagatggtggttttgtagcatgacacatttctttgaaagtgggaattgactccgacaatccaagctaattaagccgtatcattggagctagctacatttaaatgttcctgttcctgaattctcagagggaagcctaagcctctttagcctacaacttaaattatcaggctttgaaggtgttctgttaaacaaagccatccagaaagccagccattcaaacagtaaggcttggcatttttgttgcaaaggtagattggaaaaataaatgaatcaccacaggagctttcatttctggctattattaacggaaatcatgtatttccattcaacaaatgggaatgaaagtcaaaacacaataatccaggaaaaaaataatgatttttatatcctggcctttaaagtgttttttgcgcctcactaatctctttatttttgcattttccatttctagcagactacagttaccacaaatgaggagtttttctaaactagattaaattattaaaatcaagattttacttgataattgctttaagataagcatgaatgtgtgtgctcnnnnnnnnnnnnnnnnnnnntgagtaggatggctggtcaatgagctccaatgatctgcctaattttacactgcagactcagaattagagatgcatgttgtggcacccaacttttacatggggtttctaggaatcttactttggtacctcgtatttttctgcaatcattgagtaagttatttcccccaaactcttaaacttacattttaataaggtgtgaataggtttaacacacacacacacacacacacacacggaggccagatgacaatgctgggtgttgttctccaccttcatttttgagacagagtctttcaccacttctggaactcactgattcagcgagcctgactggccaatgagctccagaagccttgctgtccttacctccccagtgctgggataacagcggcctgcagccatgcccagctttttatgggggtcctaaggatctgaactcaggtcctcatggtctctcagcaagctcttcactgactaggacgtctctgtagcctcaaaaagactattctgagcattattttaatttggaattccatctctcatagtgcgggagttgacaagcattgctatcattaaataactcagcagtatctcggatataaattagtcacaatgatacatctcaaaggacaggagctatttaacaagaatcagagcaccagtctgtacctcagtgtgttaaccgagctacatccctttatatcacttacttgttcacagaatattggcagaagacaaactgcaattcacaattaaggagcacaaatcaaagtaaaaagatactgacaatcttttagaacccccacttaattgcatagctacgaagtcacatgcattttcatttatctagtatatttaattatacatacatgtatctgagtatatgcaatgtgtacataagtatatgcacctttgtttattttgcctaattttcccatgctgtttcacttttccatgcttttgccttgttaggggacacagaggtacacatactgtcagcactctacctaccactgacccgcacccccatcccttaatctgtgttgattgtgacacttttctagttaaccattctttatcccttaaatctgtctttgcttctctgatatttttggcattttaatttttttttttttggtctttttagaattgtgacattaggtgaatgggacagcatttacctggattgtgtgtgggcataggtttgacattcaacactgcaaagggaaagaaagaaggaannnnnnnnnnnnnnnnnnnnaaggatggatgaaagggagggagagaaaaacatctgtacaaaaactggcagaggcagagagtaaccattgggagcctacacagtggtcaccttactgagagctcagagtggccactaagactggggtatagtcaaaaaatagcaagaccatgagggttgtctcagaatacatgtctacaaatacagctgatgataaggggaaacagtaaccttagggtcatgaaaattggccaacagcaggaggaaaagttaaagttagcaacacggctgctgaaagttgaccctggtgctaggggtgtagtgaacttcaaaatgagtagaagataaagagactgaataacatctttctaaaaccctcagctatgatattgacttctttttaggagacttcccatcttctctgacaacaggccctctcacaggctgatcctcatctatgtgtcacagtatctcattcatgaacatattaaaaacatatagagcaggaggaagcatgaagtcaataggaaatacatattattatcatttcaagctgtgaatttaaaatatggaaaagttccagttgtggtagtagtgcacctggatagaatttgatgaaggaggcagaggcaggaagaggccattctgggctacacatttagtccaggactagtacaaatacctttagtccctacacttgggaggcagagataggatctttgcatttgagaccagcctggtcgatagagtgagttccagggcaaccagggctgcacagagaaaccgtgtcttaaaagccaaaaggggggtggggagggaaggaaggagggacagagagagggagggaggaagggaaggagagagagaggtctgaaaagcagttagactagtgaaatgcttctcagcataccctagagactgcggtaaaggtgttttcttttgagtacaggggaaacggagaactcttggatgtgtgtctagggtcaagaaacaaatgagatgagccctgggctgggaagcctcagcttcagggagggactctggacacttctccctgggttatagaaagcttgctttctgtcttccgttcgattgtgttgtgaggtgcggtggtgcacagactggtggatcggatcggcagaaccatctgggtttttgttttgcccacagattgagcccttttttgtgagcgtggcactttacgacctcagagataacaggaagatctctgcggacttccatgtggacctaaatcaccctgctgtccggcagatgctctcggggaccccaccggccttggaaaacggcaatattgacaccggtacaccaagacaatcggaagaacctcacataaagggccttccagaggaatggttaaaattcccaaagcaggttgcgcttttgtttccttgtgatgggacagaaaaaccttgccttttagattgttcttaacgataaatagtccatacaggatgggcaatttcccaaataaaaattccttaaagctctcttgtttttaaatgacatctgttaatgtcttcaaggtggcttctttggtagttattacccactgctctctttggacacaggctgtcttctgctgtgagtgatccacactctgaaattgttttggtggccaaagtcgaaaaagtcttaatgggaaacatcgggagtggtgctgaaccttatatcaagaatccagactccaacaaggtaatgattattttcttataaatactttcagtcattttacagagagagaatcacgctgtattcctgaattatatcatttcataaatgtatgactttcaacattaaactagcagcataattaatatctaccagaaacttttaaaattatacattttttggtttatgtccttttgacccaacagcatagactctgatatctataaatttattaatagaaataaatataaatttggatatcattttaaccccaaagtttgaagtatttacaataacaaagttaggagtcaggatcaagtgaaggcaatttgctaagatatcagcaagctaacaatgggctcaataccaaagacaaatgattatacactaaatgtaataatagtgaagtgcagaagctagatatggaaatagtgtgaatggcctctgtagtaagacgaacggaggctttctgttttcttcattctatcaccttgttatttcaaataagcaaattatggataattactgcttattaaaaaataaataaaagtatatatttgccatacaaaggaaagatatcaaggaaatcaattgaatttgagcatgtgcaacaacttaggctggcgttttacatatttaatatcataatgcataattatatattacatatctatggtgtgttacattcagcaaactatctcttcagaccacatctagcctcttgccagcttttgtaaataagatcttattgacagtcaatgacacctcatttattgcgtagaatgtgtgaaaccctggatttgctctagcactagaaatggaagcccttcctgtatcaatggctacctcttagctatagcactagagttgagaaattgtggcagagaatgcaggatccacacagcccttcacagaaaaagtcttctgatggggaaaagatatgatctagtaccaattgtgaatataaatttgataactttccactcaagatttttacttctcttagctaaacagaagggaggaagaatcgcaggaagaagagaggagcaggtaatagttgatatttcaagactaggggatggatgttctacatttagaattttcaaatgagaaaagacagccaagaattctacaataacttgaacacagagggtcttgtgtataatctgtgagccagtaaggagaaactctatagagtttcagtagacaataaaatggaaaaaataatcactattatttcatatgtgtggtttgtaattggttatccctaataatattttatttgcttttttcccttcagtttgcacaaaagattctaaaatccaataggcagttctgcagcaaattggggaaatatcggatgccgtttgcttgggcagtgaggtaaggtcctactttttgactctcagaatagaaatgtgcttacaatctgcattagaagctatggctttgaatgcctgtggatcatctgatgctttttaatgaagccacacctagagaaataacacagtatcatcttcatagacatcatcaactctgcagagacacacttgactcattagttcagggagacagcatacacaaaggcccctacttcatattcaatgtagacacggccagatgtactggggaaacttactagtacaaaatcaaaatcatagttttataatatgtaactgctttagtgaacacaatcttttatcagtccagagagcctaatggacataagataaggagggatatcggataccttcctgtgaacctgcatgctttcatttatgcatagagctctgctctgtatggatgtccaaatgaagccatcaagttgatcatgtaagctgtctttgctttggatgtagattagtacagacagttatgtccccagctgactctgatggagatgctgagttctgtatgctcaaacagaagaccacccttccctaagtgggacccctgtggaaaataggctttgctttcagatctcctgacacgtcaactcctagtgtccttcgcagcctctttgcatctttacccatataaagtatagagaattcctcaaaggagggaaaacttggcatagactcatgacaaaaacaaagatcagcaatgaacaagctgatttaaaagggcttaattacaggcctagtagaaaacttagccccacttagtgaatgttaataacattatcccaaaggtagtcacttcgttaaaaattcaaagcgcagaaggagagctgacctgttgtgtattcttctattcacatggcttccactgggaaacacattcagagaaaacccaccagtgtgtgtcagaatgttgtggtcattatttaacattaaggactgagatatagcagtggtgtggagtccaacaccagtaatgcaagaaaattactgaaggctgcaagtaccaacttgcattcagacaatcttgcagcaagggtgggtgagccaggctgcagagcctggtaacccagcctacctgtcaaggtcaactctctgtttattgtgtcattgaacaaggctcctctttgggtcctgagtctcatccataggatggagcagccaatacttgcttcatgggcaatatcttctactaacttcagatgtacaaggatttggtttaaaatatgtcatggatattattttatctctccatccctacctttccttccagagataactaatggtagacatgaaaaacatgttacagacattgtcgttattactattattgctggaggtcacttgtcaagttcatgttcacgatctgtagctccccatttcttgtaaatttggtccagtgaagaggagtgtgaagggtggaagtaagtcatgtgtcagttattggcagaagtgacatcctgactctgaaattatcaacaaactgtctgaaagacagatggcacttccatggcagctgaaagtgttatcagctcttggggctgttatttctaggaaaatagaactatcaaaactgcaagcccatgctggatgacgggctcagttagtgnnnnnnnnnnnnnnnnnnnnnnnnnnnnnnnnnnnnnnnnnnnnnnnnnnnnnnnnnnnnnnnnnnnnnnnnnnnnnnnnnnnnnnnnnnnnnnnnnnnnnnnnnnnnnnnnnnnnnnnnnnnnnnnnnnnnnnnnnnnnnnnnnnnnnnnnnnnnnnnnnnnnnnnnnnnnnnnnnnnnnnnnnnnnnnnnnnnnnnnnnnnnnnnnnnnnnnnnnnnnnnnnnnnnnnnnnnnnnnnnnnnnnnnnnnnnnnnnnnnnnnnnnnnnnnnnnnnnnnnnnnnnnnnnnnnnnnnnnnnnnnnnnnnnnnnnnnnnnnnnnnnnnnnnnnnnnnnnnnnnnnnnnnnnnnnnnnnnnnnnnnnnnnnnnnnnnnnnnnnnnnnnnnnnnnnnnnnnnnnnnnnnnnnnnnnnnnnnnnnnnnnnnnnnnnnnnnnnnnnnnnnnnnnnnnnnnnnnnnnnnnnnnnnnnnnnnnnnnnnnnnnnnnnnnnnnnnnnnnnnnnnnnnnnnnnnnnnnnnnnnnnnnnnnnnnnnnnnnnnnnnnnnnnnnnnnnnnnnnnnnnnnnnnnnnnnnnnnnnnnnnnnnnnnnnnnnnnnnnnnnnnnnnnnnnnnnnnnnnnnnnnnnnnnnnnnnnnnnnnnnnnnnnnnnnnnnnnnnnnnnnnnnnnnnnnnnnnnnnnnnnnnnnnnnnnnnnnnnnnnnnnnnnnnnnnnnnnnnnnnnnnnnnnnnnnnnnnnnnnnnnnnnnnnnnnnnnnnnnnnnnnnnnnnnnnnnnnnnnnnnnnnnnnnnnnnnnnnnnnnnnnnnnnnnnnnnnnnnnnnnnnnnnnnnnnnnnnnnnnnnnnnnnnnnnnnnnnnnnnnnnnnnnnnnnnnnnnnnnnnnnnnnnnnnnnnnnatacagagattatggtttcgttggatgctttggattacctagcctcaaaaaaaaaaaaaaaaaaatacttagccaccccaaagtagcaaccccccgccccaccttccagggcaagcattgcttcagctaagagttgaaggctagcagtcaatcacattgttctcatggcatagatgatatattgttggtcctgcatgttctctattctttatttccagctggccccactctgcttcttcctttggggtaattcagatacttttacaagctgggtgaaatgaaaggaacgcagcagcgtggtgggttcacaggaactctggtcttgagtgctgggggtggggatgggggcagaaagaagccttctctgagatggttctcagtgctacagctctttattcacgggtaatagggctatctaaatcctggggagatagtgggaggctttgaggtgagtgaacactactgcagggttcccaggtaatgctccgtttacgtgaaaaatgtgtgcttgatggacacatccttatagggagagaggaagttaaacctggcatctggccatagtgctatgtgaccacctgaaggtgagccagaggtgggggggggggtcaaatagatatgtgtaccatggtacaggcaggcccagaacagggaggaagcaaccattactccggccagtctcaagctgagatttttccggatttgggcatggctcgaccttatttttgctccaggcccactccccaggtcacatggcccactgtgccccaccatttcctatcttacagtttgtttcacagcatagctctgagtgtaccctaaaacatttcaaagcaactgtagttaaaaatagtagcattaacagttacgtggaaccagatttttacccagctgccacagtacacacagatctcattgctgtgagcaactaatttgaaatttatctggtatgttctcagattggataccagctgtactgccactttgtatcaaaaatattatccttccaataggtgtagaacacacacacataccatacacacatacacatagttgcacacacacacacacacacagaatattttacgactcacaattagaaaagaaggtgaattcacaggtgtgcctactacaatcaaactttccccatacatatcatctgcaggatcataggggcccaaagccacaccaggatcacctcgcagattcttgtactctgtctcatttaaacttataaatgattaacagactgtttaattttctttaaagtcaatcaggactaccactaaaataaatgttcgttctcatatctgtacatctaaagatactcagtgcagtgatatctaagattctcatgctgtcaatggcccagcaagtggtggtccacctctgcttgcatccttccagtgacaagactcctagtacatgctcaccacgtccttgtctctgcctttctatagttttattatttgatagtttatttttataggattttttttgctgccttatgaattctaggtaaatgtgctaccattggaatacaacctcagtccttgatgtggtgttttactattattaattattattataagacagggttgtctgagtggcccatcatggctttggacacctgttctcctgctgtctttactaccccattgctgagattataatcccatgtccatgctaggccctaacaaccactttggactttcatcagctgtatttacacaggcatagaaacatctaaatcccacatgatggtgtgtgcctctaaccttagcccttgagagggtgaagtacaagggtcaagcacaaagcttcgtgtatacctcctgagcggctattccaagtgaagggtttccataggccaactgtggataggatcaaaatggagtttacacagcacatagattaatggagttatagtaattcattcactgaaaaagaatattattcttttgtgggtttttttgttttaagatttatttattattatacataagtacactgtagctatctttagacaaaccagaagagggtatcagatctcattacggatggttgtgagccaccaggttctggctgggatttgaactcaggatcttcagaagagtagtcagtgctcttaaccactgagccatcttaccagcccaagactattattcaagttgagtttatcactccctcttgtattgggaaacacaatgtgttggtttcaaaatgtcaagtacttgctcaaatggcctttaaagtatttatgcaaacgtcatttttttaagttaaatgctttgtaatttttatcacattttaatgtatttatgttgtgagcatgcacagcttgccacaggctgtccgaaaacaaagtgcaaaagcaggttctttcattcaccatacgggcccagaaaccacagctggtggacagggttggtggcaagtgcctttacctgtgcagttctctttagacttcaagctaaaggtttctattctgatttcctgatgctatttcattagaattttatgaaggagagattcggttgatttttcctcagttactacttaacaacaagaatatcaacaaaactgtgaggagacaatttcaaaaagtctaaaaatatcatttgaatacatctctagcccatgttccttttttccatgttattttatactaaatgtctatggataatatcagtttcaaagccatttcagctactttattgaaatatttgatcatttaaatggtgataagatattctagctaaggctcttgagctagaagaaataaaaatccaacgtttctctaatgttgaagaaaaagcaattatatgggggcctaatttttgatgcaaaataaagatggggaaaactgcatgggaagcaaatattgcctgaccccacttgataacttagatgaaagcaattatgtattttaagtaaggcactataattccaatgaaatggatcaaggaaagaaaaataacatacattagctgtatttcatgctaaacactgcctgatatttcctgcatttatccttatttctgtccaaaagttagaacatgggctcannnnnnnnnnnnnnnnnnnnccctcattaaaatagcctgattgctggaaatagtcatttcacagcaacttcactgaggatatagttttacctgctaggacctcaacttcagttgtgaattcctcctacaaatacactagagtttgctctctgtttaagagagagggaggcatcactttgcaggtgaattgatgcatgcatgtatttgccagtggaattatctgtagagagcttatcttcttaacacttaccctagctttctgtttcaatccacaaagagaccatatagaataaaatgattccttgaatcctgtacttcattctgggaactcttatttcaagggtagtgtcaatatctcattcaaatgaagttgtttagaaatatattaaggccgggaattggtggcatacacctttaatcccagcactctggaggcagaggcaggtagatttctgagttcgaggccagcctggtctacagagtgagttccaggacagccagagatacacagagaaaccctgtctcaaaaaaaaaaaaaaaagaagaagaagaagaagaagaagaagaaagaaagaaaagaaaaagaaatatattaagaacttcagctgttgtggctacttctatcatcaccaagccagatatctgtgagaacctcagatgctcagactcttaccctgtggtactcttggaaatgtatcttagaatgggcttcattcccaaccacgaaaacatgaaatatcttggcaggattgtctcagtctgcaaaacagaagaggggtggcttatctcttttgttctaaagtagttcaactccagaaatagtcatacatgaaagaccagtttgatgattcctaaggatgttttagactttattttcaattaaacaagtgctttttaataaatacaactactccagaaaaatctgtaatctaagagatgagagactaaagtctaagcagtgatagatcctgacaagtgagttacagaaggaagtggctagaaaccatcaggaacatcagtttcctcctctgatacatgaaaggacacagaccagatgaggctccagctggtgtgggttctgcgagcagacccctgctgagtcaaatggttaacaacctgacctttagctcagagtctgaatttattnnnnnnnnnnnnnnnnnnnntttctattctgatttcctgatgctatttcattagaattttatgaaggagagattcggttgatttttcctcagttactacttaacaacaagaatatcaacaaaactgtgaggagacaatttcaaaaagtctaaaaatatcatttgaatacatctctagcccatgttccttttttccatgttattttatactaaatgtctatggataatatcagtttcaaagccatttcagctactttattgaaatatttgatcatttaaatggtgataagatattctagctaaggctcttgagctagaagaaataaaaatccaacgtttctctaatgttgaagaaaaagcaattatatgggggcctaatttttgatgcaaaataaagatggggaaaactgcatgggaagcaaatattgcctgaccccacttgataacttagatgaaagcaattatgtattttaagtaaggcactataattccaatgaaatggatcaaggaaagaaaaataacatacattagctgtatttcatgctaaacactgcctgatatttcctgcatttatccttatttctgtccaaaagttagaacatgggctcatttatcttcacaaagacagtttaggaatctgattttcaacagccataattacaacctgattcctcttacacactcataagttctaacgctgccgcccaaagtgcattagccccttcttgcccgagttaaggtctcttgaaggaccacttaaatggagcactttaagagatagctcatttcagtgcagggtttgccttgcaaacatgaagacctgagcctgagccgcaaaaccaagcttaaaaattctcgacatgaagaggcatggctgtaatcataccacaggagaagcagagacaggaggttagctggggcttactgactagcgaaaattggacatagtactaccagaggatcccgcaatacctctcctgggcatatatccagaagatgtcccaaccggtaagaagaacacatgctccactatgttcatagcagccttgtttataatagccagaagctggaaagaacccagatgcccctcaacagaggaatggatacagaaaatgtggtacatttacacaatggaatactactcagctattaaaaaaaatgaatttatgaaattcctaggaaaatggatggacctggagggtatcatcctgagtgaagtaacccaatcacaaaggaacttgcacaatatgtactcactgataagtggatattagcccagaaacttaggatacccaagatataagatacaactggccaaacgcatgaaattcaagaagaatgaagaccaaagtgtggacactttaccctttcttagaaatgggaacaaaacacccatggaaggagtacagagacaaaatttggagctgtgacgaaaggatggaccatctagtgattgccatatgcagggatccatcccataatcagcttccaaattctgacaccattgcatacactaacaagattttgctgaaaggacccagatatagctctctcttgtgagactatgccggggcctagcaaacacagaagtggatgctcacagtcagctattggatggatcacagggcccccaatggaggagctagagaaagtactcaaggagctaaagggatctgcaaccctataggtggaacaacattatgaactaaccagtaccccggagcttttaactctagctgcatatgtatcaaaagatggcctagtcggccatcactgcaaagagaggcccattggacttgcaaactttatatgccccagtacaggggaacgccagggccaaaaagggggagtgggtgggtaggggattggggggtaggtatgggggacctttgggatagcattgaaaatgtaaacgaggaaaatacctaataataataataataataaaagatcttacctcatagagcaagatggataatgtgagtaaatgattgtgcgtgtgcgtgtgcgtgtgtgtgtgtgtgtgtgtaaacacacaatttattaagcaataacaaaatacaaatctgaataagcattctttccctgcagatctgtatttaaggacaaccaggggaacgtggacagggactcacggttttcaccactgtatagacaagaaagcagcaagatgtcgtctgaggacctcctaaaactggtgtcagactacagaaggtaggatatcctgaatatccctttacatactttaaactgttgccacactgatttcttctctctctgtaataatacctcatgccctgagtctcaactagccagacagcctcagaaacaaatggttttctggtgacttccttcttgtccaaatggtgccacaatcaagcagaagatttgtgacatgttgggctatattatctatccatctatagctgtgtgacaataatcccctccgccccaaaagaaaccccaccaacttgttgtctgggaatagcattatttatggtactcctgattgtgtggtttcagtttgtctcttccacatatgatattgactggcagaggtgagttgagactggagaatcaacttctaccccacaggagcgcttgagatgtgctgatgccctgattatactacatatcttactctattaggctctaagacagagaacaatcttgtactctttagccatctataatggttctgtttctcctgcctaagaattagcaagccacttatcaactaattttgtatgtccctcaaaaatgctatgatatgattaaacatgtgtccaggatagcttcagcaaatcatcttcatctagtaaaatagaagggatgcctatcagtgtttatcatcatcatcatcatcattattacttattgaagtttttagagcatacaattaggatgagaagtagactcttaggcaagaccctctactaatctcagttcttcgaagtccaggaagagcactgtaacataagaccttgcttcacgtcactcactcatcaaatatcctggtcaaaacttgtacccaagtcttcacaggactcctcaagccaccatgagaaaataaaagggaatttccctgttgcctttttgacagttccctaaggcatggcaagatgtaatgctgagcataatggaacatacaaagatctggggatgaactgatataataagcagcaaaagaaaccctgtcaaccctcttgttgccagtgaatacaaaataattataatggcacataagaggcatctctgatgcacaatgaaatgctgacattaagttaaaactggcattgagttaaaatctctattggggaccagtttctgtggtataaattaatttgtcattgctgacttcaagccaccaacatggttcactgaacacagggctgggaagagaggtaaagaaccttggggctcaaatatggtgtgtagattagttcttttctcgaagaatacttgaccaaagcaacttaagaaagggggttagtttggcccatgttcttgggggttatagttcttcatggaacagaagacacaacaacaggaacagcagtcaactagcgacattgcatttgtgttcaggaagcaaagagtgaacaagaaaaggaacaaggagcaaggagctgggctgtaaaactccaatacccacctcctccaggaagactctacctcctaaagggtctgcagtcttcaaagggtgccactagggggagccagcaaaggaaacagaactgccaaagagtcaaagagtgaacatgcataatgttggggggtggggggggagtgtgcagagggagtctacacatgtagaggcagtcagctctttgttaatgcagagggtgaaattcaagttcttagcacctgtagcaaaaaactagcttttttctccgacattcttttttttttcttttaaaaacttcagaatatagtgtgcttatatttgcctgcatacagaacactcacccaggagaataggtgttttctttcccaccaattgttttggcaacatgatgactgtgtaaatcgcaatggtagcattttcccccttttgacatgatttttgtcctttagctggagtcctctgcttattaattataatttccaactaaaatttccaattttcttggctagatagtttacatcatcgactcattgtttagctatgagttacaaatagaaataaaatttgttttaagtggatgtggtggtacatgtcataacctgggcacttgacaggctcaaacacaaggctggagagtccagggccagcgtgctctacataacaagagtctcttagaaaaaacaacaacaacttaaaagcatctttaaacccttccccacagactgagaaccaagatcacagtgtattagtgctggatcgtgagggtagggaaacagaaagggattgttagtggtttgtgattagctcaattcgaatattttttctttttctttttcattgaatatttaaaatccacttcaacagtgaaatgctcaagcaaattcaaataagtcttattggcatgaccatataacttactgttatacccatttggtcacagaagtaaatgaagtaagagaaaataagtttaaggtattattcaggatatcagtaacatgattcctctataacttttgtttttatttatacgagctttgttgtataagagttaaactaaccatagggggaaaaatcaatacactattatttactgtctattctttctccttctcaaagctcagaattatagaagatggatttttctgtgaaaatgaaaataatacactctgtgtgtgtgtgtgtgtgtgtgtgtgtgtgtgtgtgtgtgtgtgtgtgtgtctgatgtcctttcacagagctgaccggataagcaaaatgcagagcatccctggaagcctggatattgctgtggacaacattcccttggagcacccaagtatgatgtctgtgttacctgtgtcatactgcgtttagagacttccaagtatcttgtgtgggagggctgtttgctttgttggtttgtcagttaactggctggccttaaggcttggtttgtttggggactctgtcttccaaactggaattggtgttcattataccataggaatatggggcgtatttgtcaattgagacagacagggagtacataatggaaactgtatccaagatagcctaactatcatctgttatataaatatggatttaatttatccagcaagattctaaattatttacataatccttgatactgtggagtgtcacaggaatgtggtgtcagattcaagtacacaaacagttgatagtgagagaattcagattctatctagtgtccctgatgcaaatacagactggctctgccataccacactgccacaaattgctttgagtactgggcatagccatctaagagatgttattacacacagtgtctacctcttctgggacatggcaaaaatcctccttttactgacctaaaaatgaggatttcagaatgccgatagaatcaaggtttcctgtaataaatgataactgggtcaaaacttctgacagggaatattaggctggccatctatcatgatatatgtccacaaatcactgtaatataaactataatgagaattctaacttaagctctgacctcaaatcattttacattgattgatggggaacagcagcggacaggctatttcctctacgtgacttacggaacaaggctttactgcctacagaaaagacaaaacaacagaagagaaagctaaatattctctttgaaagaatggtatggtattagataaatttgagcatacagaaatattagatagatttctgattaaatactagaatttttatctggttttcaaggatgcacagcccattgttagttttctccgagttcaggaagattctctgtagaaaggaaaagcagcaggccattctctccttcaacgtaactgtttccaccttcaaacagtggaatggcagaagttttgacctagacattcctaaccatcttttctttatctttttccttagtctattactacaaagatagagttttaaaggtggtaaaaattgaaaggaaggtaataaataatatacagagagagggctgttcatctgttactattaatactaaacccactgaataacttttaatctgccatgcaatcatatatatgatatgataatatatatatgattttatatatatattatatttataatagcaagtgaaagtcaacaggttactctttatcctataaaaatctatctagtatagtctatgtacaggaaataatatgaaaaatatcagtccatctcaaagatttaccatgcttcttagccattactttcaatactcaatatataattttcttatccccaaagtacacatctcacatttccatgctcttggaacataatatcaagtttccattttaggtggattcatgttaaaatatgctaagtgttgctcccttttgaagacccatattaaatgacaaactcttattttctgattttttaagactgtgtaacatcgtcctttatccctgtcaagcccttcaacgtgacggctcagtcagaacctacagtggaggtggaagaatttatttatgactcaacaaagtattgccgtccataccgagtatacaaaaatcaaatttatgtataccccaaacacctcaaatacgatagccagaaatgcttcaacaaggtatgacatacgtttctgaggcattaactttttctcagtccaccaaaactggaccacacaagatggttcttgaatgagcatctacaaatatctatgagctaagacttgaaggaaatgcttagccagtggtggattcattctagaattcactttaggatcatttaaagaggaatccacttgtagaatctcagagggttacaaaagatttgtcttatagttgctcattctgaatcgtttgaacatgcatgattgtataatacattaataattctttctaatatcagcctgacataaatttgatctagactatttttttagtttcttataatacttttaaaatagcatgcttagtcctatgctgggagcatttttgtttcctttaaaatctctccagagcctgctgtttctgaagaccatgaataatgtcacaagacaatgttggttattctacattttttaagacttaaatagaagctacttattttaaacccttatattgtttaggatgttatttaagaggaaattaccatccccattattcccctcactataatttcaggcacggaatataactgtgtgcattgaattcaaaaattcagatgacgatggagccaagcccatgaaggtgagtcaagtcatctgaggacacagcatgagaggaagggcaaccaccttgctcttttgcaccacagagggatatattatatgagtatggttaaatgaggagcaatcctgggcattggttttagatctcctgaaaatgtctctgactttacaaccatcactaactccatcaaaaatgctagcctcccagggatcttcacctcatgatttagaaaaaggaaagtcattaagatgtgaaatagtctgcccagtgcacaattagttcacctcttggctgtgcatgcttgatttgtagcagtacatccagtctgccttcatccagtcttcatagaaaggttactatacccaggcatattggatagataatgcaggatgtccccagagagctcatatttatgaagaggcctgttgcctaatacaaaatgctcatatttatgaagcccagtgcccaagggactctaaaataacagtccaagttgttgatcacatgggttaataatgtcactattttgacctgtaaatctttcatgaggacgagttggtttgaatgaaactggaatctagccaagctttagaaccttaactctagacaagagttggttcaatggtccccaacaggaagtcatccttcagggatctgtcttgaacattaactcatatttatgatagtcaaaagtcatacagcaagttgattcactattttaccctggtgccatacctgtaagatgaataaagggtttaggtggtctttgatgtcccattgcgtagtacatacaggacaatgtacccataaagttcaaagttaactggatgtcatcctgggaagtaaatcacaaagtatgccttagtactggaattgggaacggaagagttgattgttttgaatattttcaggcactcacagttgtttccctcctaaccttctaaacagtgtatttatgggaaacctggagggcccctcttcacttcctctgcctacacggctgtgctacaccattctcaaaatccagatttctctgatgaggtaagtatcgggcccccattgcctctgcctaaagctcctgggtgagtgggtcagggaaaccttgtctagaccacatctcagattgagaacagtagtgtcacttcccaagactgttaagtgacagtgactactatgacactgactgatcatgatcctgctttatgtttcaaattcccccattgaatacaagactgatcttcaaaaaaagatggttttattttcttttttccaaggaagactaaattttctcgtttactttacacgtgattttattagagagtgttaccagctggtggcagcatacagtgttatagcaggaaaactagatgttttgaatcaatactattgctcactgtgtgaacatcactgggctcggtcctctcacctcatggttagaagtgagacttgtcctggaaaacttaacactcctattaagcactaagcatgcatgatctcctccatagccttgcattaactctgccatagccttgagaatcgtgtactcttatcacctcctgttatatagaggagggctctgtggctcagaggaaccagggttgtgttactactaagtaacagtcagcattcaaaccaagccacataactccatatagaagcctccccacttcttataagtcataacaaacatcactgggctagtggtaaattgcttcacatatattagctgtgttataaatagcccatgacaagttttagtgattaaccccagctgctaccataaggcaaagatctgaactacttcaaccaactagcattttatatgaattccttgatcaatgctgtaacaaatagcatccattagttgcttaatacagtgcataccatttacagctccatggtcagagatttgaattggctgtcatatgagcatcactgaggcagtgtgtcttctaaaatttctttttttttttaatttttttttattttttattttttttaattcttttacagatttatttcttttccattttttattaggtatttagctcatttacatttccaatgctataccaaaagtcccccatagccacccacccccactcccctacccacccactccccctttttggccctggcattcccctgtactggggcatataaagtttgcgtgtccaatgggcctctctttccagtgatgggcgactaggccatcttttgatacatatgcagctagagtcaagagctccggggtactggttagttcataatgttgttccacctatagggttgcagatccctttagctccttgggtactttctctagctactccattgggagccctgtgatccatccattagctgactgtgagcatccacttctgtgtttgctaggccccggcatagtctcacaagagacatctacatctgggtcctttcgataaaatcttgctagtgtttcttctaaaataaggaagatctgtttccttacctcttgcagcctctaaacatcacctagcaccttggcctgtaactccgttcctgccccatgctgggaccggaaatgttgatggagtattcccctcacttatgttaagccctaaatcctattcctagcaccacatacaactaggtgtagtgatcacagtccttggnnnnnnnnnnnnnnnnnnnnnnnnnnnnnnnnnnnnnnnnnnnnnnnnnnnnnnnnnnnnnnnnnnnnnnnnnnnnnnnnnnnnnnnnnnnnnnnnnnnnnnnnnnnnnnnnnnnnnnnnnnnnnnnnnnnnnnnnnnnnnnnnnnnnnnnnnnnnnnnnnnnnnnnnnnnnnnnnnnnnnnnnnnnnnnnnnnnnnnnnnnnnnnnnnnnnnnnnnnnnnnnnnnnnnnnnnnnnnnnnnnnnnnnnnnnnnnnnnnnnnnnnnnnnnnnnnnnnnnnnnnnnnnnnnnnnnnnnnnnnnnnnnnnnnnnnnnnnnnnnnnnnnnnnnnnnnnnnnnnnnnnnnnnnnnnnnnnnnnnnnnnnnnnnnnnnnnnnnnnnnnnnnnnnnnnnnnnnnnnnnnnnnnnnnnnnnnnnnnnnnnnnnnnnnnnnnnnnnnnnnnnnnnnnnnnnnnnnnaaagaaagaaagaaagaaagaaagaaagaaagaaagaaagaaagtaagtaagtaagtaaggaaggaaggaaggaaggaaggaaggaagggagcaaaagaaggaaagacaaacagacagaagactttctctgaccacattgtacctacttgcaatatctggtataattccatggtccccacctaagtcacatctttgaactcccctttaccatgcacagtcacattaatgggttctggatattagaacacagagccattctctgactaccaccccattttaccaatttgttattttcaaactaattaacagaattctctggcctcaccttctacctccatctccacttaatgctcttattttctctccatcaatccaggtcaggaggttaaaaagaaactaagggaaagagttattatcaaattacaaaatagctaccatattgattgaccttttgacaaaacacttgtgaaagatacattttcagtagatgtaaaaatttcataaattagtgttcttggtgtctcaatgctgttaaatctggcttttgatcatttttattttcttatatttcctggaatctcacaaaatctatgagctttccacatgactagattattaaccacttagtggtctctgaagcacagatttaatactaaggttttattttcttgattacaggaaaaatgattccattaactttaaaatgggtataaattatccagtgcattattataatataatataactgcaggattttttttaagtgagggattgtgaaagctagttttatgtcaacttgacataagctagtgtctttttagaagaacggcccttaactgaaaaaatgcccccaccagatttgcctgtgggatagcctatagtacttttattattattattactgttgttgttaaatgatgcgggagaaccagatcacaatgggcagggcttaccctaggcctgacattctgggaactgaaaaaaagcagtctgagcaaggcagtaagcaggactactccatggtccatgcttcagtttctgcctctgggttcgtgccttccttgagtttctacctgtctttctttgctaatggacggcaaagtagacctctaagcttaaataagcccgttcctgcacagagtggttttggttgtgatgtttcatcacagcaatagaaacctcaagtcaaggatacttttgttactatttgctgaaattcataagtacattgctatgtaatctccaggttggttgagaagtttcctagtgctccgcatattattatgtattttgaaatgtttattggcttttgtagcaactttaatacactgatacaaataatatatcagcttataagtcatctaagtccagggatccttaaactttgtcatacaccagaattatctggaagactcactgaatcggagcactcagatggggatactcagcacgtctgggataggcctgagagtttatggttccaggtgataccaatgttaccactgcagggaccacactttgtaacctacagtcctaaatcctttcttaaacagaatgacagtaactagctaaatgcacacaacatctatttaacaatctataggttttggttatagcttgacttaactgttctcagaacaacttagtgattcacataaagctaagggcaggctactcttcattaaggccattgtcccatactgttgttaaacagatgattttaatctcaatccaaatgtgatgcctttcatttcaggtgaaaattgaactaccaacacaactccatggaaaacatcaccttttgttctccttttaccacatcacatgtgacatcaatgccaaagccaatgccaaaaagaaagaggctttggagacatcaggtacttaaaagaagtgacctgaagtaggtcatggtgacatgtgtttaacttcagttggagaccatttttaaaagatgcagtgtattgattcttaaatgagttaatgtttagagtgactgatgcatatttgtacttcttaatgcagaggtgtgtgttcaaaagttttccccctgctgtttctttgcagtgggctatgcatggcttcctctgatgaaacatgatcaaatagcttctcaggagtacaacatcccaatagcaacgaccctgcctcctaattatttaagcattcaagatcctacaagtgcaaaggtattgagtagtgtataatttacaagaaaagtattttaaaaatcaaccatgaaaatggttatcttttttccctgctatttaaactaacatgatagcatgtccattgtacttatgaagtgaatcaacaataatacaactcttattttatttatggccactaaaaatgaacccttaaaaaatggactccatggaagtatatcatgctcatctccaaaacctctgaatgaatctgcacattttctcatctctagagcattggagcagtaatggctcagaacatcaaattaacacaaaccaaatagcttgattcctttatctcaatttgtcagtgatggtggcaaactctttcttgcagcatggtggaagtgacattaaatgggtcgatggtggcaaaccgcttttcaaagtgtccacatttgttgtatcaacagtgaacactcaggtgagtaccattacagaagaaaaatgagaagcaggccaggcagagagggagggaggaagagaaggagggagggaatgaagggaggggataaatgggaggggtgaagaggagggagggaaggaaggaagcaggcagacagggaaggagggagaggagggaaggaagggagggagggaaggaaggaagggagagaaggagggaaggagggaaggaaggaaacagacaaggagagagagaggaagagaaggagggggagaggtaaggagggagaggtaagaaggcagggagggaggaaggaaacagggagagaaggggggagaaagggaagaagagggggagggagggaggatagaacccaaccatccacaggatgccatgcccttgccaggacaatttgaccaaaagagagaggggaatagtgaataggaaatgtgtttatattcatccagagtgctgtagttcagatgggacctttagatgacccctctgtctatcttcggaagaagagggctctaatgactgatttcatgaggagacactgctgacaagtgcttgtcactggcactgagtttgtgtgccatcacaatttaacatctcttttgcctttccaggacccacatgtaaatgcatttttccgtcagtgccaaaaaagagaaaaagacatgtctcagtcacctacctccagctttgtccgtgcctgtaaggtaacgtgccatgcagactcattgcagaatcaggcccattcagtggtttccaggataaaaagcgggcaaagaaaacctatttcccactgaatagcaagctaagatgtgtttactattcagacctttcaaagaccttacagttcatttttacttcatagtttctacatgaaactatgttcatatgagaaggaagagaggcaaaggtcagctttttatccaaagcaaaaatacttgaaaattagtatgtatttaccattgctaattaagcagagactcccttcaatatgacctacaccttccaccaaggtgaagcagggaagccaaaggccagatttgggggagggggggctaaggtgatcaggtcacactcctgaaaacacctgcagactgtgctggactgcccctcctgtttatctgtatgcttcctcccatcatctcactgcagaacttactaaatgtggacaagatccactccatcatgagtttcctgcctatcatcttgaaccagctcttcaaaattctagtgcagaacgaggaagatgaaattactgcgaccgtcaccaggtatccatagcaacactggggggacagagcaggtagcttttggtctcacagaaccctgatgacatgattccaactagatggccacatatgtgtgaacatgtttttcagatttaagcttttctcacactctaatccttattttgtggtccctatctattatcattagtggagtgctaaatgtttttcttttgtgtttttaaatattttattttgagataattgtagattcatgagccattgaaaggtataatatggagagaatacgtgtccttgttacttattctcccacactggcgacacacacacatattgcacagagacacaatcatacacacacacacacatgcacacacacacatacacatatgcacatacacatccctatctatgtatatacaaaattatataacacataatcacttggcattggctttttaactcatcacaaaagaagattcaggctgtctctctgtgaagaggccatttcttttcatggtgaagtagtatcctatacagattgtaccacagtatgattaaggattcatttgttgaaagatatctgaactttttctccatttgggggctatactgaataaagtcactataagtattcatatataatgctatataaacatagtcctaatactttacttctgacataaatccatagtaatacaatggctgtacaactcattacctgagtgctggatattttctttttagaaattgccagccgggtgtggtggcgcacacctttaatcccagcactagggaggcagaggcaggcagatttctgagttcgaggctagcctggcctacaaagtgagttccaggacagccagggctacacagagaaaccctgtcttgaaaaaccaaaacaaagaaaaaagaaattgccagaataattaccagaatagttgtatcattttattttaaactattttattttatattttatttatattttaaactatttatacagaagtttataatttcattgttttctttcttttgtgttaaatttggtcacgcaatactcatccaacatcgctcatgagtctagtcatgaactcagaattttgcatttatattgtttttaattaataatttaatcatatacttgtctgtttcaaaatgaccataacattatggaaaaaatcaaagctactgttgaaatgtttactgtatctctactgcatagatagatagatagatagaaagatagagagatagatagatagatagatagnnnnnnnnnnnnnnnnnnnnnnnnnnnnnnnnnnnnnnnnnnnnnnnnnnnnnnnnnnnnnnnnnnnnnnnnnnnnnnnnnnnnnntagccttgtttatgacaaaaacccctgaggttctaagaaatttaaaaaaaaatcactatcagttccacaaacctccagttccagacccagattaaaaatcccaaattgtgccatcaagtaatgtccctttcagctgaatgtgtatgtcgatgttgacaagatttttaatattgcagcctctagctctgttgtactttctgagattacccaaagctctccaaccatgcagcaactgttcatgttaatatggaaaagtatcaatgtgccgctgctacaagaaactctagcccagctaatgagggagatatccagcttaacctaatctttttttccaaaaataggtcttctgctctcaggttggaagatgagccctttttaatggaatatgaccattaatcagagcctaattgggtacttaaaaatgattcccttttccaggaagacaatgtcagcaagtgcagagaccacatgtggtacattcagctcagacaaaatgtctccagatattgcatgctaagaccttagtccttggaatgtttctggttggaaatggctcccaggttacagaaatatatcaagtgccctctattggggagtgaagaaggaatgaaaagagtgaagtgactggttcactcatctgacaactcacccattcatgaaataccccatttccaagcattctaatgtgaaaataaagtgctgtctgcatgccttcagctaagtcactgaacatcgtgcttttccagggttctggctgacattgtggccaagtgtcatgaggagcaactagaccattctgtccagtcatacattaaggtaaggagtcatgattagggccctgatcatatcccctgtgctgtgtggcttgtctcatttcctgtctgcaccaagtgagaggttctcaccctgacatttgatggcgacccgccacggtcagaacacaagttcactttagcagaattccatttcttttaattggtgggctaactatattaatgtttaaatgcaaaactgctatgtgcatgtgtgatatgggactggtggaaagaaaagaacaaaggagaaagctataacagtgctcctttgaagttgacattggaaatatatgaaatttctgggctaatgaaggaagacttctctgggtttgttgaatgctctatgtttcttctgcaatgttttcttagctctttttattgtttttctcaggcattatttcatttccccagttactgtatatttgtacctgcttctggtatgttgagtcctttatcttctgtcatgaaccatttgaccatctcattggtgtgcactgcttcttcagtgttccttatcaagtgtccacttggaagtattcttttctcattttcagttggctgggaattggtgccagtgaacttgggatgatgtttgtactctgatagctctgctccaaacatccttccactgaatgtacagaagcaacccaatccagaggcaaagacaagcattctaaattacattataatacatacaaaacctacagtcctattttatccacacagatgaggtctttggagttgttgacttttaacggaaatgcattcaagtcatacatggtgataaacatagacttgtgcattctaaatgtctagaaatacaactggagaagaaccgggaccctttgtgttagaaacttcttttaacaataactggtatggtagaaatgttgctacaagaagaagtacctagtaatctcattctagaatgaaccactctgagattctatctgcaaggctttctatctatgtatattctgccagaaatgttggacgtcttccccaagcaccaaaccatgggtgtgtgcccctcattaaaatagcctgattgctggaaatagtcatttcacagcaacttcactgagatatagttttacctgctaggacctcaacttcagttgtgaattcctcctacaaatacactagagtttgctctctgtttaagagagagggaggcatcactttgcaggtgaattgatgcatgcatgtatttgccagtggaattatctgtagagagcttatcttcttaacacttaccctagctttctgtttcaatccacaaagagaccatatagaataaaatgattccttgaatcctgtacttcattctgggaactcttatttcaagggtagtgtcaatatctcattcaaatgaagttgtttagaaatatattaaggccgggaattggtggcatacacctttaatcccagcactctggaggcagaggcaggtagatttctgagttcgaggccagcctggtctacagagtgagttccaggacagccagagatacacagagaaaccccctctcaaaaaaaaaaaaaaaaaaaaagaagaagaagaagaagaagaagaagaagaagaagaagaagaaaaaaaaaaaagaagaagaagaagaagaagaagaaagaaagaaaagaaaaagaaatatattaagaacttcagctgttgtggctacttctatcatcaccaagccagatatctgtgagaacctcagatgctcagactcttaccctgtggtcctcttggaaatgtatcttagaatgggcttcattcccaaccacgaaaacatgaaatatcttggcaggattgtctcagtctgcaaaacagaagaggggtggcttatctcttttgttctaaagtagttcaactccagaaatagtcatacatgaaagaccagtttgatgattcctaaggatgttttagactttattttcaattaaacaagtgctttttaataaatacaactactccagaaaaatctgtaatctaagagatgagagactaaagtctaagcagtgatagatcctgacaagtgagttacagaaggaagtggctagaaaccatcaggaacatcagtttcctcctctgatacatgaaaggacacagaccagatgaggctccagctgtgtggttctgcgagcagacccctgctgagttaaatggttaacaacctgacctttagctcagagtctgaatttattcttaccatagatgtggggaggcatttaacataaagatttatactaagtcccacccctaggaatattgtttaaagaaaaaaaaatgatgggctgattccaagacatgcttgtatatcctccggtggtgtaatagtcaatgcaatttatatttattcacaagtaaacaaaacaccatttcaagttcagtggtactgctgactcactccattcacaataccaaactgtacagatacaccatgtccttttccaagatgtgcatctaagtcaatttaatgaaatgccatgcttcacgggggttgtagcactgtcagttctgagaatcgggtttacaatgtaagaatattcaatttccagttggaatgaattacccttcaggctaaataactgcatttagtcacacagttggtggtgagtttgtctgcatatgaagcacaatgcttaaaggaaattaatcaccttagttgtagccggttttataaatctgttggctttttgtctctcctttgagaagtgcttcaaacctcaggccatatgatggtgcagatgggcttgaaagtcccaagaaaaggttagagatcctaaaggaaatgtaccagtttcttgcctaccttccccttcagctgtagtctattttaaagtatgactatcacgaaggccataccttttcttgagtcaaacccaactcctaaacaaactactgtaattcagtatgaagcattttaatgtttcgaaatgtgtgtgttgatatatgtgtgtccttaaagtatatgaataaataaagaaaagtatcaccctatgattcttggagggaaggctaaaaagtagacggcatttgttatcttactaatggctgatgtgtatcaacctttccatagttatgtctagcacaggatggtagaacctgggcttgtgggggactcacctcctcacctctggaaaggacctgctcccccacttggctatttgagtaggtactctaccctttcaggatgaagaattgctaccatgccacccattgccagtggaaggaaagagaaggggagagtgtcctaagtaggtgtgtccaagccctccatgaacctgcccagtggttctctggccctttctcttgatttctacaaaaagagttccaagaagagcttaggtgagcaaggccctacttctgcaaagaccccaactaggagcaagtgtgtcctctcttatatcatcaggcctctactgactccatgacaaaagtagacacaagcagttgattatgagaaatgaattatttcgtaggataatctttgaaactttttacaggtaattaaccatttccactctttgggtttccttcagtttgtattcaagaccaaatcctacaaagagagaacaatacatgaggaactggctaaaaatttgagtgatcttttgaagtccaatgactcaacgatagtcaagcatgttctagaggtaactctcttcataaaagtagatacatttgcaaacaatggatgcagaactctgatcaccagaagattataggactcgctgatgtccacacttcattttccttctaatttcttatataggtttcatatcacagtttcattatattaaattatcgagcaaatggggaggtctatagcaagagaacagagacgagtgggttacagccaagttaagtgctttgatctaaaagcaaaacgaattactgttgaaaaaaatctaaaacattcacaaacagtaagtataacacatagcttgggcagctagttacaataggaaaattcttaggaaaggattgtaatggtatattcacaagcatattgataagcacagccagtttttggtctctaatgaaacatgtgtggggacatgaagaagagacacagagcagttaagaagaataagcatgctgaggacaaaaagtgaggcttgcacctgtactaggggaggaagctgataatatggagaacggggcggttgaaaagaaagcatgaagaaggtcagggaactgcccatggggacattacagtagaacactgcaggtgcagaaaaggccttttctattcagtgaggctgtagcacagctctgggtctgggacaaccagtgtgtacaaggatgggagggctttaaatgaagccagagaaaccacaagtagcctgagatgctgtgcaccaccagagagagtagagagtatctgttaaattcagaaacaaatggcaaaacgtttgtcagaatgactaaaagtgaagtttggtgttagacaggtaatggagatgccttggatcttctgtatgccttggattctttaaatagtcctgatggtatggccttcacttctagtgtcaagcagacactttgattcctttagggaagtaacccatccattaagccacaactagttttttaaaaggaacattaccctcctccccttcacctaagtcagtccctcagaatttaaggtgatgttccacagaggttaccacagcactgcaccagccaaaaactggatgtggttcaaatgccctctggtagcagagcaaaccggttcatactcgttgtatatgtgatgtggcgatgagatgtgtctccatgctagtgactctccataaatgagactctaaacatagcgcgttgaatttaaaaggaagtctcaggatacttgatttaaaatagcaatttttatgtggagttcagtgatttgaaattaaaatactctattgtataaatattggtgggaagatgatcagtacaaaatagagagcctggtggtgagccagccacaaaagcttcattttagcttcgttaacttaagtgaaacagagtatctcataaatcaattttccatgaacagatgctcagaaagtcaattcaagtaaattgttgactttttaccataatttctacattattaaaaaaattgaagtataggatgtgaactattacaattataactttgacaaaggttaaggtaacagaaaatgcatttcttccctggtccatttaacttattcatatttactttaagattgaaaaaaaattgagtagcaatattctattgtaaagctcataattgtcattattttaccatagattaataaatgcttcattgtctcttctccctttagcattcttggttcttctttgccattattctaaaatcaatggcacagcacttgattgacacaaacaaaattcaggtaagatcataggtaatatagcaatgtaatatcatccaacaattaagctaatgaacatgttctcattagttccacatttattgaccgtgtaaaatcttagccatttacgttcattgctttttaagtacaagaaatgatcacatatgttaataaaggctcattcagaaacaaatgccaagagaaaaatgacaaatgtaaacatctatggaggagacttaactccaaaggacaaatgggactaggaaatacaaggtagaaaggtctgatacccatgagagaaaacggaaagggaggaggggctggttaaaatgagcctggcagtaaagaagctttcagcctggccaatgagtcatctggaagcaaagcatgctcattgggggcattgtgctctgcacaggtcctgctggtaagcctcagcctactccatcgctgaatagaatcagcctggaatactatgcttgagccatgagtgattgattaggtcttggatgggacagctttgtacatgttttccacaagttaaagaaatgtctgggcttctgcagtctacagttgtcatggcacactgcacacaaccatgaatctgctcctccacagcccccatagacctctcattagatgagggttgatgggattaactccaactcctgccacagcaactggcctcctcagaaccatgcctaccgagcacaccatccccttcctctacaatctaggtcttctcaccctagctcacatttggagaaggccttggtgacccaccagagattatgacccagaccttccttccatgatgctctgaatctctgataacctgacttgactgtagtcagggctgctgcgtgtcatcactcacaatcacagtcaggcaatgaggacccaaccatgaacacccaagggaatagcatgagttctcatacatctcccatttagataaagctagggaggggctctaagactctcccctgcctaccagcatacagaggggtagagtcagaacagtattgcatgtgatggccacagtaaggaacactgacgttgtagaggttagacagtgccagatttctctctttacaagaacagctttacaagaacagctccaaacaatgagttccatgctcagtgttgatccaaatgcccatttcttctatataatcttcatacctgggaccaggtaaattactttgaggtggttcttgaacacacacatgcacactctcacacaaacacacacacacacacacacacacacacacacactatccatccgtccatctaaatgttaccagaactttagtcaaggatcttcagactctgtacgtatgcactcttaacagagtacatatgatagtgatttgggtttctaggtagaaatgctatgtagatcctctgtccagtgatgcttcaagtgtatgactgttcccctctcccgagcatacctagccttggtaaatgtccataaggacttgtggagaaaaattgatagaatcattgccgcatacaagttacttagtacagtttttggaaactttcctctaacatagcttcctcttcaattcatatgtactggatgtatgtagaagttaactctagtctatatctccttaatgagatagaccccttcattttccagttgcctggccctaacttctttgtgcgtgttagtaaccaccatagttcagatcctacatatttcatacatcattattcaactctatgggtccctctgtgtcaagctcctttgaatgtccctctacctttggcatttattataaccctctagccacacacatcatgtggtctcagttactagggtgacatcctatcctatgactgcttctgttatcaccagacacaagataccatagaacatcacagtggtggtagtaccagcatcttcttggtagcttggggtcattggagtattcactgtgctttcctgtgaaacttcaggttctagtgggcacaatggtctcagttaatagcaattccttcaggtatactttcttctatgtctttactccagcctttatcctctactacagtggctaagacaattacaatttaacttcaggtgacttatatccatctgaaaaacatcaatttctatataaggctacctatcatttaatcctacatgttcaaaactaccttctcctctattaattgtagagtatgcccttttataccccgtccctttcatcaaacagcctcaatggccagtattaaatgacctttgtgttactcttatagatgctacctagttttcatagccaattatgatatagtctctagtcttcttgtttaggcccagaaagctgtcagcttaggcctctcatgaaagaagaggtgggtgagcttccctagagtttgtatatttccttccaaagccagggctttgtggtgtcttcactagtgagagaagagccaactgttacaggaaaataggcaacactataaacagtaaaggttaaggacaaaacacaggggcattgagtcaccaaccagaagctcctgtcaggccccagcacttgccagccatcaccttgaccttggtatgaggaaatgctttgcagttcactcatctctgcggactgcatgccttcaccacagcctctgcatgtgtgtttttcacacatctgtgctgtccaacttctaaatataagaaagagcctcctgccccaaaggaagaggaagatctaacatggagataagaataattcctatctctgaattttctgaattctactgtgccgggatcagaaattttcttgatgttgtaatccctgctccgtcactgaaacactgggtagtaagaacaacacttggcatctagctaggggctggatttttttcagctgtacaagaatggattggactaaattctgctacagttgtaattgatagactttatgctctcatctagataggtcacagaacagactaagaccaaaccatctagacagccccactatgctgtttttactgatcccaatttccctttttcttacctacttcaatagtagccctcacattcatcccagcaccttctatttttcttactagtctccataggaaaacttgtcatcctttgacacaaaagcatcatagtcaaattttctcaagtgtgtgagtgctttctttttcttttctgtctcttttaattatggagtgagtagctttctacacttaagaaattttagtcatgaatttcagaagcaagtgtggagaacctgagggagtcaggagcctgtaatttggcgcactgaatgctgagatgtagcttcacagagcatacccctgggtgactcctggatgctgagatgtagcttcacagagcgtacccctgggtgattcctggatgctgagatgcagcttcacagagagtaccctgggtgactcctggtctgctgactgaggagcatttctattcctgggatctgctacatatcgtctcaaaactgatctcaagtcccagcaggtccaggaagctaactaaccttcttttcctccctatcgctcactagtttccaacaaagctcccaaatgccccagacctgggttgacccctcatgaccttggctgtctaacaacccagctcctcctcatctctgctccagatgtgcagtttgggggtcaccgcaatacccttctacctatccttgacctcaagcttttctggtatttatccagggagtaattggaaatattccatgtatgtttagcacatcacatgcctttgggttaagagtgggaatagaccacaaggagaatttcaacagaagacttcaagatgggggatgaaagagaatatcaaaatctatgccattcacacatatctctcgggagataacataagctctgctatttgtaatacatcttaaaaaattaataaaccccaaagaggaaactggaaatgtgcttcacttatgtaacaagtgcttgttgtgccaggggatggcccagtcagtaaagggctttctgcacaagccaaaggctcaggtttgaatcctagtgcccacatataaagcaaggtgtggtcgcatgtacttgtaatttcagtgctagaaagtagagacaagtggattacctggagctcattggccaataggcttagcttaaatagcaaacatcaggtctcaaagagagattctgtctgtccaacaaaataagggggacagttcctaaaaaagacagctgagattaatctctagccctcacccctacacacacacacacacacacacacacacacacacgagcatatatacctttctactcacaacactccccacagacacaaacacaataaataaataaataaataaataaataaataaataaataaataaataaatgattgctgttttttgaataggtaaattatttgtttttattgcctaaggtaaatggagaaggatgaaaatggcatatgtgatttattagattggatgtttttatcaatttgtatgatttttaacaataaattttaaatacatacaaagaataacgatgaggcttttaaaatacttacaagtggtgttacagaaagaaaaataaaagtcggnnnnnnnnnnnnnnnnnnnntggttctctggccctttctcttgatttctacaaaaagagttccaagaaagagcttaggtgagcaaggccctacttctgcaaagaccccaactaggagcaagtgtgtcctctcttatatcatcaggcctctactgactccatgacaaaagtagacacaagcagttgattatgagaaatgaattatttcgtaggataatctttgaaactttttacaggtaattaaccatttccactctttgggtttccttcagtttgtattcaagacccaaatcctacaaagagagaacaatacatgaggaactggctaaaaatttgagtgatcttttgaagtccaatgactcaacgatagtcaagcatgttctagaggtaactctcttcataaaagtagatacatttgcaaacaatggatgcagaactctgatcaccagaagattataggactcgctgatgtccacacttcattttccttctaatttcttatataggtttcatatcacagtttcattatattaaattatcgagcaaatggggaggtctatagcaagagaacagagacgagtgggttacagccaagttaagtgctttgatctaaaagcaaaacgaattactgttgaaaaaaatctaccaacattcaactctatgagcctttggagtccatcctcattcaaaccaccacactcattagaagaaatgaatcttaggcatcgaatctgaattgaaaaaaaaagttagacttttctggtgaggtcacttgggaaccttctggctttgcagacccctaagtcaataatgcagaccacttaggatgtcgtgaaatctttgcgcttgaaaagagaaatctttatatttaggaaccgcagccatttaatgaaacaaaagcactgatttcccaatattttcagctatgactatgaaactatatgacaaaactggtcatgaagagctacagctggtgtaaaaattactgagctttaaattggaatcactgtagacggacatgcaggtctaagaagtcagaaagagagagagcccggaacactctttgtcccgtttgtctccaaggtcacttttatagaagagtgtcacacagttgcagcaaggatgtggccagtcgctttcccccaggtttccccagtttttctttctctgtgctgatttgtggccctgtatnnnnnnnnnnnnnnnnnnnnctaaaatggcaggtgatgacaagatgtgtggagaaaaaagagtcccttgtgcattcttagtgagaatgtaaattaataaatcccatgagtgagaacagtttggaggtgtctcaaaataaaagatgatagatagatagatagatagatagatagatagatagatagatagatgcagacagacagacagacatggatagatagtagatagataaatagatagatgatacatagatagataaatgatagatagatggatagatagatagatagatagatagatagatagatagatagatagatgacaaagagatgatatgtaggtaaatgatagataaagagatgataggtagataaatagatggatagatagatagatagatagatagatagatagatagatagatagatagatagatagatccccctattctataaataagaagaggtatgtttgtcatgtccttgaaaaggcacatggtcactgaagcgctattcaccagctagggctccaactactaaggaacaaaatgcatatagcaaggtgaaatactgtttgcccattaaatattagcatcatttgtggcatggtggatggaactggatctcactccagtgagttaaatgagccagaaataaggaaaacttgcacttgatctcacttatatgtgattctaaaccataggcacctagaagctgagaaagtacagttgtggttctgaaaggctcatgaagtatgtaagggaagtatggagaaagactggccaaaacggatccagtgtggttcattcagtagaagctagaaggcctggttactgttgcacagtagatactgggtaacataatgtacttcaaaagctagaagcaagggcattgaatgttctcatgatagaagagtaataagtatttaggacataaatatgtttagctgatttaaacatgcaacatatatataaatatatacatgtatgtatatgtatgtgtatacacacacacacacacacannnnnnnnnnnnnnnnnnnnatagatagatagatagatagatagatagatagatagatgacaagagcaggatgatatgtaggtaaatgatagataaagagatgataggtagatagataaatggatagatagatagatagatagatagatagatagatagatagatagatagatagatagatagatccccctattctataaataagaagaggtatgtttgtcatgtccttgaaaaggcacatggtcactgaagcgctattcaccagctagggctccaactactaaggaacaaaatgcatatagcaaggtgaaatactgtttgcccattaaatattagcatcatttgtggcatggtggatggaactggatctcactccagtgagttaaatgagccagaaataaggaaaacttgcacttgatctcacttatatgtgattctaaaccataggcacctagaagctgagaaagtacagttgtggttctgaaaggctcatgaagtatgtaagggaagtatggagaaagactggccaaaacggatccagtgtggttcattcagtagaagctagaaggcctggttactgttgcacagtagatactgggtagcataatgtacttcaaaagctagaagcaagggcattgaatgttctcatgatagaagagtaataagtatttaggacataaatatgtttagctgatttaaacatgcaacatatatataaatatatacatgtatgtatatgtatgtgtatacacacacacacacacaaggctttacatgctgcctcattctcatgaagaaattttatggtttttttttatgtattggttaaaaaagaaaagagaaatgttctgatttcagttgctttgggcatatatacttaagttgcatttctgaatgatgaagtagttatgtctttatttatctgaggaattcccattctggttttccatactggccacactaatatacaagttcacttgggcagtgtattgggttcctgctgcttcttcactttgtccttatcacgattatcatttgacatttggtagtggccactctgacaggcctgagctgacagctcactgggactatgagttgcactttcctgattataccgtgttactaaacacttccattcattctcttgttgagaactttaatgtcttccttagaaaactgcttattcaagttttttttttacctagnnnnnnnnnnnnnnnnnnnntaacataagctctgctatttgtaatacattcttaaaaaattaataaaccccaaagaggaaactggaaatgtgcttcacttatgtaacaagtgcttgttgtgccaggggatggcccagtcagtaaagggctttctgcacaagccaaaggctcaggtttgaatcctagtgcccacatataaagcaaggtgtggtcgcatgtacttgtaatttcagtgctagaaagtagagacaagtggattacctggagctcattggccagtaggcttagcttaaatagcaaacatcaggtctcaaagagagattctgtctgtccaacaaaataatggggacagttcctaaagaagacagctgagattaatctctagccctcacccctacacacacacacacacacacacacacacacacacacgagcatatatacctttctactcacaacactccccacagacacaaacacaataaataaataaataaataaataaataaataaataaatagatagatagatagatagataaatatataaataaataaataaatgattgctgttttttgaataggtaaattatttgtttttattgcctaaggtaaatggagaaggatgaaaatggcatatgtgatttattagattggatgtttttatcaatttgtatgattttaacaataaattttaaatacatacaaagaataatgatgaggcttttaaaatacttacaagtggtgttacagaaagaaaaataaaagtcggctccaatgttccattattaattctccacttagaacaaaccctgtaataacagccctcgtggtttgtatttctgcagtatgaaaggctgcatgcttgcagttgaaaattacatgactcaatttaactctaattgtagtgacgataattactaaagccaactcgtagagatgaaagagggtttttgaccttataggaaagacctatgtgaacccagagagctcaactgtctaaaattttcccacttcataaagacatccaaacattacataaaattgtattaagtatgttatacaatctctcttccaagctttattatgtctagagtcataaagatcttgatatttcttctctgttgtaaattctggaaccatagattagggctgactagaactcatgttagaaactacttcaggccagtatctattttcatccagttatttgcttatttgtcacaagtttttacatttttatttttgtaagtgtacaatgtatatgtgatagtgtgtaagtgtgtgcgtgtgcatgtgtaagtgtgtgcgtgtgcgtgtgtgtgtgtaggaaagaatgtgtttggtgagttctcgtgaagtccagagtcttcatctttttttcttgaggcagtctatcactgaacttggagctcaggattggctacactctttagccagtgagctccaagaatccacctgtctctgctcctactccctgtgatattgttgaagatgcaagccaccatgcccagccatcacagttactcatacttccaaagcagagaagttaccaactgagccattcccaagatattcattagcaccatagttctttacattttgacaatgtcatacatatgtacaatatattacaatcacattcacccctccccagtactctttgctatcccccttctcttccttctgaaccccttttttcttcccatctagtcccccataggccacaccactagacaaaattgcataccctcctccagcatccactagcagtcactagaattttagggacttaagtagggccttgtggacactctctctgcccatgattgaaagcttaagtatccaatcctgtataggtttctatagccactgtttgatcacaatagccatagtaatatcatatctggatggcagcattccatgctatttttcccaatcctccatgacttaaattctttccttcttctcttttgtgatgtttccttgcactagaaaggggccttgcaatagaagatgtctcttttaaggctgaacactcatagatttatattttaaaattcattctaaattaaaataaatggagctatccgactaaaagaattcttagaataatattcaccttaaaattaatatattgtatttaaagtttaatagttactccttgggaggcaaaaggaaggaattaatatgggggcataaaattattcatgttttactttgcacatgtctatgtggtttgagtatttgagattaacagcttttaatgaaaaaaagtataaatttaccagtcaggctagaagggaacatttagaaaaaacagaattatgaccttgaaacttgaaaggcttcgaatttttatgactactttcaagttttccaaagaactcttttgattagcttttctgagaactaaggtaagtctttcagtttgccgtcctggcttggaagctcacacaccatcttataggtgaaacactctttccttagcttcccagagctcaaagattccctgagtcttaccaaagcgaactagacaacttggtgatgggcctgtgtgaccacgtgatttggaaatgcaaggaagcccctgaggaaaccaaaagagcaaaccacagcgttgccagattccttaaggtacagttatgcaagagctctgttctgttccagtccccttgacagtggctgcaaggtatcctaaatgtcattagcacaatctctatttataatgaagtatcaaacagtgagatgaacactccacttttacacctcttctcttgaaacatgtttaatattcatttgagctcagaggctcactaaagaaaaatagataaaaattggataaaaatgtgcacctaagtgttgtcaaaccacggtgcttctgaataatttgaaacaggaagaggagatgttgagaggaatcacactgtggtgatgtcattctcctgaggtcattgctgtctatgtataaactttatgtggaggcaacagaaaatgtccaagatgacaacgtaaatggtaatggcgaaaagaatagctagacaatgagcacatctactgacaatagcaataacaacagatcacctagacctcagacacacacacaacgtttgtgaatgaaaaggtggcatcataaatgtccattatgcacacatacgttaaataacttaatagtgtttattggcacaaaagacaatgaaagctttgggggatgattgttaaaagtagtagagaaaaataaagggaactgctccctaataaaaatagcagggtctcttctctctgttcttcaaatgcatgcttccctcgatgaaatagaaaacagtcccctggggaaggaagccaataagaatgaagagagtactggcccattgtaccattttccatcccacccagaggtacagcagatggtctccacccaagctactctgggatcaatgtactaaaaacagtaataagatgtagccaagtaattaaaaagcaggcaactttgtatataaaagggaaagtctaaaatacctcattagaaaattccaagcaatattttaagcagtcattaggtgcaggtttggaacctcaagtagcaatcctatctacaacacttggattagttgctctaatcagatgggtgttctcacatgctttagagatttaaaaaataaataaatagaaacacatagcacacttagttgactattactctgattcagtatataatcgtctttcctaaagtcccacaagtaaaacgatttgactttgggattatatcttcctagcgctgctttacatttatggaccggggattcgtgtttaagatggtgaacaattacatcagcatgttctcttctggtgagtttaaggtaaggaccgagaatgggagtaatggttggtctaacccagcatggtaactaaggtaagctctgtgtgaatctgcctgaaacactgacctagcatccatttcatgagtcataaaagaaggtctctaccatctggtttggaacttttctttgctgacagacttcttataactattttaatctcattcctatggatattcaagttatttttattctcataatttaattttattagataacatatcattaataacattcatttattctagatgttcagggttatagttttaaatattccctaacagtcttctggacttcattgtagtttattacaatactccttttatctctaattttgttaatttggattttttttcctaattagtttggatagggtatgtcagtcatatttatctttccaaagaaccaactcttcagttgattctttatgttgttcttttagttcctatttcattaatttcttccctagaccttcattatttctggtaactactccttccttttgaggtttgcaaattcctctttatctgagaccgtaaattgtacattaagctattatttgagatctttctcatttttttcacagacgcactcatacctgcaaactccattgtaaacataaccttggctgtataaggtcctttaaatatttctttaaagactatccatttgcacacctatgatgcatgaagtgtgaataatctccatttaagtataattgcactaggcctatatattttctgaagatcaattagtatatcctcagtgaagaataattaatacgtgtgtgcaatttaattatatacttgctcaaatacaaaagaacacatcaaatactcttcttgtttgaaatggcagttttctacattattgaatgttgttgccagaaatagaattctaatctgaggtaaaaggatacttttatattttgtgaactaataatagtatatatagtagtgacaagtcaatttgctcttagagactattgtctctcatacatgagagtggatataaaaatgttatgacagtccatcattcctatgtaaattatgtttatcttagaccaagtctaaactcttatattcctgtccaaacacagacgttgtagaaaagacacacctttttgcagagacaggggagaaaggaactaaatggcagatgctaagaactagtggcctgtggagttgatgccacttcagataacatgtaccattatcttccttgatgctggacctcacctgtttatgatcacagtctattctgtgatttgagttggaatcttgagaggactccattaacataattgcagcaagacagaacatacaataagtgcattataatataagctaaaagcaggactcagggtttcctctcatagggatagaatgtgggttacagttgctctcttcctacaagttgtcttgacctgtgtgcaaagataaggagtgtgaccacaagaagcacactcccctaaacctaggaactgcttggtggtcatacaaaattaactattttttctttgtaatggtccaactgaagcacacacctttctttttcttttgcttgttttttttttttttttgaaacttcatgatgtacaaacaataaccatgctgtttgcttctgtttcagactttatgccagtataagtttgatttccttcaggaagtttgtcaacatgagcactttatccctttgtgtctccccataagatctgcaaacattccaggtaacaagtccgcacgtgttcctaggtccctgcgaggcatgtacttgttctgactctgtgctccagtttccttcaccattctgtttgaatggctatctaagcctagtcatccccagcagtgaatacataataaggggatcaggagagaaagaagatgagggggaaggagggagaggaggaaaatttcttttttttttttctaacttaataccaagttattcatggctagataagttagctaagatattcagggggtatcaaatatttctgtggtcaggttaattctaattagtcattctaagtcaacattgcagtaaaaatatttatatatatttatactaatatatattaattctgttcatgaaattgaggagcatacaaactaagttttcttgggaaatgatgatgtaataacaaattgaaatatatttaaaatttctcatataaattaaactaattaatagctgtatatatgtatctgagtatagacataactgaatttattctctgtttataccatatctagatcccttgacaccttcagaatcaatccgagagttacatgcctcaggtaagtaatgatatttcacattacctgcataagccctatagcaggagtatcgtgttaatgagcacagatgctacaaatgcctacgcagcatacaaccagcgcagtcacgtgcttgtctgaactttcctcatttgtcacgcataattcgataccttaactttaattcctttgtattttatccttcaggggttgccatcttaattttccaagtcatctgaaattttcctcatatgtacaacaatgtcccaagctatacacatgcgttccttacaatttggtctataaagcattgctattaactacagttttcatgctacatacttggcatcataacacattcatcccctcactgagtgtctgtgcctgggagaaaaatgcctcatgtctctcatctccccagtccctcaaagctacgtttctggtctacttccatgagcttagcttttgaacatccacagatgaaatcctgaatatctgtgttttgttttcacttcccacatttctctctactacatacaagaagcatatttcctgccccctttcatatctttgggataaaatcccaacaaacatggagttgcagatgtttatttaagatgttgagttttatatgaaatctaaaatggcaggtgatgacaagatgtgtggagaaaaaagagtccttgtgcattcttagtgagaatgtaaattaataaatccatgagtgagaacagtttggaggtgtctcaaaataaaagatgatagatagatagatagatagatagatagatagatagatagatagatagatagatagatgcagacagacaaacagacattgatagatagtagatagataaatagatagatgatacatagatagataaatgattgatagatagatggatagatagatagatagatagatagatagatagatagatagatggatgacaaagagatgatatgtaggtaaatgatagataaagagatgataggtagatagatagatggatagatagatagatagatagatagatagatagatagatagatagatagatagatccccctattctataaataagaagaggtatgtttgtcatgtccttgaaaaggcacatggtcactgaagcgctattcaccagctagggctccaactactaaggaacaaaatgcatatagcaaggtgaaatactgtttgcccattaaatattagcatcatttgtggcatggtggatggaactggatctcactccagtgagttaaatgagccagaaataaggaaaacttgcacttgatctcacttatatgtgattctaaaccataggcacctagaagctgagaaagtacagttgtggttctgaaaggctcatgaagtatgtaagggaagtatggagaaagactggccaaaacggatccagtgtggttcattcagtagaagctagaaggcctggttactgttgcacagtagatactgggtagcataatgtacttcaaaagctagaagcaagggcattgaatgttctcatgatagaagagtaataagtatttaggacataaatatgtttagctgatttaaacatgcaacatatatataaatatatacatgtatgtatatgtatgtgtatacacacacacacacacacacaaggctttacatgctgcctcattctcatgaagaaattttatggttttttttttatgtattggttaaaaaagaaaagagaaatgttctgatttcagttgctttgggcatatatccttaagttgcatttctgaatgatgaagtagttatgtctttatttatctgaggaattcccattctggttttccatactggccacactaatatacaagttcacttgggcagtgtattgggttcctgctgcttcttcactttgtccttatcacgattatcatttgacatttggtagtggccactctgacaggcctgagctgacagctcactgggactatgagttgcactttcctgattatccgtgttactaaacacttccattcattctcttgttgggaactttaatgtcttccttagaaaactgcttattcaagttttttttacctagttttgaatctcattatttgcatttagagtattattttgtcttgccattagcctgtatagatgatttatgctttatcatttttaagatggattttttaagtgttatgaaagtttgaatgcacatatatatgtacaccacctggttgtctggggtttgcagaggctaaaagacagcactggatcccctggaactagaattataggtgtttgtgagccactgtgtatgctgaaaactgtgcccagactgtctacagttggagcaagtgcttttaactactgaggcatctctgcagatccactgtcttttaaatacaacaagcccctagaggatagatggtttgcacatacttgctcacagcccttaagttgactcctcctccccttccttctctccccctccccctccttctcttcttctcccccttgttttcctttaatgtctagaaacattttctaatttcaatgtacttttcagttgtatattttggcttttgtcaccaggacttgcggggtcatactcataacagcattaagcattccaacatgaggaagtttccccagtgttatcttgggtgctagccccctgctatggggaaattacactggggagcaactccaagttagtctaatcattacaaaataattaacataatagtttgggctcagattttccagtcccaatggcttttccctctccctgttcagtcaccttcttcaaccaactagtcctgatgttcctgcagctgccagttcctatgaccccagcccaaacatggtctcttttgttccctctgcatcgagttgcatctctcacttcacatacccctatatctaactcacctaaatcccaacactatattaataagtcaataaatcacaagttaatgaggccattgatctcaaaactcttagtgtcagccaagcagtgggggtgcacttttaatcccagtacttagaaggcactgatagacaggcctatatgagttcaaggccagcctggtctacagagtaagttccaggacagccaaggctacagaaagactctgtcttgaataaaacaaaacaaaagcaaaaacactgttgaagaccagctctgaacagtatgctcagtaatccaagaaggagatatgcagttggtgaggatgtaaaacaggcacactctcacacacacttggtggataaaccaggctccaatgagcaagctccaactactttacatacatatatatacatacacatatacatatacatacacacacacacacacatatatatatgtatatatatacatatatatatatgtatatatatatatacatatacacacacacacacacacacatttgatggatggatggagcaaagttccaacaatttcacacagatagatagatagatagatagatagatagatagatagatagatagacagacagacacaatcacatttgatttattgagcaaagctctaaccactttacatatatacatatacacacattttggtggatgaactaaactccaacaagctggctccaaccattttatacatatacatgcacatatatacatttggtagacaagcaaactcccaggagttgacccaacaagtgtatttttttcacccatagcttatatgtccctgcaaaacctttcaaacaatataaagttacaatgtgattacattctatttttcttctagtgaacaattatggaaaaacagcatgttccctaataccttcccatgaaaaaacattacattgtacaggtaaaaaaaaaaaattattcccaagaacccacatacattcgtaactaagcaacttgttataaattaacaaattgtgagggagcaaggtaattttctcagctagtttttcttactggcaggcagcattttgaggttataaagaaaggatcagttattttattatttatcttaaaaagtaatcttagaaaaatcttaaaggaatgacaaatctaaagctttctataaaatacaatctacttcaaatcctcagggtgcacatctagtcattgaacaatttttgtattaaatcagatcagaaagctgagagcaaataatgagaaaaagaagttaatcaccaccttgatcttgcttcagcaagagaggcagccagtgctggtcaggctgccattgttcttgttccctgacctcaacaaactccctagctcaaccaggaagagtgtgctgtgcctctctggagctcaaaactgttccctaagattttctacaacagagccactatcagaaacatcttaacctaacttcaacaacaatctatttttccaaatgctttctaagggtggtcattgctggcaatctacattcctagattctttccaaggacggggattggatcattaatctgctccagtagcaatgcctgagagagatcaagcattatcattgtgagtgccagtgatgcatcccagtgaggggctagaagccccctagaattttcctacaacccatatattagggagaatgtaaaggccacaaggataacaagcagagtgacacaacagcaggaagccctcagatgcagagtcctcaaggctctgcctctccaaggcatacccatcctgattgtgctaatcatgtgggcctgcattccttgacttctaaagcccattgttgttccttccccacaagcctcaacaaaacaaaaaacaaaaaaaaaaaaaacaaataaacaaaataaaaacaaacaaacaaacgagaatcccttcttgtcttagccactcctagagaacttgaatgaggaggacctaagtgctggatacagaatttgttcttaggtttctccaccatctacacacacatacacacacacacacacacaatatctcaagcctggattcctaggccttctcttttgaccactgtactcactaatccctcacacatgtctgcttccacatacctgtctgtgtttcagaactctgtgccattgaaagtaagccttccctctctcccaatatcctccccaacctccatttactcccgtaataagcccgaactgtccagcatcctccaaggtctaactcaatgtagcccttttttcctagaacctttctcaatcccaacagacacaaaatacgtctacattttagcccctgcaatgatgtgggccggccattcgataggccgtgactgttaactgtgctgtgttagtatctatgcttgtgtttacatcaacaaacatgttcccatcccaaggtcacagcaggccacatctctgtagcaaggctatcttgtagaatccctcctacttgagggcagaggttttaggaactgtttgatctgcctttttgtaatctaaagtggctattcagttttcaataacatattctcttcctctcaaagatatgcctgagtactcagtcacaaatgaattttgccgcaaacacttcttaattggaattcttctccgagaagttggctttgccctgcaggaggaccaagacatcaggcacttagctttagctgtcctaaaaaatctaatggctaagcattctttcgatgatcgatacagggaacctgtaagtcgcctttctttctctctcccccaaacaccgtttaatggcccactgcattaaatgaatatgaaacccctgagcctattgattttcacgtgaatcatttctcttgtctgccttcacctagaggaagcaggcacagatagcgagtctgtacatgccgctctatggtatgctcctggacaatatgccaagaatctacctgaaggacctgtatcctttcaccgtgaacacatccaatcaggtacctttgcgcagttctccaagtttccatttccttaagtaattcctcttatttatatatttatgggttgtataaccatttcttcctccttgtaagcaagctagggttaaacaatttccaacaaacgctcgatcaatacagcttgtcctcacagcttccccccttgcccgtccctctctttggaactgttttcattcttttttattctctgaagcactcttcacatctgcacagcttctgcagattgtatgatattcccatggccttagcttcaatgttcattcttcgccaactgctccccatttttccccatggaaattaagtgtttcatatggtcaaaagcccagtgtggcccgttgtgacaattgtccacgcagccagtatggtggcagtatagaaaactattcaagggactcagagatggtttagttggtaaagtgtttgcaagcatgaggacttgactttgatccccagcacctctgtaaaaggctgtgtgtgtgacatgaatctattatctcaacacggagaaggtagacagagaattccctagggctcactggccaggcaaactctaccatgctccaggtttgttgagagaccttgctcacaaaagtcaggtaggaagtgatggaagaagacacctgacattgacctctgacctccacgtccatgtgctcctgtatacacacatacatgaatatgtcaatacatacataaaaaataaactcatgagagagggcgaacacactctgaatacactgaccgtccaagatagaaccttcaaaaggttaggatcatgccttcagatgatcaaatcccatcagcaccatgtaacatatacataccatttagagagttattcaagttatctaggcctgttttcatatttgtagactgagataaaatgcctaacacagagtaaagtgccttaatattaaattgtctaacagaaaacacttgccaagatgctcagaacatacagatttgaaatctagtcccttactgatggttatatgtatatgtatatatatgtacacatacataatgatgataattaaatctatagtttaataattgctatatcggtattattccagcccatatctaaaagattgactctcatgcattttaaaaattcccagaagaaggagcagaaagaatttaaaagccaaacattgaggagaaaagctatgtaatgctgtcatatgacatggcttttaactcaggaacgcacaacagctatgattgcctgcactgggccctgcataagattgagccagtaaacattcagtcatagatgtgggaaggaggatcatgggatgccgcctacactggggagctaagggctgtggagggaggctggagaaaagggatgctttgtctccaaggatgcagccatttctgagttcctcatgctccagtggataacccatgcctactcaaccagactctgtgaaatccaatgagtcacagacagaaacaaaggcgaaagacataataatgtgaggaggacttagtgggaggaaggaaattgtaaaagaataaaaactttaacactttgcataaaaaaataaatcaaactgtgaacataactatgctcttcacaatattcattttcattgccaactttagtggaacatctttgctaggatataaaatatccaacagcatgactgattaggaaggatgtaaaaggcacaatggtccaccatgccgaagcccactaactctcattcctctcctctccactccaaatgcagggatctagagatgacctcagcactaatggaggatttcagactcagacgtccatgaaacatgcaacttctgtggatacatcattttccaaagatgttttaaattccatagcaggtactcgggacctgctgagaacactcatgtttaccactcaccagtgtttacattgtatatcatgatgtttcctatccataattcatatgcataatatacctggcaaagtacaccatgctgtataactagtccttaatgtactcctttgaatgtcatccagtaacgtccacttctgcttagcttaaagggctgtctgctcagatattatcaaattactttattcttctgtcttttgctttttgttatgcacagcttttttaaaaatataatagctcttcagcttcaaggattatattaagaaccattttcaaaatgtcatttctatttcgcataaactgtcaagttaaacactccttcctccaaaccatcttctattaaaataagagttatctttgtctatatttttttttcattttaagagatccaaagaacaaattttaaatgcacttaaaacagtttcgatgtttctagacccatcatgaccaccattgcaatgcgttaaatgttgcatcgcttccaagtcaatcccagattctatttcccaatcctgtacccacctcagcaatgagcaaacctgtttccccatgtttgcccttgttcgtgctcatacatctcatcactgtatgtgtgctgtggcttctgtttgcagcattttcatcaatagctatttctacagtgaaccatgcagattccagagcgtccttagcgagcctcgactccaacccaagtaccacagagaagagcagtgagaagacagacaactgtgaaaaggtgcagctaccctctgtgccacacgtgtcaaacactgcaactacaatccagggcgccctcagtctttttcttatccctgttggtcctttgattcccagatcccaaggcccttgtctttgattgggtcaacgcttcggtttgacaaattagatcaagcagaaaccaggagtcttcttatgtgttttcttcacattatgaagaccatttcagatggtaagtggaatgtcttcaagtcagtttaaaagaagaaaaagaaagaaacctacatttccaagagcctcatgccatattgtgttcctttctagagactctgattgcctactggcagagagcacccagtccagaggtgtcagacttcttcagcatcttggagtaagtttagggttgatccaataacttattttgtggaactttcaaaatagctcactatgccactcttcattcaaagaagccctatggtaaataaatatcaacaatagtatatggaatatgcaaagaaaatttgctatttttctttccatatatttagatgaattgttatgttatatgtataaattaaggaatgtaaataataagcatgccttttttcccctttctagcgtttgtcttcagaattttagatacctagggaaacgcaatataataaggtaattgttttaaattctagtagactaatatagtctttttatataaaaaaaaaaactatagaagctttgaatatggctcggttagtgaagtacttgccatgcaagaatgaagaccagggtttggtgcccagaccctacataaagacagacacaggaaggggtagatagatagatagatagatagatagatagatagatagatagatagatagatagatgaattagagagatatagtagatactggtgatagatatagatagattagatagatataatagctgctggtgatagatacatagatacatggatagatatatagatagataaatttttatgggtgaaacatctgtttaagaacatactttcagtaaggtaaaaacaaaaattaatctacaactacttcatgctggcaccattcatcacaaatacaagaatatccaaagccctctaatttcctattctcagaagaaactgaaatgttaattttattttgagtttgcttatatatgtggtgttgggctgtgtgtgtttgaatgcaaccagagtttgacatcaggtgtcttcctcaaactctctttaccaaaaatactgagccaccatctcttcatctggagccagagtttaccaatatggttattctagctagccatcttgcccgctggatccctgattctgcatcttgagactgggattacagatgagcctccacgtacatagatgctgaagttcagaaggcagggcctcaggctttccttcatagcaagtacttcaccacgtgagccagccccttacttttcattaattcacagaatatgaaatgtctcattgttcagtaattgcttgtcacttgtcattctgtttttatatataaactgtaaatgtggagctgtgctgtgctttcaacttgtgttctttgtaggaaaatcgctgcagcgtttaagtttgtgcagtcaacccagaacaatgggactctgaagggatccaatccttcctgccagacatcaggtctcttgtcacaatggtaatatctccttggctcggtatttaaaatcacacgtatgtcgtttatatgtgaacatgcatgtgtgtgggtggagacactcatatatgtacatgtggttttaagcagttaatatgtttatctgaagaaaattcttagctgcttctccagctccctcatgggcttaaaaacagaaatgaaggactggtggtttgcttatgttcagttaaagcaaacaccttgaatggatgaggattaataggcctttctatttagctaaaaacctaatggtgcctaatgccaataaaatgtccccttagttcttagcagtacaggaaaaaggcactctggaatcatgactccagttctgatgagtgattaaaagattttctttttttattattattattatgtattttcctcaattacatttccaatgctacccaaaaagtcccccacaccctcctcccccactcccctacccacccattcccattttttttttttggccctggcgttcccctgaactggggcatataaagtttgtgtgtccaatgggcccctctttccagtgatggccgaataggccatcttttgatacatatgcagctagagtcaagagctctggggtactggttagttcataatgttgttccaccaatagggttgcagttccctttagctccttgggtactttctctagctcctccattgggggccctgtgatccatccaatagctgactgtaagcatccacttctgtgtttgctagaccctggcctagtctcactagtgattaaaagattttcttagtgttcttgaaactcatggtttttaaaggaacagaggccatgaggaagccggagaatcctcacgagtcaccttagattatctagttgctagctgatctccaattttgcagaccttgctcactccctcctatacctgcccagtcagaatcacttgccctgaaattccagctccaagatcctcttggtctaacaattaaaaattgtctccccaaactttcctgagtttgatttattcttctcaggttctcataagaatatgtaatgtgggtattttagagaggagcattaggaagaaataggaaactgtatatcatcaataaataacaaaataaatattgctgccatccatggggacctatagaagtgggcttctagtgagagaataattttaaaagatgtaatcatgggtttgctttgcaaactataatacaaaagaacacaataaagaattgcttcacagttgcagagatggctcagcagttaagagcactgactgctcttccagaagtcctgagttcaattcacagcaaccacatggtggctcacaaagcatctgtaatgggatctgatgccctcttctggtctctctgcagacagtgacaatgtactcacataaaataaaataataaagtaaatctttaaaaaaaaataattacttcacatgtttcatagcaattgtaacacacctaagctcaccacagtctgccatctgtgatggacaagtcttaagtgtcctccttgtagactggacagatcctgctggctcctggaaaccagggcttttccctcactttcagactgcaatgggcaacctgggagagaaattcgatccccaacgtcccagccatacatcccagaactcattactctagatgcaggcaccgtccaggcttcataggttgcagaaagccaaagctggctctccccagattcagcccagacaggttctttcaactatctgaatgaatactggtttggtagggcactgctggatagagtcagccataattctcatctccgttccaggatgcacacgacttctggccacgagggacataagcagcacaggtctcagactttacctataatccgaggcaaaaatgcactttccaaccccaaacttttacagatgttggacaacagcatgaacagtaagtgaaccagaagcaattctctcagcatgtatataagacaggaagtgcattgtgtgtgagacagaggaatgttgtcatgccagggaaaccactgttctgaaggccactgccataggcctgcaagtatttcttcaaagaaagaatcaccagagtgtagctatgcagaaaaattaaaaacgccatcaacagggaagaaaacagaaaaatgaaagtcagtgcaatggcctcagggtagctcgtctaggtagtgttggcactgtgaggttcctaaggttctctcttaaccaggtaattactgttgactctaggggaagaggatgcaaatctccatctcccacacgcagtaaccatgacatcatgactccagagatacattacatccagcttggcaataagataaaaaatagaagctgctgttgtgaagtgtggaaattatgagcatgtgacccatgattacttgtttaaatctacattgccttaatctctaaatacacaatgtggctttctgaggaggctgtttgtgtagactgtccactgagaccatacatttagtctgttggcccagaagcaagatctttaaacaggcggatagcagaagaagtgtgatccggctgatgtctggattaaagaaaaaggattttaaaaataatagaaaccccggcagctgatacatgcaaggggcacacatgtctaagatgatctagtgttgttgttctttaaattgaggcaataaatgaaattgatcaaataaagacactttgattttataaattattcatcaaaatgccagtaaacactgtaatagaaggaaatgttttactggacatagaggattgtcttacatgcttacacactgttctattttgtgttttgtaggcaattccaatgaaatagacattgtccaccatgttgacacagaggccaacatagccaccgaggtctgcctcactattctggacctgctgtctctctttacccaggtccaccaggtgaatatgatcatgttttctgcaaaaatgatgattcgggtggaggggaaaagccatgagaagtcacgaacactttttaaaagacaagttatgaaatcaattaatctgaggtaaatccacttccacagcgtagggaagcattttaaatgagattctccaattttgccagagcttgactaacggtggcttagggcactcactcaggtgtgtcactactgccaatattatctttcttcccctttcctcttcctgtgctgccaggcatctacaaggagtgagaacaagactccatatttttaacagaaaaacaacagacaagcaatgctatgctttaactgatgactatattaaaaaaaaaaatactaatgccaagcatcttttcttatttgttatatatacaacattggtgaggtgttatcatgatgtatttaataaaatttctaatgctaacaagactatccatacctcgttttgacaaatatttagagaagtggtaattctcattcccagaaagtccaagtgggaactccaagtgggaaaagacaagttggaaaacactgtgtaatttctttaaaaattaattatggagctggagagataacttagtggttgagtattgagttcagctcccagcacccacactggaacactcacagctgcatgtaataccagttgcaggcaatctcatgccatcatctatcctatatgcatacatcttcatacacatggcacacacacacatgcatgcacacatacatatacataaatcaaaacaaaaataaatatcttaaatgctaagtatatacctgttaggtggccaaccatttgatagtagcacctgactgaggaaaaataaaagcccctcccatatgaggctttgcatacaagtatgtataacatatttattttaaataacaaaaaccactagaaacaacccagagcacatatcaacaggtgaatatgtaggttagaccatacatgaagctttagtagacaaaccaggaaagactgctttgtcattccacttagaaaatgccatttattagaagcaacaaatcagtgactgattagaggtatagagataagacaagaatacaggattgcaaaactgtatatgaaaacattaggaagtggtggatgttctattttcttgactgtgatggttccgtgggtatataccaaaggcaaatgtgggcaattgcactttctgaatgtatacagtttctcccaccaattgcattttaataatgctcctaaaaacatttacagctcaacaaatgaacctgctttaagggctgtaccaggagaggttggatcttttagagaaaacctcttgctccagcagcattgtaccaagagacccttgctttcaagtaaagtgccaacgtggtaggagacaaacacaacccaattttgattctttatgtactgatgggcgtgtgccttgaaaagcacacagttgaaaagcttccccattgcctatctgccacctcatcctctctccccatgacccaacccactagccacacatcagccaccctgttccttctcagccttgaactcacaagcttctctccaacccaaggctcttactccatggtaatcctcccaggtctctatgagacacattccttcagctccattcgtccactggatggatctctgttgaccctctaaagcacggttatccacacccacaaccccttttctggaacatcttcctactctagttactgccttatctgggttagatttggtttggttttgacactgctgtataaacttccctgagagcgtaggaaaaatcatctcttctcactcagcatttgcttctgtcactcaggattgtgttcaacacacgtaggttcataagaaatgtttctgaagggaatcaactgctcctctacttatcctaaataacagctattctgaatttcagagacagctccaacaatccgactgtcaaaattcactcatgaaaagggtcttcgatacttacatgctgtttttccaagtcaaccagtcagcctcagccctgaaacacgtgtttgcttctttaagactgtttgtgtgcaaggtaaggacgctccaggtcctagggaaagctcagctcaaggtgacaataaacactaaataatctttgcatctctcagtgtgcagggtaggcttgtttcatgctattttggtttcactagataccagtccattgctgatgtagtggtgaattaattaaactgctttgactcccagtgggtcaagtgcacactgcacccacccaagagctctctggattcatgaatgaaagacacacacacacacacacacacacacacacacacacacactagctaattttgatatgccttgactagctcaatggatagacttctaaacctccccacagctagcacaaacttcctggattaacatcttctatatctatattttatctttgctgccctgttatcttctgggcaggcccccattgggcagcattccctttccacctacaatgtaggatgctttctctcctgaagactgattattctccctgagtcatggagatcctctccctctccttccctctctctcagtccattgtcctcgcaatctaaaagtcctgccccatttccttgcccagccattggctggatgacaattctttattataaatctaaggcagctggggccagggaccctcaagtctagaagcatggcttttgggagccaaaataagacaattagaaccaattcccagcagctgtctcaaaatgagtggaaatcaaatgtggtggtactatttggtgaccaattatgtggttgctcagagttttgggcatagaaagtttagataaaggaaggaaggaaggggagggagggnnnnnnnnnnnnnnnnnnnnnnnnnnnnnnnnnnnnnnnnnnnnggagggaggaagggaggaagggaggaagggagggagggaggaaaaagagaaaaaggaaagaaggaaagaaaacaaaatatcaagttaagggttccaaaccaagtaactagagtaaccatctttgaaaatgactataaacagcatctaatatatcagtgtcaaatgaataatgggacatttcaaagacatcatgcattttggggttgctgtcggttattaacacatgaaatagtgatgcaagagaataattaatacaagagaagagcttactaaacttggacttcaatgttagaagcatccctccatctgctgcaaatggagagagcatattttgggatagcattttagtctacaggtttgaaacatgaatgaacatggctcactccctcattcttccattcctccagtttccgtcagcatttttccaagggcctgctgacctctgtggctcattctgctatgaagtcctcaaatgctgtaaccacaggtcaaggttgactcagatggaagcttcagcacttctatacttcttcatgaggaagaactttgagtttaacaagcagaagtcaattgtccggtctcacttacaagtaagtcctaccagttttcattaatgttgttattaaaataactgctgtgcttgggcagagagcgaagcatcctgttcccaggcaacctgtcaactgagcttctcaatgccactctcccagcacacttggtcctggtggatataagaggagagctggagagaaattaatggattgcagtttatgttgccacttgaccttgtgtttcttctgttcacgcactagaatctcatggaataaacaactctaagagtcacagttagtctaggaggccaaatcaacccaaaaagacaaccatgcctttcttcaaggcatcccaagatgataagattcttgcatctttccctgggtatttacagttataataatggtatttattgaactttctaagaaaatgtatagagtatttgtctagcccagtcaatgtccttaaaaatacagattttagattagagaggtgactccgtctgtggagtgtgtgcctagcaagcctgggacatgagttcaagctgtaaaatctatgttaaaagccaggtagcagtggtatatgcttgtgatctcagcactgaggtctcagagacaggaagatcccatgggctcactggccatctagtctagcctaccttagtgagctctagatcatgagagagcctatctcaatgacaaaacggatgatatctgaagataagcattcaaagttgacctccacactccacatgcccatctgttcctgaacaggcatggcctcatctttctacatgcatccaaaaaacaaaaaatgcaaattcattttgctttagaatggtggctctcaacctgtgggttgtaacccctttgagtcacatatcagatatccttcatatcagatatttacattacaattcgtaacagttacaaaatcacagttataaagtaacaatgaaaataattctatggttgggggtcaccacaacatgagaaactgtagtaaagggtcatagcattaggaaggttgaaaaccacaggtttagaaggttctttttttttttttcttccagctcatcaaagcagtgagccagttaatagctgatgcggggatcggagggtctcgctttcaacactcccttgcaatcacgaacaactttgccaatggagataaacagatgaaagtaagagatgcttcatgggctttttttctgaagaatcagaaataaagtgaagtggggttttatttgacatatcaaaaccacgaggtatttatgaattctgtatgtagtttatcaagatttggtcattcatattctttgcatatttaaattggatttgttaggtctcacactttcagtacatgatgttttagttgggacttccataatctttgattgttatataacaaaatttaccaggtgtaccatcatttattcataatcatcataagcaaacttatatttccctctacttattattttagtgcctttggaagactaaaagtagaaaaggcttcaatcataccttgatctagagatcaagagagcactttgaagtcctcccctcccctcattgctttattgcatcagttaattgcttcattatatatagatgtctctggatccacctctgaaagtataaggacactggtgtaagaggagaaaggcccttcttcaaacactaccagttcaagtcaaatgggatgtccttgatctccatatttatcaagaatatgattcggcagtccagggccaatgccatcaataggaataacatcaaaacttgtttaaatggcatagactagagtcagagagaactgaatttcaaaggcattcaggaaaatatcagtaggaagttggactataagacagtaaagttgaccatgcttcttattaccaaatgtttgaatataatcacaattataatatacagaatgcagacatttatgagcacgatataaaacataaaagcatgtggtaccaagcactaactaagagtataggttgaagttaacaaaggaatgctgaacagatagtgacccaggctctctcttttccaaagaacagcaatttcccagcagaggtgaaagatctgactaaacgaataaggactgttttgatggccacagcccagatgaaggagcatgagaaggacccagagatgctggtggaccttcaatacagcctagcaaactcctatgcaagtacccccgagttacggaggacctggctggaaagcatggccaagattcatgcaagaaatggagacctgtctgaggtgatgagcaaaggctcactcattcttcatcaacattgtcttccttatctaaataattggcttttagtgtacaccatgtagtataaaatgtatcatattttccaccgatgtaaaaatatacatctatatatcaagtacagttactttatatgtagggctcagtgacatctggttctaagtagaggacatcagactgtggccagatatagaggtggcaacatcagttgtttgcaatgcagtgcacgaatagatgtttaaaacttgaatctaaagacactgctgttaaaagtattcaaaagttagcaatttatatcagagttaatattctgtgttttcaaatttgttccctgaaattgaagtgaaacagggaagcttgctgctttggtaagcttatcaaacttcacctgaatcatccatggagaagaaagttccctgtgtggggattgtaaatcaatacttgacttttctgtggcagttgtaatgctggatagatttatgcacagtgtgatgtggcgatttatagcatccaggggcatctgagttaccactagggaagttctgccttttctaagaactatagccctgtaggaataggagatactaggctaagcctaaagcctgaaactttatctaggataatgctaaaagataagcatttggtaatcagggactctagaacagaaaccagaactctggcttggctacagtttggtgaagatttccagttccctttaacttatctgaaatagcaaatccactcatgaaacttttaagaagaactctgaaggcctgagacgttcgtaaattcaagagtacacagcaatgatcaaaacatatagaagagaaatgaaacatcacccatgtaatcagctggaagggaacctgcctgttacattaacgtgcatactattaccaagggctaaatgatggggcaactattctaaaggcaagagaaattaaagaggagccagcattagaaggcagatgttttctatttccttttttttctccagatactagaatctatatatttgagaataaaagagatacatagcttttaaatagcaataaattatgattagataataaaggagggaatgttattttgtgagaaagttgtttaagatagctcattcatcccatttcatgtatatatcaagaaaaaaaacaaaaatatctccaaatatttattttattcttgatgatagactttgaaaaagtccaatagattgacattttcactcctttcaaaatgaagagttagtctacatgacagattctgagagagcacactgactctccttgggaaaccatggattttatgaaaagttaaatccatccttgaaatctctgttttctgttttgttataggctgcgatgtgttacatccatatagctgcacttattgcagaatacctgaagcgcaagggtaagagggccttgtaaaggggctaagagcctggagatcatcatactggaacctaaccacataaatgcattaaacttatgatttattaaatagctttcacttttatagacatttattattatgctgtactttaatatttttaattctatgatgtcaccaacatattcatttgatgtgcagtgaagctaactgtatagtcaacttcttggttcaaaatgatgattttgatgtctcattgattaacgacttgtggttccataaacctgtattaacaagaacatgcagccacgccctaacctcatcttgcactaccataggttactggaaaatggaaaagatttgcacaccacccctgcttccagaagacacccaaccctgtgatagcaacttattactaacaactccaggcggaggaagtgagtggatctaactgtgctcatttgcctttgatgctgaggaaatcaactttacagcttcaggaaacttccacaaatgtgttcatagaagcaaaaggcatgacctgaaatcaggtcaacagaatttactgtataaaaagcttacgctcagcccactcagaaaccacatcctaaacttaacaagtttagctttcttctcagttctcagcaaatagaatattatctagtcttcaggattatgaattatggtcatgcctatctgcagaaatcttacctggaaagtgataagaatatagacaatatacatttagatagatgtatatatatatatcctttatgattggcatattttacttcttaaagactatgtattttaataatagagtaatttcctagcaactgtaagccttggtgtttggtttccagcattgcaaaattaacaacaacaaaaacaattaataataataataataatttactctaacaatttataatatatgattgatgatatttatttactttcattaaaaatattccaccttaaagttctaaaaatcacattttctaagaactatactttgtgtaaaaatgtgactgtaccatccatacattttatctaaaaatctctttaaaagttctttcaagtccaaagcttctgaacaatcttctagataacattatttcaacttgcagattgctgttgaagactcagtgtagagttcgaataaaaatacccaaacaaaataaaaatggactttgattttcaatacctcagaagcacaattccattcctattcatttaaacctgaggacgttttcaaaaaggccacagtgaattttccaaataatgcattagaagcaaaccagctaaatgaggtagtgaggtctcttgcttgtggccctcggaaaagacagatctacaccacaggagcagatccaccttcaaacccttcttactttcatgtgtcaagcacacaccagtttttatatgcaagtcatcagacatcactttatttaacatgccctttcggctcaaccattgatcatctttaggtcctgtaaagcaacataaagactttcacattttatctaaaaccaaactgaagaaaactgataaaactcaagtgtcagttcacgccccagttacttcagtgactcttaaatactcaagcattttaaacagtctgtgctatgtggaaggtaatactggcgatactattccataactactgaaaagggatacacttatgagtgaacattgaaatgggaaggcaaaccctcatgcttcatgaacatatattgatatttattagcacacatctgaatctcattgatatttctgaaatctctaatattttatacaatgaagtttcagagctagcaaaataaatgaactcttccttacaatgtacatctgataaaaaaaaatatagcagtaatcataggcaataccagaaactatgatctacccatcatgtgcctttcatgtgttatgatactgccaagactaacctcatgaagcaagccatgttctaatcccaatacaaattgcctaaggtaatatttcattgtccttgatcccctcccaaggcatgttctctatgggatggccagcctttctgagcatcaccccaaacattaaagaagaaggagcaatgaaagaggattctggaatgcaagacaccccgtacaatgaggttagatgcaagtgatccactgccgttggtgaggtttaaaagtgcagtgaattgtgattcttatgtgcattcaaaagtcggataatgtagttctgcattatgactttaataaacaaagtaatgctgaggctcaagtaagatggtgattaataaacatcaagttccatggatagagcacagtcttcattgaaattttaagctgggcctgatttattctcctctgatgaactcatatgtaaatagtgagctcttccacgcaatctctgtgctctggtaaaatgtagtaaggatgctatggtttttatgaacttgacacagcagtttcttacacaagtttatttatttacaaatttggctcagaaaaaggggctcacattttctgtggggaagctttctgatatgtaagctggtcagttctcatgaaaaagcagttttctagcaggaatcacatattagcaattctggtaaataaaacagtttcccttcaccaggaaacacagtattccagaagctatttttttaagtcttaatagagatgtggaaaaagatgaatttttatgaactttagctttatgcatactgcatacgactatggttaatttaaaaagatactgtcagaaatgttcaaacaatattataaacttactttagagatcatatgatttcacatagttggacatattaattaatctaccaccactctgaaagacatgtattaagggcaagggaaaaaaaattaatcaggcacaatccctgcttttgaagaattcagaattttgaaaataaaatctttcttcaatgtgaaaagtagctcattccaaatacatatccaataactataaagtaaggcattgtattcttgtaatgagaagatgacagttttctacatgaaagtggttgtgatggaggtgactgggcatcagtaaaagctttcgagatttgattccaaatgttgatattagatagaataaggtattgtagcttgcttttgctactctgtgcgttcttcttcttccactctttcaaccccctaacactagctaagagagaacagaaatacacagaggaaaggaaagaaacccttgaataaagtcagtggttggaaagaaggcaatgttatcattagaccacgtcccactgattagggtgtcaagttccttggggcaagtttgctctttgccatcaggatatctaattccttctcgttgttgtttcttctctgtgcatgacaacctaacaaactgtgacaaccaaccaacaacccaccctgtctctcggggtgctagaatttatataccctctaaaaagtacccagaattacaaatgtcatacaatcacagaaactatctgagctggcaaaatcacaccccagccaaagcacaaggcaaatcatagtcaactgctatggacaatctgaagcagcccccatgtcccatacctgggattaaaaaaaaaatttaatagtattgctgtgtttttgaattccaaaattcttacttcaaggtgtcacacaggaaaggaacattctagtgtgtacagcagcaccatgggcaatggtgtagaagatggaagcactctaagaatggggacaagaggtagaaagctggagccagagtccaataaaccacaagggcagagtgttaaaaagggattgtgaaccaccttgagtgtcagtctggagagaaaaggtagtgttatataaactagacttccacaaaggttcgtgggcatggagattacatgagtggatttatgttttaaaaggaaatgtcactttagagcagacattggagagaaatgcctgtttgctagaaagctactccaggtctaggagtggagagcaggggtaggagctaagcatcacagacaatagcagtggaaagtactgaaaaggtctgagctagtatgcctgctttatgggttaggggatgatgagaagaagtgggggtacccaacatggcactgtgatcccatggtgggctataaatgtcagtaataaagatcaggagtcaaaaaaatcacactgtgaaaagacaaaagatagtttcagaacctagtttcagaaatgagccacatctttaaacatatatttttttaaaacatccttttctctgggaccttgcagaacatcctggtggaacagctgtatatgtgtgtggagttcctttggaagtctgaacgatacgaactcatcgctgatgtcaataagcccatcatcgctgtctttgaaaagcaacgagacttcaaagtatgtgatctaaactccaaaaacccacaaaccttttttttactttaagttgacaaatggcatacagcattgaaacataacgaccatctcccttgcgtgtcagcatttctctcacaaagccctctggtttttggtttcagaaattatcagatctctattatgacatccaccggtcctatctgaaagtggcagaggtggtgaattcggagaagcgattgtttggtcgttactatagagtggcgttttatgggcaggtaagtttgttagaagtaacgtgacctgaccgctccattcacgttgtcatcttccattctttataggacatttgatgacaagcaccagtagacttgggggtgggattagtctgaacctatatgggtgttttaatggatgtcaccatttatcagtttgcccataggattgaaagcacacataggtagagaaatccatgaaacttattacaagttaagtgaaaaaagagtgagctctaacttttggaagtagaagaggctttttaaaattattttctgctttgcattttatccgaatatacctaacaggtttatatgatagattaaagtgaaattgaatcagacatgctttaagaaatagcatctacaacactttagattgaccactatttccaaccattgactttacaatcttgttagttgtatctcctgtttgtttcaaagcagaccatcatagggctatattgttttctaagtcacaggccaacgttattttaaagtgatctttctcagtgtactgcgtcagcaatgaataaggttaaagatgttagctagccatagcattggcctgaagaaatgtgttacacactgattatgaatagctctacatagtgatactttaaatggtatacacccaggaacatcctggtctcttttccaaaaggctgtggcattcaaaatctttctgacgtttgtagacagatgcagcagcctattctatattcacagtggctctcagacttctccctcgctttccttttcctcacgtgaggcacgattgctcacagcttcttcttctccttagaatctcttgagactccagatggagtctggtccagggttgtgattacagatacatttcttcccactgaagtctttagcaacattttcttctgatcactaaagaaagctttaagactaatttctgattctgtctacctggaaagaacccataagtagttacttccataatcagtctcatcctacctggatttttcttagttctaaatagcatcacaactgcagagacagagaaacctagtatgagaacagtctataaggaaaaggtaattatagacatgtggaaagagaatataaagaaggttagctagcttcagtgtatctgttgaggaagaagtaaatgtaggggaccctcagatgagaggagatggtatttgggaagatataaacaatgtgtggccttggcaaagcattagcaagaaaaaaaataacagaaaatcacaccaagaacaggatcgtgggttgaaagactggagataaaactaaggctaacctagcagcagaacaatggcctgtagggggcgctttgcaaaccaggctataatggcaaatctttgggtgatcttgccaatgaaaaagaaatgaagttccattaacagcctggtcatgcaaatcggcagcatgtgagatgcgagctggtgaatgcatggaacgagctttgctgcctcccaactggtttttaatgcagatgtttgctcttttctttctttggtcttgattgttccaggctgtggtaagttcatcttctctgtgtccctttgcatgcactaataatcctcacacttccctccttacagctttactgaaccttaacccgtgtgtacagatgggcatttggtataaagagtgagagaactgctttgatttgtttcagaagcatctttcatttcttgagctaaaccctgtttattccagtcacctgaattacaaaaaaaaaaaaagtatcattttatgtacattatctttctccaaaagagtagaggatatagtctagaagctttacacacacagaaaacggatgtgaatatcacatgttttaaatagatgcagactagactggagagtacctgcttacttaatctgtcatgaatcaaactttatggcagtggttttcaaccttcctatcactgtgaccctttaatacagttcctcatgttgtggtgacctcccaaccttaaaattacttgctacttcatagctgtaattttgccattatgaattgtatgcaaatatctgatatgttggatatctgatatgtgagacccctaaagggggtcgagatccacaggttgcgaaccagtgcctaagggtgtgaaaagggtcagaagttggaacaatgactgtttacaaagtcttacagttcttcccagattcctttgcaaggaatccctttgagaggctgggtcctgtattagtagattctgaccatttttcaaaggtgatggtagcaattccaaacaccaagaatcaaggagaacaaatgttcacccaacaggcaaagtcttcagagatgcagaaagaggtatagaaagatctagaacacaatcagagaagatattacttgccaatatcaaaagctctcaggaaaccatctttgaaattacctgcctttagccattatgttaacctacaaaaatgacgtcatcatgtagtctgatataattattgtccattaaggtccataagtaatattctcccaagatccacaccatcaccatttagctcttcttatctgaacaatgcatactttttttgtaattctttaaactccttcccacctccgtgccatatgagtattttattccttcctttacaaacttggactcatgagtccttaactgacctactagaaaaatactcagaaaaccatgtactaaatagacagagggggccattggggaatgctgctttcaaatgacctaaccttgttcttttcacagatttctttaagacatgctgctggtgcatctgatttcttttgtaacacgggcaggactatcaattgcctttggttaagaaaaataaatccagtaagagcttaaaagaggaaacattttgttattctgtgcaggcctgataatattacctaagcatggccctccataggtttcaccatcagctgcctttgaacaaggagaacctgtgaaattcatcctgataagctctgcaaattagagctttaaggatcattatgcaaatgatattcaaatgcacacaccggggcgccaaccagcaagtgtgaattgcagtattcaaagggaatagacagctcccatcccttttccttgatgaggagaagcaaaccaaagtaggcttgcacatcttcctgaacctgtggagaatgcaggttcaagagctcagaaaggaactacatggtgcatgattagcataatacccatcctcaaaaaaaaaaaaaaaaaacttatttgagatggcattttatattcctctaagacacaactttcacgtccatgttgattcatcacacaatcatgtgaaaccggtgatgtgactataacaggaaataggctctaggtctgtacaacctcctttgaggacacgttagagtcctctgtggacaggtgtttttattttactgtactggctactgtatttaacattaaccaagtttgcaatgagccagacaatagcaaacaaattaaaaactctttcttcacagcaagggatttttttgtttaaaaacatgcaaggcttgcatagcttggagtttctcacacagcagctggcatcactggccacagatctaacagcctgcagaaagcatccctccaagtcccctcaaggatcccctgccagagttaggaaatagcagtagcaaacactgcctgcaatcagtgaaacccgcaggagctgtcctctagcaagaatgcaagccaacaaatgctggttgcatagcttcaaacatcagccacccctggaattaattagctaaaaaaacttggcgggggagatttattcagtgcatcaatagttctagattgtatggctctcaatcgtgcctcctttggtgtagatgcatttcagaatgtaaatgaaaaagaacttgaagggaaggggaacttacatgtgtaaatgacatctccactttggaatgtgattgactctttcagctctttgcctgtatgaaagccactgatctatctgcccatccatctatccatccacccatctatctatcatctaatctatttacctatcatctatctatctatatctctctcatatgtgtgtgagagtttaaacataacaatgaattcctatttaccaagaacaatttccctgccctcttgtgtcttcccatctcaagccatttagccttctactaacattttctgcactgattcttcttggactgcattgctttatttgtgaactttggaccattctgcagcagggacacgtatatttgacattctagttctgatccgagggcacctcaatattctgaaggacttataaagaaaaatctagcaggaatcaataattttatttgtcatttcattgaagtagatttttatccatatttactgccttgaggtttcacagtctgtgtgtgttacctctactgaccccagttacttgcttaactagaatgtgctgcttcagaagggcagcatattaaggcagagactgcattataaaatgcctttggaaaaaatcaaatcagctagagcaatgtacagccacattttccactatctggaaatgcagccaacatggacacaaaacaagtaggaaactgcctcttggtttccaccactcacaccccacttgtaaatcattggctctgagggtacgtatgagagggaagctttctctcagatcatgccttacagctcagtggcctctgccctccttgatgggttccctatcaaaaggtaaggatcctttccaaacatttccacagctgccattggtctgactccataaaccctgacaaataacacaaaatctttagtcagctacccctttttcttctaacttccatctcagaattatcagtaggatacactacaccttaacacacacacacacacacacacagtttagggaaatggctcagtgtcaaattgcttactctgcaagcaaactcagatcctcagaactaacatgaaaaactaggcaaggcaacacatacctgtataacccaaacttaagagcagagacagacagctatctggagctcactgactggacagcctagcctggccaaatctataagcttcaggttccataagaaaccctgtctcaaaaaccctgtgggccttatatctacacacacagcacacatgcacgtgtgtgcatacgcacacatgtgtgctcatacacacagacactcatatacatagcaccaaaagaaaactataagaggaaaaagttctaagaattattgcttctcaccaatcagttacccaaatattgtgatgcatttcagtagacatggttacagttctcatttaagagatgctggagattgtattctgaagcaaagaaactgccgtatgtttttcatgcaagcagaactcaagctgtttggagacattaatgtttttcatgattgccattatcaaggccatagctaatactcactaaaggtcctttgtggaccagactctacacctaggagctcctaacacagtgatgaatgtgtgttcttcatcctacagaccaaggagtcagcacaaaagaaagacacaggttccaaaatcacgatagccacaacaaaggtctgcttctttctgctccctgctaactgggattcagaaatttgtcaaaaggaaaatctaccatgactatgtctctctatactaggtgggagtggggtggggatggaaaaggggtaggggtggggaagaaaaggtcttttcctgaaacttgaagtcatttttttttcctgttgcaattgaagttgtaaacgttgctttagctgagaccctttgggaattttagtgtttgccttcccaaatctcagtcctctgatctgtcagtctgccagttttagctactgactcctgaccttgaagctggcaaaaatctagagtcatcagtggaagcagcagaataggcagatgtcccatggacagaaagtcagacctctctcacccctatagtgtctagggaaatggttggaacagcgtttcagctttctatgttttccatatcataggccaccttctaacagttcaggattgcacaggtattcaaaatcagctatttgggtttgaatgtttatcaaataatttttcaatattagtttttttaataaagaacaaggggacctttgccagctctgtttgaaggaaatataccttcctgagacatacatctaagaacaatttccttttacattcatctagtcattcagcagcaaatacagccatccccttcctcaaggccagacaatgtatcaaaagctggacatgcattgctgtatgccctgagaacccaatgtcaattaggaaggtagacaagcaaacaggaaatgcctgtttgacatgaacagagctgagaagtggatcctggacactggcttctgcaaacctatagccctctatgatggatcatgagctgttgatgatcatccttccatgagaacaagggctatgcaagtattgggaatcagacagtcgtgaacttagtcgttactcttagatttccctaccccatccatgagaaaacacaacattaagacatttgtccatgatttttcacaagtagtgaatatgttagtcaaaaatggtttttcttccattttctttgtgtgtgtgtgtgtgtgtgtgtgtgtgtgtgagagagagagagagagagagagagagagagagagagatacatatgtatgtatctgttacacatgtattggggatctaaatgcacttgtgtcctcaggcatatggaggctgaagagagaatcattttgatcaaatttctacctttttcagtgaggcagagtctctcagacaatcccagagatctcagatgtgggtattcttattagccagtttaatcaaagggaccttaaccccatcttctgggacgagaattacagaagggcttctaagccctggcttctatggattgaaatctcctctcctctcacttgtttccaaatgcttaaccactgagccatctccccaaaccctcaaaaacaatgtaaaaaaaaaaaaagtgttgtttcttcttggactcagtagtcttatttgtaggtaaactgtgccgtcagaagaaaccgatagtgtaggctcttctcgctcagctcatcttgtattctgagaccacatttattccacagggtcagaaggagacatgttcctgtctcttcaaagagaatgaattatagggaatttctcacttagttatctacagataatagaatcttctttttccttggcttcaaaccagacagatttataacggctaaagcccactgggctctcgtggaataaaaatgatggctcaggtgttatttttagtcctgcaaactccatattttcaaaggttttaaaactgagtaattaagttacatataactagcatataccctacagtctttaaagacatattaatgtgggtgcttttaaagagctgtaattggggagtactatgttcaatttctgtcacactaacactgcagagtgtcagatgtctgcaaacaagatggtataggaacatgtagtgacatatttaggtacccgtgtgtgccatatggtgtcacctgggctacgtttaaagacttacagaaggcataaaatgataatgaatggtctaaaaactgtcgaatatcactcaaaatgttgtgttctacttaagactaccacaagagggcattcttcctccaacttatatgcaaacaaattcttcctttgatttgtccaagcaaaaagctgggagtgggggaaggggataggggtttttcggaggggaaaccaggaaaggggataacatttgaaatgtaaataaagaaaatatctaataaaagaaaaaatatgtgtaggatatgtgttgacgttccttcgcctggctgggggaatgtttatgctgttgtctgattatgacacagtattctctgctcattactctctccctttctggtttgaccttcataggctgctaattaatggcttctgacaaatgaaagacgggaacttttttttccccttagtatgtggattttttttttgtctggttgtgatttgtcactggaattctctaataaagccagtggtttttctgtgtgtctcccctagggattctttgaggaggaggaaggtaaagagtatatctacaaagagcctaagctgacagggctctcggagatctcccaaaggcttctcaagctctatgcagacaaatttggagcagacaatgtgaaaataattcaagattccaacaaggtaggtgaacaaacagtgttcacacagtgacttgacagtgttcacacagtgtgacttgacagtgttcacacagtgtgacttgacaatgttcacacaatatgacttgactagatttttcctatttctacgcactgtttttaattttccatgcgaaatgaactagccaaaatacttgagatattttgcatgttgattggctggtgaggttttggattttttttttatgtttgtatctacatgagtttatgaacaccatgattatgcatgtgttcacagaggtcaggagagggcattggatcctcaggactctggacttacaggtgattgcaaaccaccaagtgggtgctgctaacccaacccaagagcgtgattgtaaagcaccatgtgggcgctgctaacccaacccaagagcagtaagcactgttaaccactaggccatctcttcagcacaattataagcttttacctgagtaatatttatatcattttttgaaacaacttagcaagtcttctgctttttccatagttcatatgcttttgaatagcagttaaaatgttgaagtagctgagctcagaagcagagctggaggaaaagcaagacacttacctgtttacccagttcaggaggcctttgtgaaccccaccattctgagagctgtcttctaatagaacccaaattgctatcacatggtattaatttgagagaatccactgaaggtcttcttggatcttctcattaaactattgccagccttcacatacattatcattctccagccaacctctagcaagcatctactaacatgccacacccagagccaggccttgagacacagaacctcttcttctagacctctcagttcatatgcatggaaaaacttgtgtgagtggttgattaaacagaatgcaatggagcatcgtgagaacaatcatagagcaatgcaggagaagcccagggcaggtacctgtaggcagctctgtctgtttggcttatgctacccagagggggtgatctttgagctgacaagtgcagggtaagatatgttgctgaaagtcatggacattcataggagcccaactcatgctgataggaaggtttgtgttcagaaagtcaggtctttgaaagacagactggacaaaagtatgaccaagagggaaagttggtttgtgaccaatggcacaaagttctactaagccaccaaaagaactcatttttctttcctgctttcttttacaaagctgatattggggaaatttgacacaaattttatgggcctgactatgagtaattacaaatatatccatcactcttagcttgaaagatacagttgccttctttattaaagctggcagaattattatcgtagtgacccatacagatgaaaaaataaacacaaggatgggaaaaagggaaagatttaatatcaatatagcttgggccttcattcctctctactaccacgtatcagctggtgatctttactaacccatccggaacctctattttaatatgtaaaattattacagttatgactgccctaccatgtaaatattaataacatcatagaacatatccaaaaggttcctgaaatctctagaactggataggaagtagacagatacaaagactgagaaaattagaagcaagtccaaaattcaagatgtcttcaaaacactcagagaaccatcctctccaagctcaaaggggagccagcgatgattcctcagagctccttgagctgtccaggccattgccttcctattagtagccctaggaaccaagtagagctggcaaagaagttgggcaaaatggtttattgctgataaagggtttgagatacagccattacaaaaccttgaagctagggagttgaccagctaaagataaagctagttaaagcaaaccccacaggcatgatcatctgagttcacagcctcagaaacccatgtaaacgccagctgggcatggtggtccacctgcaatgtctaccttccaaggcaggggcccaggattccctaaactggaaaataagactaacgtcatctatcatgggtaagctctgagagacataggtttgactgagagaccttgcttcagtgtataaggtaaaaaatttaagacgatggttcccaggccttcctatctgcatgcacacccataaatgtgcacatgaaaaacacacatatgcacacatgcaacatatgtatatagacacacacacacacacacacacacacacacacacaaattaaaacatttgcagttatttaacaggcagtcaggtaattagccagggagacaaggagccttcctctacatctctacaaactaggccaaagccaaggacaccaggctaggaacatggctacccccacagaggaacaaagagatttatttccactttgaagaaattttcactctacacagggtgacttgctacagaaaggataaacgtttaagcaatggcctaggcaggaatttgtgtcgaaaagacacacaaggcagtctggtcctggtatggtgagatgagctagctctagccatgttgctaccagagcctgtttcttacccactgtcagtcacttggtcttctgtggtctgatgaagtcttccgtggtctaaagaacacaagtgccttttctccaccaggaggcagcaaggtaactcataaatcaattgcagctcactactctctctctctctctctctctctctctctctctctctctctctctctctctctgtatatatatattcacacacatatacttaatgtgttgacacaggtaaaccccaaggatctggaccccaaatatgcctatattcaggtgacctatgtcacaccattctttgaagaaaaggaaatcgaggaccgaaagacagactttgaaatgcatcacaacatcaatcgctttgtctttgagacacccttcactctgtcaggcaagaagcacggaggagtggctgagcagtgcaagcggaggacagtcctgaccagtaagtgcagaggccagctgcctggaaagctccccacctcgggctaagacagtcttgtaggctgggttagagtaagtcatgtgttgctgcaggggtgagggagacagctcagttagtaataagatgcttgttatacaagcatgaaaacataagttccatcccagcacccaccaaagaaagcaaggcatacaggcatgtattgataatcccagctctgggcaggcagacacagggtggggggttggggggggggcagggatccctagcaatcattggccagccagcttaacataatcaggcagccccaagtcactatctcaaaaaaggctctgtctcaaaaacaaggtagtggactgatgaggagcaatcctcttgttgacatctgacccccatacacacatgtacacgcgcacaagtgcaactgtacataggtccacccataggaagttactttaatcctgcagataagctgacctgcagttctttgaaggaacccctcattatgttctgctaaaaggaagcctcttagccagctgtggtggtgaacacctctaattccagtagtggaaggagctgaatttcaaagcaaacctgggctacatagccatattccatgtcaaaatgacaataaaagcggggggtgggggggcgctttgagaagatactgtcaatagaactagtttgacatccttccccttgagctgggataatcaccaatatcatggtgtccttccacgacaaagacaccttcactaaagtctcccctcctctccatgaaccctccgttgccagttctgagttagcagctatcgctatgatcagctttagggtaaaatttaaaaaaacttaaaaacccacattagggttccagctcttctctaaatgaaagtaggccttgatctgcaataccgaattctatgctggctgcatcttttgtgtgaaacagttatctcttctgtgaaatagtcatcctttccttgtttttaacagacactgaatgctgactagcggttgggctgcttcagggtcctggcaatccatataaataaaacacaactttgccctcacagtggtcacagtggggtaggacaaagacccaagtaaaagaagaacttccaaggaaggctgcataaacaaataaatgttttaaaatattctaggatatcctccgagaaatgtgtgaagcttctctgtggggagactctcagctatgttgagagtcttccagttttgtgttgaaccaccaaggatcacactgacataaaatctgaaaagcatttgccttcagaaagttgacccagagagttgtggataagacacatctagagtaaaactcctatattctattctatattgggaattcttttttaaaatctttattttatttatttacatttcaagagttgtcccccttcttaatcccccctcccttagttcttcaccccatctcccccacctctgagagggtgctcctccacccacccaaccacccaccccttcttcaccccaccagcatccctcttttctgcgaatcaagtttccacatgattaagcacatcctcacccactgaggccacacagggaagtcctctgctacacatatgtctggggccatgaaccagcccatggaagttcatgaagattttattacagcaaccagtttcagtgcatgcagtaatcctttcagggtttggctactctgcctgtcttagcacagcctcagaaggttgatatgagctagcgaaggtgaaaatgcactcagggagaagtagccagggagaaaactaagaaacataagacaagatgacccctaggctaaaaataactcacatccacggacaccacacagacagaatgtgatatgttccccaaaacaataggaaatcctgaagacattcaggggaacctgggccttctctttgcccctttaaatctctttgtgtaccctttgtgtgcagcaagccacttgttcccctacgtaaagaagaggatccaggtcatcagccaatcaagcacagagctgaatcctatcgaggtggcaattgatgagatgtccaggaaggtctctgagcttaatcagctgtgcaccacagaggaggtggatatgatccgcctacagctcaaactccagggcagtgtcagcgtgaaggtcagtaagcaacccccagagctcagattcacacagccggtgaaacttgctatccaacgcttgggaaatctgttgtatataatctttttactatagtgtatataagaaacactctggctatttgtgttactgtctgtattagtcactttcctcatttctgtgaatgaatatgtccaaatacctcagaataagctacttaagagagggagggcttgttctgggtcactgtttacaagtactgtcaatcaagctgaggacggtatactggcaggaacatgaagtggctggtcacaatgtgcccccaatcaagaaaaagagagagatgaatgctggtgttgaactcagtcctatccagatgtggaataatgctacctacatgtacagtgcatcttcccatcccagttaaattaatcttgaaaacccctcacagacatacccagaaattgactttctaagtgataatgtattctgtcaattgacaacattaaccatctaaggcttttatctgcatctttagaattagattgtcaacatggatgaaagaaatagtcataagaccccacttctagttgaagtgttgtagtaggttgcccaagcccatgtatacacatgggcaacactaatcaggttcaagaggttgatgaggggttgggggtggtgtgtatatgtgtgaatgtgtgtatgaatgtgtgtgtgtgtgtgtgtgtgtgtgtgtgtgtgtgtgtgatgcacaaaacaataataaatatagaacagatcattaattccagagggagtgggggagactggggaggaattggaggtgtggacaaaatgataatacagtataattatttctaaaattctccaggaataaaattttaaatctaaatttttaaaaaagaagtaagagggaatcttaagggggaaaaaaaaaaaactccagtagaagaggaagatagatgtggtgggagtagggtaaaaatgactaaaattcattatataaatgatttaaaccatcatcaaattttaaaacatccagagaaatactaaatttggcttcaagaaaatgtcttctccctaaccctcccgtattatataccccaacaaataaacccattaacacattttgttctctatacaaacctgttgaaaaaaccatatgcgttacaaaatatttttgtaaagaaagaacgtttaatagttgaaaatgtgcattagtgcttatggactgtgagagctatgacagcagcatagggaatggacagcgggtgaaggggagaataaagtgaaggttccaaaaatgtcggaaccactaaggaacactggtggccccactggctggtagagtcactcaacacccttggttgaacatccacccctaaaactaaaggtgctagcacaggagggctggcgggaacaaagaaagcaagggcccactaataaggggcaggcctggcctggcctggcctgagtgctctgaggaggaggatggggttggatcctaacatgtccctccttgtggggaggaaggtgaggtgactaatgtgacatactaattttaaaagttaaaataaccatggaaagcccataatgaccaaagtagtaacagcttagggctggtaagatggctcagtaagtaagggcatttgttgtgcaaacataaggacctacactcaaataacaataataataataacaataataatgacaatgatgatggtgtagctgcatgtatgcctgtaactccagtgctatgggaggggggcaggagataaagatggggtatggggggcttgctggttatcagcctagatccaggtttagtgagaagcccttctcaaagaaaaaaggcagagagtagtagaacagagcacctggtgtactcctctggcctctgtctatgcacataagcacacattcaaatatgcacagagagggcgtggcaaagaggagagagaaaggaaggaaaggaagggctgtaaaatggcctaacaggtaaagacacttgctgccaagcctgaagaccagagttcaatccctggaacctacagagttaaagagaactgactcccacaagttgtcctttgacctctttatgtgcatcctggcacttatgctaactcacacacacacacacacacacaaaacacaaaacatacaatacatactatacgcacaccataaataaataaatatataaataaatatgtcaaaaccagatttttaaaataataaaagagaaagaaggaaacataaagtcttagataaaatcagaccagcagcaatgcctttcccggccgtgtttgacctgtaccaaaaggaagactcattgatgctggtgctgatatgctcaactcttgcccgtttctcttttctgtgccccgctggttggctcaaaaagactgaaataaatagacatgttcatactgagcattaaggcaagacaagtcagcagccctgggcagagttgggaggaggatgagcctggagaatcaaagggcatgtaacaccagtgactatgcccactgtactacaaaactcagtgtccaagggcatctgactcggatgcaacattagctcccatctatcatggtttcctttctgctgctgctttattaatattaatattgattttctatttataaattattaattatataagttgttaaatttataattaatgattgataattaatattaataaatgttgatattttcaagatattataaaataccttgacaaaaaaacaacctcaggaagacaggatttattccagcgtacaattccagtgatagtctgccattgtaggaagtcaaggcagaaacttcacacagccagtcacaccacatctacagtcgggagcagagagaaacaaacccacacatcttcacttgcttgcttgctcagcttgatttctctcctctacacttcaggaacacctgcctagagaatagcgccgcccactgtaggctgtcttcccatgtcaattcacatatggagataatcctgacagaaaagcccacagaggaagcaatccttcattaagacccttttgccagatgattctcactgtgaggttgaaaattaaagctaatcaccacactttccaaacccatacccatattaatgggttatatcactaagagaaatgaaccccttcactcatgcgcgtgcatgggaatagaagctggtattgtaaagctgggggcaggggatgtatctcagtggtggagcacatacatatcataggcaaggaccagggctcagcctccagcactgcaaaataaaatgagaagagaagagaaaagaaaaagaaaaggaggaggaggaggaggaggaggaggaggaggaggaaagaaagaaagaaagaaagaaagaaagaaagaaagaaagaaagaaagaaagaaagaaagaaagagaaaaaagaaagaagagaaagagaaagaaaaagaaaaaagagaaagagaaaaagaaagaggaagagaaagaaaaagaaaaacaaacagaaaaagaaaaagaaagagaaaaagaaaaaacaaatagcttagttatgcatttattcagcaactctgataaatgcttccttggcccagatcttggcaaggctttcaagtggcacacagagaaacatgaaatgctgggcagtggggttgggggtgctggggagggggcagtgcacataccactacctctgttgtatcttttcctaacaattatgtgtttgttttactgctaatggaagaaaaaaaatcaaacgctggatgtcaaaaattactaaatttaacttcggtgaaagtatttaaaagaaaggactcccattttccaagttgttttagaaatggcactcaagaagtaggtgaaggcaacaggagacaagagggactgtgtgttgtgacatttcctggggaccgttcaaacacccgttcatcccagacagggacccaatggtaaaagctagtagtgatcgtatcaaagcccaacttggcaagcagtaaggctccttggattgcttactggagtgtgcgtgaggagttactcacagaagcatgcatgactcagatgtccccaacacaggtgacaagtcacatacactgagtctctggagctccctgctcaacttgcagctagtctgctccgcaggttagggtctctttcttccttgcaagtgtttgtgcttaggaacaacctccaggaggcatcttgtgaagctcttcagctttctgggacttaacaaggttttgtttattttctaagtctcaccagccacctcttcctttgggggtggggatgtttcaatgcaaagaagtcgcagcatcataagatgacacatgactgaatttgacaaggggaacaaaaaaggccaaactctagcgcatctaattagtggcttattgacccttagaaaaacaagtttcagcaagaatacaaagtggtagattacagtgtagtgtgagggtgccagagtactatgtgactggttagaaaactgaccctctccttaccatggaaacgactcataaagaagaggaaccaggctcagccaaatctcttctcccataggtcaatgctgggccaatggcttatgctcgagcctttcttgaagaaactaatgcaaagaagtatcctgacaaccaagttaagctactaaaggaaatattcaggtaagactggaatgttcctcttttacctacttcatacagaaaggcatgaacaccattcaaggcggcagtctacctacctggcttaggacccaaagtcactgaacccagtgcctgttcctgtgactggattttaatttgcttaatgttgtggttaaaggcaatttgcagatgcgtgtgggcaggctcttgatgtgaatgagcgtctcatcaaggaagaccagctggagtaccaggaagaactgaggtcccattataaggacatgctcagtgaactgtctgccatcatgaatgagcaggtgagcctcccctggtgtgacccgcagttcctggctattgctagcggactgcagagtctttccttagtgcactgttcctgacatcagcactgtggtgttgaatttctctctccctgtgtacaacagcccttggcccaaagcacagaaacacctacagaaagagaatatgagaactgaaaggctttccacaattttacaggtatttacccaaaccatacagagtactggctctctagagtgtgtaggtctggttagacactgagaagtacaaggtggataacccaccccaacccccattaaggcctgctgccactccatcagtcccttgaggaacttaataccgaagatatggggtggcatttcacatttttgccactaggggcttctatatccatgctcagagtgaacctcaggatttcccatgctcccatgggtctttaaccttgaaacttccttagaagatgctggaccacaagcagaggtccgcaactatgagaaaagggaaaaaatagatagagataaataaatagagagatagataatagatgatagataggtagataatagctagtagattagatagatagatagatagatgatagatagatagatagatagatagatagatagatagatagatagatagatacattgataacatcatatatgatatataacaaactctactccataatcaagtcgttcgtgatcctggttatatatccactgtattctgtatggcttgcatgaattgtgaccattcaagaatgacagtattttggaggcactaaaagcaagcagttgaacatcaagtgaacttccccagcctgcttagcagcatccatcaactctcacactctacttgggtggtgatctgtagccttcccagtaacgagatatcactagtttcatatcggttccctctcctccccctaatgacctagtactatcaccacagagtaaggcaaatgctgggactttccagcatgccggatcacatgtctgatgctttccttcttccctgtcttcttctgcccactccttttaacactccagagtagctcaaggaggaaggaatggtaggctgacatgatggaaagaataaatctctgtagataggattcccaacagagattgtgttaactcgggatttctgagaggtggtgggaattaaacattttggtggagcacacatgggagacattattaaatctgagatttaaatgaggagaatggatataaatgctgggaaaccacacttgtctctcactgtaagccacgcctggccttgaaccatctggcaaaatatttttctctctctctcttttttttttcctggcagctctgtcgtggtccatgtctatacagcttctgcgcctctgtgtctagcatttccctcagtactgtgagcaaaagtggtacgtctttctctttgtacgtctatcctgtcctgcagcctcctgtccacccacctctcctcatcactagccctgtgccccagtcagctttggtggctcagctactgttacgtcttcattgccacttgaaaacgcgtcatgttgacagcttagctttcaaaaagaaaactcatgctccttcctctcctaaatgtatttttgagctctttcaatttttcaaaacaaagacccaaaatgttttcatgatacttcaaaatataaaagaaaaacacaggccaggtgttgaagaggagagaaatagaaaatggttgttttataaaggaaacctttaacaagagaaggaaaatttggctctctgctttctgaaaaaccaatcaaagcgagcaatctgaagggttacaccaatgtccttattcagtaaaagaaacacatctgttgaagagaaaggtgactttcctgctagtccttgtcacacaggtgacttgataatggagtattttcctttgtctgaatgtgaacgtgcgtactacagaagaagaagcacggacaacttaccagcctagcttggaaaatcagaaataatttgaaccaactgccatagaaacagaaacacaaagttaattacgccatatgcactccccccccccccagggccaagaaataaccatgttgttagggagaaacactcattacgagaggaaccaggatcatgcctctaacatacctgtggtctcagcacttgggcatacaggagaacaggagccgtttgggatttccatcgactacacagcaagtttgagaccagcctgagatacacgagatcctttctcaaaaagaaaaacaggatgagaacagctggagaggccagggaggtgatttgttggttgaagactcttgcctgaagcccgatgggacccacgtggtagacagagggaacagactcccccaggctgtcttccagcttccacatgcaagtgtcacatgtgcatgcatgcccatccatgcactcatttaaaaaaataaataaataaaaacagaagaaacagagccaaatgttggtgtgtaaaatggagatgtggaaaacaagtactttgaattggtagtgacaaggcaccccttcctttaataggcagccagaaattcagtttcataaacagcctcaaaccaaatccatgaagacctttccttggctggggccaatggaactcatacaagcatgcaaatgaagcataaatataagatgctcttttggaactgcgtttcaactgagtgaggatggcagcagaatccagtcagctgtggccatggggatccaacttaaaacacagaggcaggagcagagccattctgtcctagtgccagaagagtgagatgtgaacggggcttgctgtcagactcgaatacactttagacacataatatgcaggatcttgtaaccctgacccgaggaagggtgtaaggcgagcatgggacactcagatgctgagcgctctgggataggacatccgcacatcagagtgtgtgaggttagtgaggaaatcatagcagaaaacaaataccaaatcccttttgtacaaagataaacttcaggatgggcctgcagtttctgtagggctgtggctactgtttgcatacggctattgtgatgcagctgacaacgtgtcatgtagacatattgacattattttcgggtaagtcagattgatttgcttgtactcccattaatgccaacattcaggtgagttttccaacgttttcccccttagggtcgatgttagcaatataaattataaattttttgactgagatgctggaattaatcaaatacatttgtaaccacttaaacatttatgaattcatatcttgacagtcagagtgtggtgaagctactttgaacatccccatagcaaccagcatatgggctttgaagaaaatactcttcagaaccactttgactaagatattttccaaacttactaacaccccattgggaatgaggcactgttctgggttttaattctgtgtttgagaatatgaaaactgatctctatttgtttttatgtctatgtattgtatctgtcttgctttaagattacgggcagggacgacccagcaaagtgcggagtggagcgaccctacaccacacgtgtaactagcaaggggaccgcggctgtacctgtggtctccatctcatccagtgcggaggtttgagaggaaccctggagcatccgatgcacctctcagagaactctctaaatgttttgcagctaatctcggggaagaaaaagatagatttaatttatttgaagtttttacagtgttaatcttgtttaccttgctagcttgggaattttgccagcctctgaatttgcacattttctatgattcctttgtttccttgaagtagtattgatcaagccacgctaaacatttgttctgaaattccaatgaacgtgcagcttaaaagcaaactgagtttgctcttgggtgtaatttgttcaattccaggtccttgtacacgcattttagaggtcaaagtgaatgtttttataacatttaagcatatttccaatgtaaatagaagattgtaaaatatatggtttttatcacatttcaaagaatgtttttagttgatacttatgaaagtaccaaaattatatgggtaacgtttcagatgttatattaaaatatttgtgtatgtgtaaaaactgttgataaatactaatctctaaagtttgtggactacctttatttgtaatatatgtgcttttaagagcaatgggatgtgaaattacaaaaagtattttgctgttgataatatgaataaaaacacagttactttgcacttgatttcctttggggagttgggttggtagggtactcacctgacatgcgcaaatgccctcagccctgactgatccagacatggcagtgacacctgcactcccagcactcaggaggtggagacgggagggtgagacatttaaggtcacctacagctacttagaagtgagggggcggcataagtacctgagaggtgggcgagttgctgctgtgagtggggtttcttggatagcaattgaaccattcatactctgtgctttgaatgcctaccaaaagccaaagagggaccagagactgagcctggagaatcctctagggaggaattaaacacactgaggatttctaaatataggatattagaatgatttaggatcaatacagaccagaatctagatgactgtcgcggctatccatacaaattctatttctgcagtccataaacttgtggtaggattgtactttactctctcttagggggatagctgggacatgtgatttgctagaaccactgaaatgggaaatataagctagtgaccaaaatcagtttaggtagagtctgaaaagcctaaaacattcctagtctccaggtaaccacattgagccagacatacacatagcccacataacaccacagctcatactgggtcacagagaaatacagtcttgagagttaaggtgccttccacatgtgctttctggcttgcctctgtcatccccaggccctaatcaaccggtatcaattaggagatgtgtgtgtgtgtgtgtgtgtgtgtgtgtgtgtgtatgtgtgtatgtgtgtgtatatgcatgcatatatataatgtatgtgtatagtctgtgtgcctgtgtgtctatgtgcctgtgtgtctgtgtctatgtgcctgtgtgtctgtgtctgtgtgtgtatgtgtctgtgtctgtgtgtgtatgtgactgtgtgtgtatcctaactggaactcatatgcttaagcagaccccaggacaggcaaaatgttttgtgtctgtctaattgcagagagtgcagcacccctttccaaaacaaacacgatgcatttatttttgatacatgtttctgagcctggttaaaccttctgggacagacactggtaaggctaccatacagtactgggaccacatgattcttacagtaagtgtgggactgcactgagttccctgataatttgctaccccaaagccttacaagggatggtgcatcagaaagtgatgatctgattttgaattaccaggacattaaatcttattttatattctttctatctcaacataaattggccttatatcaattcctcaaaataaactcagattttaaaaactagtagagaaatccccagttctgcaggggaaaaaaatgaaaatgagccccagacacctagttcagagtaagtatatcttacacaaagagtgttggtcctgacttcgtctctttacccactcatcagcccaccccatggctacctctctcttcattgtcatttcaaagtgcaaaattccaagactgtaaagaaattagcacactccttcaattctgacagcggttgccttagaaacgagtgcgctgtccgaacctcacaccgtgcatttccgtctgtgttcacactcactgacaaggcaatatcagtggaatagctgatgggctttcttcacgatgattgatggatggctctctgtagcacatgatgcttaagagatggagaccatgtcatgagtaaactggctttcagaataccaaatattgttctgcacaaagatttcaccatagtttcagattgacaatttattattttatattagtcaaagtccaaaagcaatatatatatatatatatatatatatatatatatatatatatatactaatgttcctgtaagcatcagaaagttttaaaaaatctgagaacaaagatgacaaaatgatcttaagccaaatttttattcactagggttacagctgggccccacaccactgtgcttacaccaaagaagaaaaggctatgtaagacatgtgtattacatactgataataggatacttagttcaagatatgataaagtacattgtatatgatttgaataacattcaagaccatacaagaagcctcttccctcctcctgttttcatgccctgtctgctttcctatgtattccctctatagagccttctgatcccttataaacatcccatcttgcttctcccaacaaaaagctccctctttccttcttctaactacttaagtctgtcacataggcaccaggaaactatccaatacctgtatagcaggtactgtattattacacctacatccacactcagaattgaggccctcgactccttcagctactgcactcttaccaaagtcctcaagcccaaagccatgtcactaagccagaggaagcttactctcaggactgagggtgataatcttagctgtgcctagttctcctttgagtcctacttgctcaagtcattaaaaaaaagagggagataaagtgaggattatatatatataataccctgaaaaaatatatatatatattataccattgccatacattggtaattgacaagttgcaaccaatagtcccctagaaatcgaccggtcttgtcacattgatccagaatctatcaacatcaatgatggtgattcttaaacaatattcagagtctggtgatgactgagagctgtgtgggaatgaaagtaaggaaagaggtttgaaaatatggggaagagccaggtggtggtggtatacacaattttaatcccagcacttgggaggtctttgagtttgcagccagcctggtgtacagagtgagatccaggacagccaagaaacagtatctgttagatagatagatagatagatagatagatagatagatagatagatagatagatagatagatggtagatagatagatagatagatagatagatagatagatagataggtagatagatagatagatagatggtagatagatagatggatagatagatagatagatagatagatagatagatagatagatgatagatagatagatagatagatagatagatagataacatggacaaggttatttagtatcctaagtatttaagagagtggacgggagcataaaaaatagcaaatctagtatctaagagcctctgtccctgcaccctggtggtcccctgaagaagcacagtcttctccctgcagagagtttatctggccagtgtgcaacgtgggaagagctgatgctcttgtggacacaagagaggagctgccacaactgctggacaagaaagtaaatttgagttcagagcagaggcgactaaagtgttccaggtgatgcttcaggagtcagcaaaggaattcccaggaaagggcgacttgctctcatcctcaggtgttcctgcaacagaatacatgtgagaagagctggtgctaggtaagaaataatccggtagagagatgagaaatcacaagactcaacagacaccacgctgagtacccaaggctgatcttaaagtcttagaaatgagagaggtcaaaatattcccaaatttcaatggagaaagtaatggtttaagctcaaatcactgggtaaagcttcagacacaagcttgaaataacacttctgtggaggattctcggggaaatctgtttacagttctattgcatcaatggcctaatgaaacattccaactggattcctaatgtataaaggacatggatgtctgcgccatttatctggctataggtaaaccatggcttttgtaggacatttgactgccattagtcaacttactaatacttattccatagagagagtagatgagcaatttctaaagaaatagtgaatcatgggaaagtctggagattgacttagattctaggtttctttgctgtttccttattttgctttacttttggacaaggtttagggaatacggaaagtcggtttgaaagcacaggatggtcccacagaaatatttctgagcagcaagccaagcctggaagaaagattcctttggtgtctcatctcagaaaaattctcaccaggcccatcaagttccacaatgtggtggcacactttcagtctcttcctcccaaaaggccataaagaaaacatggattcctttagacttaccagattggctgctgcttgcttagagatttgcaaaatgcaacaacctttgactttaacacctagaactaaacaagaaacttttcaaaaaaaaatcatctacattagaattttaagcctaagagttggagataatgattttcaaaaaaaaaaaaaatcatctgtcttagggggaggggtgttcaggttcagctaccatgcttgcctatatgtgtatggggaggggtggtaatgttgattatgtatagccacagccttccttaaacttttatttactgcttctgtagaataactttgatttctaactatgctgagtctttacttcgttttctctttctcctcctctgcctcactatcatttctgccttgaatgagtcagaatctcaagaggctatgaataggtaccacaccccaaatgcggggatttcctaacatcatacatttggcaagaagagaacaagatgttcttaaaatgcaaaacgtacaaatgagtgtagtccagcgaatccatccagcagttccctgctccacagaggtgccctctcatacagcaaagcatctgtttctggagaataccatggcaatgttttactcctctaacaagagcctccaactggctttattcccatgtacatcattaaaagttggattttctcagtaagggatacacataaaaatacatagaatacacatagatatatgagtacacatgtaaatacatacttcacatcaaatttcctcacatgggttgactatgtttttcccaagatccatagactttcaaataaaaattagtaacacaaggcaagagaaacctccaatacagatatcaacaagagttatccaagaaactcccaaaacattataggcttttgttatggcccttggttgcctcccagaggttgacgataaattcatattgctgaagacacatctcagacataaaacttcacaggatccaagctggatcaacctgaaagtctcctccctgagaactagcattcatggtaccagtatccagataatgttgcccgtgaactaaaacaataatgagcatgccacaatacccttaagggtacaatgtcagcatacataccttggtggaaaccaaaagctctctaattggacttaaggtccattcaacaaaaggaaaattacctggagatagtgtggtcatggtcttggaggagaactttcaacctctgcaaaattagtaactgcattctaaatatttattattgtactcatagataagtgtagctctcaattctaacacaaaaaacaacaacaaaagcaaaaacttttctttgtagcaatcaaaagctgttacaggaaactacaactgagcaaaatatagagaacaagtgatcctgtggagctcagccccaactgatgcatctattacacaattcctgcacctaaggctcagagaacattgacgaggagggatcagagcggtttgaaaagacaaagaaacaagaagactgctatgagactgtgtctcctaaaaatgtcagggaactacacccatgaactctcaacaacatggttgaaaaaggaaaaccaatagacatgttaacatgaaaggagaaaacccaaggatatcccaattctagacaaagaactacaggaaactaagaaatagttagggagacatattgtcttcccccgagaagagtctctcagttcctagtggtcaggcttgaaataatatacatacgagtaatattatgaaaaatgagtaggctggagttacatatttaggagtgtgtgtgtgtgtgtgtgtgttgaacaacaaaaagccatgaattcagaagagagcaagagagtatacacgggaggggtcggagggaggaaagggaagggggaaatgatattatattttcatttcaaataaaaataaaacttttaaggttggattttcaaatcaagttgttaatataataacaacttaaatttgaaacttaaacttgaacaataggtttcaaggctgccatagttattattgatttttttcccactctgaccaaatgtgcatctccttttagtcctttcagcgaatagttaaaaaaaaaaaaaaaaaagagagtacttttgactaagtgcaattcagggctctcctctgcaggtcttagaaatagctcttgtctggagtgacagacaacactcccactctttctcacaagtatccttgagtaatgcaaggttgttacaggtggaagccttgcatcgtcttaaccagttccatctcctaacagatttcacggatgcctgggatgtctgttttctccaggatatgatgtggcctctgaagcctaaactgtttggcttaaattaacaagcaagattttcttggcagaatcaatgccttacattttctacactatggcatcttgacattagtaactgaaatcagacgtgaaagatttcttgcttccaaaacgggggaggggggtggagtggggggactgtcaccttctcctgatgtcgcaaagcataaggtaatgaaaagagaaatctgtgaaagacagaaaattaattgaacccaagcatgcaagtccttggaggctgagacttcagtgtttgcctttgggttccagaggcaaggagagatccaggcatgtgtacaagtttctgcaaagcttgctgagttcatgcataaaagaattcacaaatgagtctaaaagaaaccaaagttagacttcttaaggcaacttcatgctgactgatgtctctggtgtccccagtagaagtgttcagtcaaaggagactgagagaacatacatcactcaggctctgaaggagagtgcccagacacagatgctcagccctattgctgatacacttgtgaccctgagcaaggatccacactgagcctcacttatttcttctggaaaatggtacaaacaatgagtaagaggatcaaaacagaacacaatgttcataattcaggaactggcagcagtaaatgccctgtatgtgtgagctgtaattaatagcatggtaacaaatacagctcaagtgagaaattaggcattgtgacatcaagttgtttttagtaatattgattcatataattgtaaaatatgtatttagtgaatgcataaatttagaaacatggtaattcacgctgtttccccataaaatcactgatgagcacctcatagctattgtaagttccagcttataagagctccaaaggcaaaaatacattcttgcagggagcttgcacggtgtagagagtattataagtcccctaaagtattaataaatgcatacaaatattgctctttatctaatgtatctccaaggacagatgctacctcaaggtatggatttatataaagtatctgaaatgtctcataaatgatgacagtagattcagaataattgtccacaaggaacataaatgcacaaaagcttactctgtgagatccagctagatggagcagtttctgagataaagatgtttcttgatgtcaaaaataatttggaacaggatttgccttctatgtcaggtcaatgtgatcttccttggtgacaaaaactaggagtatatgaaatttaatatcactttaaaggtgcagaggctatgtaaaagcaagaagactgctctataatcctggcctgaaaggtatttcagaggtcgaaatctgacacttattgaattaatgtcttcagcaataatttattttaaccaacacccaatatctggctcaaaatggaattctggtcttggtagagcaatgctagagagaactaagaggatgtacatgttcacgtattgctataaagaaaatgaaaaaccaaattcaaattgagaagataaagacctaagagcatataggaggaacctaaaacacactgaattctctattgaaaagaccaacacatgcacatacatgtccacatgtatacagactactaacaagacagttgtgaccatagagccagaaaaattattttctgttttaatgatgctccattctataaacaggattattcataacatccacctccataccaagagagcaagaactcacacacaacacatgaactgctcaaacctagtcacattgttcactgtggactatgaactaaacacattggagtacataagttgacaccatatgggcctcctcccacccagtccactccgattaaaatcagaactcagccaggatgctgtgtaacactcctaaggaccactcctaaggactttacgagctacatagaatctactttaactcaacactgatgtctttacttgtgtccttttgtggtgcactgggagacttggaaaagaagagaactggagaagaaaataaagagcagaaccaagaatagagtggagtgcctagccagtcttggacaacctatggttctaaatagaaagaaaacatataagttcatttcacttaagccagtattgttcctgtgtctttattaacttctttgtgcaacttccaaccaatagacctttctggactcccctgaacacctgaggtccctttctgatcaccagtggcactttgatacttaacttatatctcctctttgagaatatgaccgagtaaattactgtatttcaggatattgaatgtctttgattaagccaagttgtattgaattaaatctaactttgaatcaaatttctaaaatgcctctacattcaaacaattgtcaaacaaatatatcaatacaacaaattaaatatttcctttattgaattatccatctatacactgaaaataacttcttcctgtttagtcagaaatatggatttaagaactgtggtttgtaaaaactaaaatagaaacaaaatagaaatgttagtttatctaccaaaaaggaattcactgtaggttttttttttagtacagctagatgtccaaatatctgtgcctgtcttccagctaaatttatctatcactgtcagtgttccagtgcagattccttctctatggatgtcaaaacagtctctagcagatctcggattatggtttcccagcttacaaactagtaaaaaaaaaaaaaaatgcacttctccagatgtcacgcattaaattatcattcagtagatattcattagtctgccctcattttcataagtgcttttgatattagtattggccatgtgctttgctttggctaatggagtattagtgtatgtgacataaactagagattaagtaggcttttgcagatacagttgatctctgacactttgttttcttccttcaaagactatgctttcatttaagtagcctaggaaggatggaggatacatagaacagcatgagatcctagccaaacccaggttcatacagccagaaaccagccaatcttagcatgttgaaagagaaataaatacgtattgtcatgtacatcagagatgcatgcaggtgtttttccatatagcaccagtgaggcaacaattaacaaacatgtagaactccaagagcattctctgatctaatatcacaatgttaagtcagtgattctgtaaaggtgctcatgatgattgcccaaggaacggtggctgtgtcatctatacatttgttaataacaatcactgatggcaggaaagatgatgatgaaaagaaaggtggaagagcaagaaatgaaacagtgtgatatgagggagatagaatgagaaggaggtggtggatactatctgaatacattgcattcatgtatgaaattaccaaagtagatttgtatgttctttttattatgcgaatgctagccttgagtcttcagatatatgtacttaaactggaatacacatgtaagtcaggaaaatagagaccatgggggaagctttgaaatgaaggctagaatggagat

SEQ ID NO: 570 - DNA, 5704 bp, Mus musculus
tcctagacagccacggtttcttgggatatccgaacactctattcgacggtaccagaagaggcagagcacagggcagaaagtctgctggtgaaagaggcttgtaaattctacagttcccagtggtacgtggtaaactacaaatatgaacaatattctggagacattcgacagttgccccgagcagaacacaagccagagaaacttccttcacattcctttgaggttgaccatgaagatgctgataaggatgaagataccacatcccactcatcatccaagggcggtgggggagctggaggtactggtgtgttcaagtctggctggctttacaaggggaattttaacagcactgtgaacaatactgtcactgttcggtcattcaaaaagcgctacttccagctgactcagttgcctgataactcctacattatgaacttttacaaagatgaaaagatatccaaagagcccaagggctgcatctttttggattcctgcacaggtgtagtacagaataacaggctgaggaaatatgccttcgagttgaagatgaacgacctgacctattttgtgctggctgctgaaacagagtcagatatggacgaatggatccacacacttaaccgtatcctgcagatcagtcccgagggcccactccagggaaggaaaagtgcagagcttgctgagctggggctagatccactggataactgcgtgacttgtgaatgtacactggaggaaacggattcttcagagaacagcctacatcctgactttgcaaaatacctcacagaaaccgaagacactgtcaaaacaacacgaaacatgggcagactcaatctgttctccctggacccagacatagacaccctgaagcttcaaaaaagggacagttttgaaaatgagttgatgatcaaaccctttgaagagaaagctgccaaaagaatcatgatcatctgtagagctctcaacttcaatcttcagggatgtgttacagagaatgaatatgaccctgtaaccaatattgagcccttttttgtgagcgtggcactttacgacctcagagataacaggaagatctctgcggacttccatgtggacctaaatcaccctgctgtccggcagatgctctcggggaccccaccggccttggaaaacggcaatattgacaccggtacaccaagacaatcggaagaacctcacataaagggccttccagaggaatggctgtcttctgctgtgagtgatccacactctgaaattgttttggtggccaaagtcgaaaaagtcttaatgggaaacatcgggagtggtgctgaaccttatatcaagaatccagactccaacaagtttgcacaaaagattctaaaatccaataggcagttctgcagcaaattggggaaatatcggatgccgtttgcttgggcagtgagatctgtatttaaggacaaccaggggaacgtggacagggactcacggttttcaccactgtatagacaagaaagcagcaagatgtcgtctgaggacctcctaaaactgcccttcaacgtgacggctcagtcagaacctacagtggaggtggaagaatttatttatgactcaacaaagtattgccgtccataccgagtatacaaaaatcaaatttatgtataccccaaacacctcaaatacgatagccagaaatgcttcaacaagtgtatttatgggaaacctggagggcccctcttcacttcctctgcctacacggctgtgctacaccattctcaaaatccagatttctctgatgaggtgaaaattgaactaccaacacaactccatggaaaacatcaccttttgttctccttttaccacatcacatgtgacatcaatgccaaagccaatgccaaaaagaaagaggctttggagacatcagtgggctatgcatggcttcctctgatgaaacatgatcaaatagcttctcaggagtacaacatcccaatagcaacgaccctgcctcctaattatttaagcattcaagatcctacaagtgcaaagcatggtggaagtgacattaaatgggtcgatggtggcaaaccgcttttcaaagtgtccacatttgttgtatcaacagtgaacactcagcgctgctttacatttatggaccggggattcgtgtttaagatggtgaacaattacatcagcatgttctcttctggtgagtttaagactttatgccagtataagtttgatttccttcaggaagtttgtcaacatgagcactttatccctttgtgtctccccataagatctgcaaacattccagatatgcctgagtactcagtcacaaatgaattttgccgcaaacacttcttaattggaattcttctccgagaagttggctttgccctgcaggaggaccaagacatcaggcacttagctttagctgtcctaaaaaatctaatggctaagcattctttcgatgatcgatacagggaacctaggaagcaggcacagatagcgagtctgtacatgccgctctatggtatgctcctggacaatatgccaagaatctacctgaaggacctgtatcctttcaccgtgaacacatccaatcagatcccaaggcccttgtctttgattgggtcaacgcttcggtttgacaaattagatcaagcagaaaccaggagtcttcttatgtgttttcttcacattatgaagaccatttcagatgagactctgattgcctactggcagagagcacccagtccagaggtgtcagacttcttcagcatcttggagatgcacacgacttctggccacgagggacataagcagcacaggtctcagactttacctataatccgaggcaaaaatgcactttccaaccccaaacttttacagatgttggacaacagcatgaacagcaattccaatgaaatagacattgtccaccatgttgacacagaggccaacatagccaccgaggtctgcctcactattctggacctgctgtctctctttacccaggtccaccagagacagctccaacaatccgactgtcaaaattcactcatgaaaagggtcttcgatacttacatgctgtttttccaagtcaaccagtcagcctcagccctgaaacacgtgtttgcttctttaagactgtttgtgtgcaagtttccgtcagcatttttccaagggcctgctgacctctgtggctcattctgctatgaagtcctcaaatgctgtaaccacaggtcaaggttgactcagatggaagcttcagcacttctatacttcttcatgaggaagaactttgagtttaacaagcagaagtcaattgtccggtctcacttacaactcatcaaagcagtgagccagttaatagctgatgcggggatcggagggtctcgctttcaacactcccttgcaatcacgaacaactttgccaatggagataaacagatgaaaaacagcaatttcccagcagaggtgaaagatctgactaaacgaataaggactgttttgatggccacagcccagatgaaggagcatgagaaggacccagagatgctggtggaccttcaatacagcctagcaaactcctatgcaagtacccccgagttacggaggacctggctggaaagcatggccaagattcatgcaagaaatggagacctgtctgaggctgcgatgtgttacatccatatagctgcacttattgcagaatacctgaagcgcaagggttactggaaaatggaaaagatttgcacaccacccctgcttccagaagacacccaaccctgtgatagcaacttattactaacaactccaggcggaggaagcatgttctctatgggatggccagcctttctgagcatcaccccaaacattaaagaagaaggagcaatgaaagaggattctggaatgcaagacaccccgtacaatgagaacatcctggtggaacagctgtatatgtgtgtggagttcctttggaagtctgaacgatacgaactcatcgctgatgtcaataagcccatcatcgctgtctttgaaaagcaacgagacttcaaaaaattatcagatctctattatgacatccaccggtcctatctgaaagtggcagaggtggtgaattcggagaagcgattgtttggtcgttactatagagtggcgttttatgggcagggattctttgaggaggaggaaggtaaagagtatatctacaaagagcctaagctgacagggctctcggagatctcccaaaggcttctcaagctctatgcagacaaatttggagcagacaatgtgaaaataattcaagattccaacaaggtaaaccccaaggatctggaccccaaatatgcctatattcaggtgacctatgtcacaccattctttgaagaaaaggaaatcgaggaccgaaagacagactttgaaatgcatcacaacatcaatcgctttgtctttgagacacccttcactctgtcaggcaagaagcacggaggagtggctgagcagtgcaagcggaggacagtcctgaccacaagccacttgttcccctacgtaaagaagaggatccaggtcatcagccaatcaagcacagagctgaatcctatcgaggtggcaattgatgagatgtccaggaaggtctctgagcttaatcagctgtgcaccacagaggaggtggatatgatccgcctacagctcaaactccagggcagtgtcagcgtgaaggtcaatgctgggccaatggcttatgctcgagcctttcttgaagaaactaatgcaaagaagtatcctgacaaccaagttaagctactaaaggaaatattcaggcaatttgcagatgcgtgtgggcaggctcttgatgtgaatgagcgtctcatcaaggaagaccagctggagtaccaggaagaactgaggtcccattataaggacatgctcagtgaactgtctgccatcatgaatgagcagattacgggcagggacgacccagcaaagtgcggagtggagcgaccctacaccacacgtgtaactagcaaggggaccgcggctgtacctgtggtctccatctcatccagtgcggaggtttgagaggaaccctggagcatccgatgcacctctcagagaactctctaaatgttttgcagctaatctcggggaagaaaaagatagatttaatttatttgaagtttttacagtgttaatcttgtttaccttgctagcttgggaattttgccagcctctgaatttgcacattttctatgattcctttgtttccttgaagtagtattgatcaagccacgctaaacatttgttctgaaattccaatgaacgtgcagcttaaaagcaaactgagtttgctcttgggtgtaatttgttcaattccaggtccttgtacacgcattttagaggtcaaagtgaatgtttttataacatttaagcatatttccaatgtaaatagaagattgtaaaatatatggtttttatcacatttcaaagaatgtttttagttgatacttatgaaagtaccaaaattatatgggtaacgtttcagatgttatattaaaatatttgtgtatgtgtaaaaactgttgataaatactaatctctaaagtttgtggactacctttatttgtaatatatgtgcttttaagagcaatgggatgtgaaattacaaaaagtattttgctgttgataatatgaataaaaacacagttactttgca

SEQ ID NO: 571 - protein, 1677 aa, Mus musculus
TATVSWDIRTKTVPEEAEHRAESLLVKEACKFYSSQWYVVNYKYEQYSGDIRQLPRAEHKPEKLPSHSFEVDHEDADKDEDTTSHSSSKGGGGAGGTGVFKSGWLYKGNFNSTVNNTVTVRSFKKRYFQLTQLPDNSYIMNFYKDEKISKEPKGCIFLDSCTGVVQNNRLRKYAFELKMNDLTYFVLAAETESDMDEWIHTLNRILQISPEGPLQGRKSAELAELGLDPLDNCVTCECTLEETDSSENSLHPDFAKYLTETEDTVKTTRNMGRLNLFSLDPDIDTLKLQKRDSFENELMIKPFEEKAAKRIMIICRALNFNLQGCVTENEYDPVTNIEPFFVSVYDLRDNRKISADFHVDLNHPAVRQMLSGTPPALENGNIDTGTPRQSEEPHIKGLPEEWLSSAVSDPHSEIVLVAKVEKVLMGNIGSGAEPYIKNPDSNKFAQKILKSNRQFCSKLGKYRMPFAWAVRSVFKDNQGNVDRDSRFSPLYRQESSKMSSEDLLKLPFNVTAQSEPTVEVEEFIYDSTKYCRPYRVYKNQIYVYPKHLKYDSQKCFNKCIYGKPGGPLFTSSAYTAVLHHSQNPDFSDEVKIELPTQLHGKHHLLFSFYHITCDINAKANAKKKEALETSVGYAWLPLMKHDQIASQEYNIPIATTLPPNYLSIQDPTSAKHGGSDIKWVDGGKPLFKVSTFVVSTVNTQRCFTFMDRGFVFKMVNNYISMFSSGEFKTLCQYKFDFLQEVCQHEHFIPLCLPIRSANIPDMPEYSVTNEFCRKHFLIGILLREVGFALQEDQDIRHLAVLKNLMAKHSFDDRYREPRKQAQIASLYMPLYGMLLDNMPRIYLKDLYPFTVNTSNQIPRPLSLIGSTLRFDKLDQAETRSLLMCFLHIMKTISDETLIAYWQRAPSPEVSDFFSIMHTTSGHEGHKQHRSQTLPIIRGKNALSNPKLLQMLDNSMNSNSNEIDIVHHVDTEANIATEVCLTILDLLSLFTQVHQRQLQQSDCQNSLMKRVFDTYMLFFQVNQSASALKHVFASLRLFVCKFPSAFFQGPADLCGSFCYEVLKCCNHRSRLTQMEASALLYFFMRKNFEFNKQKSIVRSHLQLIKAVSQLIADAGIGGSRFQHSLAITNNFANGDKQMKNSNFPAEVKDLTKRIRTVLMATAQMKEHEKDPEMLVDLQYSLANSYASTPELRRTWLESMAKIHARNGDLSEAAMCYIHIAALIAEYLKRKGYWKMEKICTPPLLPEDTQPCDSNLLLTTPGGGSMFSMGWPAFLSITPNIKEEGAMKEDSGMQDTPYNENILVEQLYMCVEFLWKSYELIADVNKPIIAVFEKQRDFKKLSDLYYDIHRSYLKVAEVVNSEKRLFGRYYRVAFYGQGFFEEEEGKEYIYKEPKLTGLSEISQRLLKLYADKFGADNVKIIQDSNKVNPKDLDPKYAYIQVTYVTPFFEEKEIEDRKTDFEMHHNINRFVFETPFTLSGKKHGGVAEQCKRRTVLTTSHLFPYVKKRIQVISQSSTELNPIEVAIDEMSRKVSELNQLCTTEEVDMIRLQLKLQGSVSVKVNAGPMAYARAFLEETNAKKYPDNQVKLLKEIFRQFADACGQALDVNERLIKEDQLEYQEELRSHYKDMLSELSAIMNEQITGRDDPAKCGVERPYTTRVTSKGTAAVPVVSISSSAEV

SEQ ID NO: 572 - DNA, 300277 bp, Homo sapiens
  misc_feature (1)...(300277): n = A,T,C or G
tatttctttctgagactattaggaaaaatgcttcctctatctcttttaaaagataaacaatcacatttgataagtatacatttggtataacgttctctgaatatgtaaggaaaacagcaaaataatgctatgacttctaattattgagcaacgtgcaatattaaaaacaacaaatcatatatgcatatatatttgatgaaatacttgtatccaaaaaatacaaattaaatttaaaaaaccagtaagaaaaagactgacaatacaatttaaaatgggcacagaatttgagattgagattttctgttttttttttttcactttaagttctagggtacatgtgcacaacatgaaggtttgttacgtatgtatacatgtgccatgttggtatgctgcacctgttaactcatcctttacattaggtatatcccctaatgctatccctcccccatctccccaccccccagcaggccccagtgtgtgatgttctgtaccctgtgtccatgtgttctcattgttcaattcccacccatgagtgagaacatgtggtgtttggctttctgtccttgcgatagtttgctcagaatgatggtttccagcttcatccatgtccctataaaggacatgaactcatccttttttatggctgcatagtattccatggtgtatatgtgccacattttcttaatccagtctatcattgatggacatttgggttggttccaagtctttgctatttggaatagtgccacaataaacatacgtgtgcatgtgtctttatagcagcatgatttattctgttttcttttaatttggctttttgtattagactttcttttttactaatttgctcattttttatatttttcttgtccgttagtaagagatctttatataatagagatattggcttttcttgtttatttgtattacaaacatgtactaaattatgtcatttatatactggcattttattaatattgccataatgaagatttaagattttatgtatttaaatagtactatattttcttctatagcatctgatattcctctcttggttaagaaaatagcttattaatgaaaaaaataaacagtacaaagtcaaactaataaaacaactacaagttccttgaggagactactacagtagataatccctcttgagaacccaattaaggaaaaaaggaggaagtaaaaatattcgagattaagaatgagaaaagcgattagccactaattgaggaaggattttaaaatctaaaaactttctgcacagcaaaggaaacaatcaacagagtgaaaacacaacctacagattgggagaaaatgttctcaaaccaacagagggctaaatccagaatatacaaggcattcaaacatttctacaacaaaaaacaaataatctgacttaaaacatgggcaaatgatctgaacagacatttctcaaaagaagacatacgtatggtcaaaaaatatatgaaagaatacttaactccactaattatcagggaaatgcaaatcaaaaccacgatgaggtatcatctcactccaattagtatggttattatcaaaaagacaaaaaaataacaaatgctggcaaggatgtggagaaaagtgaactcttatacattgttgtttaagaatgtaaagtaataaagccctgtgaagaagagtataaaagctcctcaaaaactacaaatagaactaccgtatgatccagcaatcctactactaggcatttatccaaaggaaaggaaatcattatatgaaaagcatttgtacccccatgtttattgcaacactgttcacaatagccaagatacggaatcaacccaggtgtctgacaacagatgaatggataaagaaaaagtgctatatatacaccatagaatactattcggccatacaaagaataaaatcctgtcattcaaggtaacatggatggaactagaagatattatgttaactgaaataagccaggaacagaaaattaaaccactcatgttctcactcatatgtggtagcttaaaagagttgatctcattagaacaaaaaatgctagaggctaggaagggtagggagaaggagagaaagggagtcatttgttaaaggatagaaaattacagctagataaaaggaataagttctagtgtttcataacactgtagaatgactatagttaacaataatgttactatacagtttcaaatagctagaaagagaatattgattattcttaacacaaagaaatggcaaatgtttgagacaatgaatatgctaatcaccctgatctgatcacagtgcattgtataattgttatgtgcaaatttaaaaaaaataatttttttaaagtatgtattttaaaaggcttcagataaaaagcaacaaattaggcttggcacggtggctcacgcctgtaatcctagcactttgggaggctgaggtgggcagatcacgaggtcaggagtttgagacaagcctggccaatatggcaaaaccgtgtctctactaaaaatacaaaaattagctgggcatgatggcgcgcacctgtaatctcagctactcaggaggctgaggcaggagaatcgcttgaacctgggaggcggaggttgcagtgagccgagttcgcgtcagtgcactccagcctgggcaacagagcgagactctatctcaaaaaaacaacaacaacaaaaaattaaatgttagcaaaagataacaaaacttggaataactggcttggtctcttcgaaaagtcaaagtcattatcaaaaatgggaggagaatggtttcaaattaaagtcttaagagacatgacaaccaaagcaatgcatcttcaagattaaatttgagattgatcaaatcagctgagaaaaagttatttgggggacaattggagaaattcaaatatgacctggatgacaaaaaaaatgaaggaattgttgttgaattcaatgtgttaaataatattgcagttatgtaggagaatattcttactttttggagataaatgctgagctatgtagagatgaaaggtcatgatttctccaatttaaaatagtttaatatacctggaggatttatgagtattcattgtgttctttgtaatactttttagccatgtttaaaatatttataataaaattttaaagaatacataacagaagggaacacatatcattcagtgttacatgcaattctaaggcaaacatttctaaaatctagaaaaatgggatgatattattagtaaaatataaattattaagaaataaaagatgtgaaaaatcttgaatagaccaattaccatacaagggatttgaaaatgattatagatctcctattaaaaaatgtaccaaaaccagatggttccacagctggattgtatccaaccattggagaacgaataagcccaatgttatttaaattgctgtagaccatggaaagaggcagaaagctctccaatttaattaaggaagccagaaaaatctccctggcaaaatgtcacattagttccaaaaataaaaaaggtagaccaatgtcactcatatgtgtagatgcaaaattctcaatgaaatattagacaacagatttatttttatgttgctctctttaagaaacaaaagaaataattatgatagaacttttttacatatcaagttctatttctgtgagactagtagatatcaggagtaatcaccacactggaaaaatggaggagaacattaaaatgtctggaaaaataaagtaagtacaagggtttaattatgcacgtaagaaataaaaatgttcccatctaatatttactaatcttttccttcttcatatggagccaaaatctgcctctgagtaacttttacagatggaggaaaaaaagatcctgggacattaattcccttaggctagactacaaataaaagccaaagtaggatagagaacctagagactggttgccagttaaaaatagtcattcttttctttcaatcatgtacctctgtttgcactatgccccaaggattctggtggactaatagtgatagaatgccacactgcatgcgtattggcacgatatacagcctggcagtgtttcagattcaaatcatattactttaagtgtaattttctcccaagaagtgatctgtcttctaaacacagtaagaaatacatatcagatttaatacctttttccatagacaacatggaggcactcagctttttcagatggcttcagctccagcaagaactcaagaactaatagaccccattaatatcatacctttcaaaccatatttttcttgtagctctttaatattctcttggtaaggttaggaaaaatgtatcttatgaaatagtattcagccaaaacaccactggatgtacattcaattgcttatttttttcttagtgttaggaatcaagatgtgctgtggcaaagtatttttccaacaatttggtttacaattctgatactttacttattgctgaatatgacaagcattatactttcaataaacaaaattattttaatttacccacccaattacactactacattatcaaggcaagtcacctgcctctgtggacctccatttctattgtaaaaataagacaaatatacttttcccttaataaaggaaggtttcctcaaaattgacaaatgggatctaattaaagagtttctgcacaacaaaagaaactatcatcagagtgaataggcaacctacagaatgggagaaaatttttgcaatctatccatctgacaaaggtctaatatccagaatctacaaggaatttaaacaaatttacaagaaaaaaagaaacaaccccatcagaaagtcggtgacggatatgaacagacacttctcaaaacaaaacatttatgtggccaacaaacatatgaaaaaaagctcattcatcactggtcattagagaaatgcaaatcaaaaccacaatgagataccatctcactccagttagaatagcgatcgttaaaatgtcaggaaacaacagatgctggagaggatgtggagaaataggaatgcttttacactgttgggagtgtaaattagttcaaccattgtggaagacagtgtggtgattcctcaaggatctagaacaagaaattccatttgacccagcaatcccattgctgggtatatacccaaaggattataaatcattctactgtaaagacacatgcacacatatgtttactgcagcactatttacaatagcaaagaactagaaccaacccaaatgcccatcagtgatagactggataaagaaaatgtggcacatatacaccatggaatactgtgcccccataaaaaagaatgagttcatgtcatttgcagggacatggatgaagccggaaaccatcattctcagcaaactaacacagaaacagaaaaccaaacaccacatattctcactcataagtggaagttgaacaatgagaacacatggacacagggagaggaaaatcacacagaaaacctggaagacaggttgatgggtgcagcaaaccaacatggcacatgtatacctatgtaacaaacctgcacgttctgcacatgtatcccagaatttaaagtataataaataataataataattaataaaataaaataaaggaaggcttcctataatatcagaaaaccattttaacttgggcatttgtattcctatttctgtatctttcttttttattaattagcaaaatttccctcctaatttccatgctatcaaattctctcccagctttcccttatgtacggtgggggcaatatcacatgtcccatgtgcattttagaatgaatgattgagaatcaaatgaaataatgagtgtgctttgtaaatggtgcaacactagacaaacttgatatagttaagcactgggacatggtgatgcccaggctgacacccagggtacactgggcttggtatcacttaggaagggtggctcaatgccatggaatggatgcaaggagtatttgccccacctcctacaatctctgggtatcaagatctaatttagtcatttagtgtgcaaatttagttattcgtccaagagtcacactcctagactaataactaaatttacacactcttatgtctgtaggtattttggaaaatatagtacagttttcacatttatacttattactgctatgaaaaaatttctgaagtctttccttgctgataagacatggacacagtcatgtagaaggatgacaggagagggctattgacagttgtggtttcttaattctataaagctttgaattgtaccaggtcaagtaatcagtgcttactacatcttatgaaagtaagtgatgctttagtatgaataagaagagtatcaaattttaaagaaggaagaagggaaggaagggaggaagcagtgagggaaggaaagaaaaggacaaagagagaaaggaagaaagaagaagagagaaaaggaggtaagtaaagaggggaagagaaagagaaggctagaaaattccatgttattgagaccaattttttcaatcttatttaaaaagtcataaaaatatgaagtataaaatgttaacatgggtccatagacgctccatctccaaaatcttactctcaccccctacccactcacccatgagcaccagtaatgttttttaagtcagttcctctgtatgaaattgagctttttggagacagaaacattttgctcagctctgtgccctcctagcatagtgtgagatcctgtccatagttgatattccataagtgtctgttgagtggggttatttcttcctcagtgaatggcttgtctcgtgacaactcaaatgaattggcaaattcaaacactgataaaacttgattgcagcctctgcattctatgtattagtacaatcttgatttgagaacatttagcaaaatttgcaaccactggtttctaaaatgtctgttccatgcatttggggagctcttttaatgatccatctacaattttagacagcgagacatgggatagatgggctgaacaaccccattttataatatattaaaattcaagtgaaataatatatgtgaaactattatccaaactgtagcacattatgttatagttacatattgttacacaatagtgggttaatactataaggattacattgttattgttattcttgttcatgaaattccatagtcattgatttgggttaagacattgtctccagaatgctcattaaatccccagccttggctccaagataatacccatccatccttcttctcgcaaaggttcatatgagaatcaaatatatgaaaagacatggaagtttgtttaattcctgagttatctgcaagtgtaggaataataacagggttcatatgagaatcaaatatatgaaaagacatggaagcttgtttaattcctgagttatctgcaagtgtagggataataacagttattgaagtccatgtgctagtcacttttgaagaaatttacactaatttaagtaactctctcagcagcccagccacacaactactatcttgattgcgtaggtaagaaactgaggcttacggagttgggatttgaacaaaggtaattggacttcagagcatgtattttaaccactattctacaatattacaagcccttgaagattctcttattaactagctgttccaagaaacttaacatacttcatgatatgtgcacagatttgcgtttaccaagcatctgagccgagtttctccagggatctgagagatgggtggccagcagagtcaaggtcccaaatcagcagacctgaagttacatttctgtagcaaaaaataagtgtatttatgctacaagggcaggggcaagggtcgacactcagctctctctccttggtgcccgaaggaagcttaactaaaacctacatgatcataagggcggaggagagtctctgaagtatcattattgacatgccctgggtgtgagaggtatgctatcaacacttaaacctgccttcctactcggtgtgacccacggaattaacatcatacagggtatggattgggcaaacaggcatttgttcgttaaaccctctcacaccagtgctctgggtgacctcctgaagctggaaaaagtacaattaggtgtattaattgtacgattaacaaattgtaagtgactttctgttactcgatattgttggagattgggttgtgtgtgctactcagtgttttggatcagcgagttgccttgtgcagggcacattctgatgtattatcgattactatagccttccctttcagcacacctttctcttctcctctctgactttctctgtgtcaggcacacccagctctctgactgcactagcccatctgagccctttgtaaagtcatccataagctgatatttattgagtgcctacgtgtgccaggcagtgttttgaaaccagagacaaagattaggtacctcttcttgggaagctcaagttaattcaaatgtgcttaatcggttctctcaggggaatatgcattcagagacatcaagtctgggtacacctgggaaagggtacggttggagggagctgttcctacagagatcttcatgtaccaacacagaggcaaccacctactttgcttaccctgaaaggtggtgttgctcccacactgagtaccaatatgaaagcatacaatacaggtacagttatttgttatgcaggctgtcttggaactagatgatgtttcaaatggcacttcccaaatctgccagagcctcttaccctcttacgcctgttatgatttctagaatgtgctgaaatgatccccaaacagcatctctggctaattgaatcctggctaacaaagagctgactaaagtgcatttatcaattgcttaagaattctttatacccaaatgtgaccttgtgttataactatctatcattggctttagaaagtggcagggtcatggatccataaaaagctgttaagaaaaaaccagaccacttggaaaggctgtcccagatctctccagaccagtatccaggggccagaacttctctgccccccatccagtccaacactgaattgcagaaccaccctgggtatgacccaggaagagacttcttagaaggctttcatcagatacctatctagaggcaaagtgcaggctagatgggtatgggcaagagaagagcagagacagcataactgtgaaatccacccccgacctgaccaccctacatagtaaccctgccagttggttcttgcctactcatcctaatgccacccaaagtctcttacccccagaacgctgatttattggttttgagttcgtgttagtagcttaaactgtctccttgatttctctgtatttgtttatttgttcgcttggttacttgctgtctcccacccctaccccgaaaaaacctatcagctctacacagccttaaagtgtagttgctaagttcctctccgtatcctcagtttccagaacagtgtgagctggcatatagtaggcgcttaataaatactcattgaaggagtgaatgaatggggaagcttattccaaggccctgaacatggacttctggcaagggagccttccaaacgctggcttgggcgatgctgctgggatcccagccaccagatctttaataagcctctgaccccttcccgagggtggaagggcgaaccgagcttggcccccacccactagccggacccagaaaatagaagtctaaacggcaaatgcatccagggctccaactctcccagcaacctccaaatgaggctgacggccttggacaggcgacggccttggacaggccccgcccggagcccctcggcggccgccccccgccctcccccgcagcctgcagttcccccgggcggcgtggacagccccggccggccagctgagcccgtgtgggcggcgcgggcaggagccgccccacacgcgtcccgcgacgcccgctccagatgcgccgctgcagggcccggccgccagccgagttggccgcgcgcgcccgggggagcgcagagtttggaaagtcttcgagaagcttcagaggagggaagggggtgggaagagtgggggtgcaagagagaaaaacccgcctcttgcgagttgagcgaggaagaggggggggaaggctccgagttccgcttcctgaacggcgggtggatagagaaggttggcacggggaagaccggcgggaggcgcgccccgggcccgcggcgcgattggcgtgaccggcgatggccggtgagcggacccgcaggttcacccggagcctgttgagacctgggcaggcggccgagctccggcacagcgccgcgtccgccgccgcggtggcagtcagcagccggcagcagcagcgggtgagtgcggcgcgtcctccgcgccttcccgcgcgccccaggcgcccggggggaacggagcccagcttccccaaaagctcggcgggcccaggtccccgcagctcacgggtcctctcctccgcactccctcccccgccgcctctgcgggctcccccggcgccacctcagcgaggcagcgccaccgacgcgtaaggaccgggggcgcgtttgtgcacgcgggacgctcagaggagcagctgcgtgggtagcagaagcgcagcgtgggagaggatgtgcaggggctttaatggggcgcgagggggccggaatgcaccgccagtcacactggtgctaagtgatacgagtgccagagaccccgggtggggtggggggatctacagaacagaacccctgagtccggaggtctgcgcgtccctctcaccctccagtaaacagaccagtgcgctgagagagagggatgcagtccgtggtcctcgccctggttagagctggggccccccgacgttaactatcgcagaaatagatgtacttggaacagccctcccaccgcagggtaaaaacccacaaaccacttaatactcctccagaaagggctgaggaacacaggctggaggagacgtgggtcattaggtctccagcggtttctgatatttttctaagatgtttcgcggggttctcccaccagcaatgctttactggttacttccttattgaaacggcttctaagtgctgggtgatttccgcgggaagtccctggggcagcagccagcatctgatgctaggatcctatccataccaacccagatgttcctgcgttgcagtaggtccacactgccggggagaggtggcaagagacaaatcaactctagtggaaacgggaagcgagtgggaacaacagcctcacagcaagaccggggctcagcagccgcgctcttggcctgcgtttggtggaccggaatccgggttgtgtgtttcattttcttttttgccagaaaatatcattaggaactaaacggctctttttaagagtgtgaaagtgttactcttgccagtcaccaatgaggagggcgccaaaagcttcccagagccagttcccacagccaggactattctctaaagccagaggtcggaaagttgaacagaacggaagcaaattgcctggcagagggaagaggcatcgggtgcccagggggtgtagagcgggcgggggtgattggagtgtgaaacgaattggtggccagggtgccttctcttgcacttacactagctgcagtccgcagttacccagaggtggttcaactgttagctcactctgtgccagggacagcatgtggtactgctatcagcgtgcacattttcaggacaccaaagacaaactgttcaaaagaacattagaagaaaagattcaattcgagtaaaagtagagataagaaaatctccacacagtagtagaaagtactttttacttttgaatgatcattcagaattgtggttttgtcattttctgccattcccttgacaaaaactttattttgcaattgactcattggactgaatctcactgaggatctgatggaaacacacagcgttcaattggaataaacagcttaaactgttgtgtgtttttttaaatgtagatcctcctagaatttttgtggcactagaatttctataaagattatgtatcccagatacccttctacaccacacacacacacacacacacacacacacacacgcactgctttctccaaaattatgtcagatttgaaatcctagggtatcttgtcaaaatgaataagctcgctgtctttaaaaagaggtgggggaggggagattcagtggcaaaggtggtcctgactccccttgcttcgcttcagcaccttggccaacactcctaaactagcttttgccaagacatttcatgggatcttacacatctaggcaggcagttttggctgctattttggcagcaagaacgcatgtgctttgcatactatcccatcagttaactcttgaagggaaacaggaaggtgatgagttctctgagctggcacctgaactcggtgggattctgtgggtgtagagcatcccttctgaacctaaaaccgtgtcattggactatgtggtagagactaatcttagcttacattgatgcaatcccttaagactcttcatatctgttgcttcaagttctcaaaacatggttgtcaagggagaaaaatgataggatgttggggaaaatattatggatatccgacttcagtacagactcatagaaccgcgggtgtgtattggagcaagccatcctctattgcaaggtatttgaaagagactagaaactcctgctgagaaaaagtatcttactgctagatttgtatattcccctttctgaaatccctgtcttggggacacaaatcctccaggacattgccaaaagattgccatagggtttgaattctgctctctccaataagtttaggtaaggttgtcaggttaacaagatagttttcttccctgagaatggggtgtgtatacagagagagagagagagagagagagaagacaggaagccttcaaaatgtgtttgaatatggagaggagagatcaaggagatgctgagtgagggtaatgactgggaaagccaaattttaaggcagttgttgaggacaatacaggtgtatcccaaagcaaatttgatgtcagtttttacccaaagcactgtatgtagtaggcttatgtacttgcagactcctagacacgaaccaccttattcttcacccctcccaagaacagtaatgaacaaaaacatacatttcaaaaggagaaatatttgctccttcattatcctaaaattccccatagaaaataaatgaaagacaactcattcgaagatcaattcaaaggatcaagtcaagttctcataatttcctgaaatctcattcctgattgtttcataaagcaagcttctctagggtagaatttcagcccgaaaatgattagaaacatttgtctcatatcagaactggagtgttttattacattggttgaatatacataccatgttggcttcaaagttgtaatgccactaattagaaattcctttttgataagaagctcatcttttaaaatgaatgaagtgtatctgtaccctagcatgaattagttcatttagatagctttctataattcattaagatatacatttaggatttgtgcacttttctgcatatatattgtatttgagagcatttcaaaagaaaagactttttaaaaaaagtataggtaaactttttgcaaacaccccatcagatctgtcactttgagagaaatggagttttatttatggaatgttttaggtgggttagtgcaatggaaggcttcagataaccagaaggatgagatctacatagagtcagatgatggaaaggaagcatttactagagatcaaataatcatttggtcagttttagcccaaagccgttcatctatttcctagactggagcttaccactttagttacatgcacttttaatgcctttatatttactctattattagacaaaaactcctttgcaactcctttttaattgtatctaattttgttattaactcattttaaagagaaagcatcctgccggaagtgattatacttaaccaggaggttttctcccttcctacccacccagaaagtgtaaggggtaaagaggggaaagtatttatttcagtaaattccatttcccttctttgatgtttcctaactcttcagacctccaataataccacttttgatattttagagagctttgagtaagaagcggaacctttgaccaaccaaagagctttgattgagaagtaatgaatatgtaaacatgtttacgtgagcgtgaggaattcctagaaggaagaattttctcccctctgaacttggtggcattcaagagttgagagtaggagggattttttttttttaattgagtgggggatactggaatttcccaaaagtcatatgctagatgcagaaagtgatagcaaatgaaagtgaagcacttgttttgctgtcgctatccagatttaaaagcaatatgcaatataagggcctggttgtttagcattcacagcacagtctttttattttgtttgtgttttttgctttgttttgttgtttgttgttctggacagagtcctttatgacaagggtgtttatggtttagcagaaatcacacggttatgttttcatatgaggaaagtcccttgacctctttgcctggagaagaagtcaacacaaacttagtttacaagatcaagtttgaatgttacttgtgtgtctgccaatgttttttatttctcaagggcattggagaaataactttgaaaatgaatagtaaccacaagtaggttctagaaaacttctagaaggatcaaaggctgaaagaatgagtcaacatgtataggttttggctttttctccacaaccagattctctaaggcctagcatagaaaaagaaagcaataatgaatgcattaaggtaaataatttgttaagaatgtacgatgtgcctggcacagtgtcaagcattctatttaattctcagagcaatcatttgaggaagttattattgttgcaaaatacagaggaggccagtgagactcatagggttaaacatgtttccctaagttaagtaactgatatgggacatcctctgcattttgaatagaaaactggaggggttaccttccagttttttagctgcttctaaaagcatcttcaaatcggtggatatgagtagctgacgttgattggtgttgccttttgatctatccaagatgcagttctacctaaggattaggaaaactgttcttcccactagtgcttcagagtacctgtgagaattcactccagtgttcccctgaggatagttgcaatagcagaggctgctccaggtacccttaattataatagatcttcccaaggcaactggaatttcaatagttaagtctttaaaatatgaactcactcagccatccccatcccacctgtattgcaaagtcttaagaaaattgtgaaagagcatgaggttaatcctcctgcagtctacttcaaaactgtctgcttctccattctcaattgcttaccccactctcacatgtgcctgaaattcctcaatgcattgtgtgtctgggagtatgtatttccatttaactgagttgtgttgggattcttttttcacattctatcttatttgaaggagggatcctaagtatcttacaaagatgcatgtgagatgacaacaacaaaatatagtaagggcagtgaaaagtaatattagccagaaaaaaaaaaacagtattaggaaagttagatgtaatcagatgtaagtcattgggaccagtaaataaaatacatcactattaagtcctatagctttgttaaaaatgcttcttggtgaccaagtcaaagaggaaaacaccatcagccatgagatttaagaagtccattagataaatgaaaacttgctctagacatattcagcattaacttatactgaaacttaagagacaagatatttttttcctggggtttttacaaatagtagcatggtgtgatagagtctcgtcattgagagtgttgtccaaggaccagcaacattagatcacatgggagctagctagaaatacagaatccaagggctcacaccagataatgcattttaataagatcccctagtgatttgcactaggacactaaaatttgagaaacatgaaaataacctacatctttagccacacttttgcagtatctttttagataaagtcaattgatgagggtccaatacaatgtggtttattctgcaactatttgaaagttttacttaaagcagacatgaggtttagaccacttagaaacgaaaatgggatttagttcattgttaaatggctttagggaaatctcttacttatttgtgttatattctctcctccatctaccatctagccccttaattgtagtgtgaacttaattttccaggttaagaaaaaattccataacagacttaaataattgctatctaaatcagcacaagttctcactctaggttgtacggtgagacttcataccctaaacatgtgtttcagagtgaggcgaatgttgctcctcctacagagaatttttaaatacaattacttcaactaatgaaagatgtgttatgaactaaacgtttgtgtccttccaagattaatatgtcgatgccttaaccccctatatgatgctgttaggaggtgaggcctttgggaggtaattaggggtagattcggtcatgagagtggacctcttatgataagattagtggctttaaaagaagaagaagagagagagagatcaccctctctctgtcatgtgaggacacaacaagaaggcggccaactacgagccagaaagagagctttcaccaggaacccaaccatgttagcaccatgatctcagacttcagcctccagaactgagaaaaataaatgtctgttgttaaagacacccagactatgttatgttattatggcagcccgcactgactaatacaacacacaattaacactgattctttggttattatggcagcccgcactgactaatacaacacacaattaacactgattcagtgttatatatatatatataatatatatatatatatatatatatatatataatatatatcatatcatataagatctatattgatatgatattgagtgaaacccttagggatttaaaaaaaatggtgatatcagaaaatccaactgctagaattagaaaatcatgaagatgtttttctctctcacagtcattgactcctagaaaaagtgatacctcttgaattcatgcttgaatgcggtaagaatgggcttccatagagttaaagatcttgacttccccatatgctataatgtggttcatgacctctttgatgggctgtccttcaccatcatcctgagatactctttccttgactatccatgttggagttccattatgcacttgtaacagtttggccacatgggattctaatgaatgggagttggtattggaaatgtcagagcctgtgagtctggagagcagaatttcaaacctggctctgtgacccttgatgaagtcccttctctctttgaagactcagtttcctgaactgtgaaattaggggattaggtgattgggctcttgaatttcccacttctttgtcccagagttctcacaacttctccttctcatccctcagattctcagatgtcaccttctcaggaaggtcatcctggattaccaagtggagggtgagagttcataccctaaagatgtgtttcagggtgaggtgaatgttactcctcctaccagagaatctcccaccaggctccccaccctcaacactctcaatctcattactaggcttagttgtcttcatagctcttactactatctaaagtgatctttttattgatttcatttcttgtttgtcttccaaccctcttgccttgtaatataagtgctattgaaaagcgagaacttgtctgtttcactacttttatagtatatttgctattgggaaataagaggggtggagtccctcttcttagtgcacattagttgcttaaggaaagtcagaagggtgggccgaatgtacattactgaaaggttatagtggaattataacttttaaatgtccaggttgttagcatctgataatgacagcccttgtgtcatcctcttcatagtctacttgtaaatcttggcaagcattggaaatgcaatcctgcagaaaggtattgggcatgtcctgtgtgccaagtactatacttgtgcaatctcttctaatcctcatagcaaccatatggcaaaatgttggtattctcattttatagatgaggaaagagatgcttagagatcaggaactttcttcagatcaaatgactcctcaatagtgaatccagagtcacaatcacatagtctgactccacagcctgttcctcctgactactctataactgcctcccagctccaccaggcaggaaggacctcattacacatgcagcttgcatccatcagcgaaagcagtgagagaaaagaaaccctcagagtactagttataggaagagtttctaaaaaagagtttcttgacaaaagaagagctgtggctacttttgctctgcttcagtctttcatttatgacatctcagcaacctgggatattgggagtgacaccaactttggacactgttgctcagacatttcccaaagacaggactggcacagagtgagttaagctttgcaaacaaaggctccttcaactgtgaaaggggcattatttgattcctctccttctatagaaatacatttctggcaagataagcatgaggttggggggcgcggttgggttgcaacattacatctgttacattgtctcttgtagtcttgattttggtgttcttgtttacaaataagaaggttgatggttctttatttttctccccgccattgaagtgagacttgtttgcttcttatctttcacagcagtgttagcaggctggaaataaatgcttgtgtttgctggactcaaaatgttgacctacatttaatgaggtagaaataataaaatttaatgaatgtgactgaattagtggcaatacagaaaaacacttgcctttgaaaacgttaatattttgcagttggattgaagcgaaaatgtctgcctcagagattagaagaattaacagtcgcagctgggcacagtggctcacacctgtaatcccagcactttgggagaccgagatgggaggatcacctgaggtcaggagttcgagaccagcctgaccaatatggcgaaaccccatctctactaaaattacaaaaattagccgggcgtggtggcgtgcacctgtagtcccagctgctcgggaggctgaggcaggagaattgcttgaacctgggaggcggaggtcgcagtgagctgagatcatgccactgcactccagcctggatgacagagtgagactctgtcaaaaaaaaaaataatagtaccaaatcattaaaagtttctttattttgggcaacttaaatgtgaaaatactgtatttctaattcaatttcagcatacctcctctgagacatgtagaatttgggaagctaggcagctctttaatgtaaattaaataccaaaatggcagagtttaacaacaggatctgaaaatctgaaaaggggtctatttgaaaagatgacaccatttaggattaacacaatgagatttttcttcatataattatcttagtaattaccaatttaaatgactaattgaggctgtcaaaatgaccagtgactctttggcctttcaaattaaacattctataaaaagaacccagacatgaacatttgacttggcaaacaagcaaacaaaaaacttaacaaaatttactgttcaatgaaatatgataattaaattattctcaaatactcattgtttgattagctcttaaatgtccctttgtcacagctctttagaatgacaaatggaaattgattgtagctgagtaatcttcacaaaaatgaaagtgatgttggaactcaacttttttgaagatactgcaaatgtggagaactaatatttaaagacatttattttttgttttttatgttgtttaaaaattggacacattcaaaggaagttttattctgaagtgaaaaaaatgtattttaagttttctttgaagcatatctttatggtgggctataaatttgtcctacatgagaaactactagtaataaagtttgttggcataccaacatgcagagataagatgccttcagaacctttctgagtgctaacagggaaagttcattcattaacttccatttttgaagtcagaagccattatatggcttctgtccaatcaatttgaaaaatgtatctttttatcattaggaagcagtggtttccaggcagtataaccttggccaagtctttaagcttctttgagtttcagtgttcttgtctttaaaacaagagagttggacaccaagaccttcaagaatgctttagtcctaaaaatctggggagatcttatccttttaaaggggttttcatagagaattaaaataaaacttattttcatcttaataagatgattattgattaagatatctgattttagcacctggaagacttgatcccaatgatctatgaccacatttgtatttcacctgtgaagatggtagcataaaacgtggttatttaagaatgcaatgaagggaatggctgttcacacatcctgaggacagggctagtggaatggagactggcaaaagacagccagtggtggcaaaggctgggcaagtcaggttcttctgaccttatcgagcctcagaggcaagcatacaatcccatttccttctttcttaccctgaagagaagggtaagccccatctgctttaagaaagcatgctttccagttcccatgctgaatgtttgtagttgcagtctctggcttaaggtctgtgccaggccgtgtcagcacccacatgagcagaacatacatgagcagaagtttgaactgtgctaccagatcctatcccccttgcctttgaaaaagcagcaggaacctctcgttttctagttctgtgtctgtccctggcttttgtctctgcttctatcacctccttctccctgctcacacctgggaaaggtaatatgatctgtcctggacccagtgtgatttcagagggtctcaagactacagattcgtccttcggccctgtgcccacattgtcctcctagcaactgataccaaggtataggccattttattccacagttcgtcatcaaccttaaatgcacaaggcggcatggtgaggactttatttcactccacagtgtaagtccatttctgaacagatgtatcttgggaagatccctgacccattaggataatacaatatggagatgggaggctgatgtgctagagataacctttcaccacttccctggcagccagtctgatctctggtagagctatccacagtccaaatgatatttgtctctgttgccagtcctggaggaggaggaagaggtgtggttttgcccttacacttctgatactctgagagaccttcaagaccaagactgtggttatagtctccatatttccagggcagcaagatgattggcacatagtaggtgcttactaaatgcttgccaaatggaaaagagaatgtcatacttagagatgacaggagtatagattaggcatgcaaaaggaaatccaagggcctggtttgcagtaaagaaattctgaggcacgttccagaggacagatgttggcgacaaagcaccagcatataatatttgtacaatattatacaaattgtacaaattgtataatatttacaactttatacaatacattgtataaaatttttattgttaaatatttacaacacaaatattatagcaaattgaattgaagtaaactgagcagaatttaattcaagattcccacaaaggctattcaaagattaaaaagaaacaaaacaaaatcttgattggcatgcatttatattcttaaataagattcagctaagcaggtgtgatcaccaatccaacaccagcccctgtcctcgtgggcgcctgggtagcacacgcaggcctcactgcctagccagagatgttagtgccattctcactgatgctgttagcagtcacaaggtggaggccaccccgagcagggtgcagaaaaatgattgattaaagtccaaggagtgtgagccacagggttttgaaagcagtctgtttccagtcacatgatggagagcggtttatgtttttttaaaaaacccttactaaatcaccagagttgtgtgattttatcagtttatgtgaatgctattttcgcccttaaaaattctcctttcgttgaggttaggatgttagagagttttcatgacacggctttagagcattgtaatgactctgctctgttttttaaagttctggcattcatgtaatggtttcctttccttttacagctgtattttctttttctttcttttttttttttttttttaaagacagagtctcactctgttgcccaggctggagtgcagtggtgtgatctcggctcactgcaacttctgcctcctgggctccagtgattcttctgcctcagcctcccaagtagctgggactacaggtgtgtgccaccacacctggttaatttttttgtatttttaatattgatggggtttcgccatgttgaccaggctggtctcaaactcccgacctcaagtgatccacccgcctcagcctcccaaagtgctgggattacaggtgtgagccacctctcctggccttacatctgtattttctaagcttttgtgagttttattacaataatagttcaaaatatagaaaataatgaagaaaaaactagtaatcacccacattcctaccacctgctggtaacaacttttgctatatttatttgaagcatttgtctcttcacaaaaacatgctttgacacacttttgagctaatgttgaatatttacatttttaatttgtctgaagtgatttaaggtatattctgtcctaaaaattctttctgctggcatttctgtataccaactccacatgaaatatatattgttaattaaaaaagaaaaactgtgctacatttcttgagattgtacagtcataaacatttagacctgaaagaaaatctagtctaaaatagataaagaggccgggcatggtggctcatgcctgtaatcccagcactatgggaggccgaggcaggtggattacttgaggccaggagtttgagaccagcctggccaacatgacaaaaccctgtctctactaaaaatacaaaagttagccaactgtggtggtacacacctgaaactccagctactcaggaagctgagggaggaaaatcatttgaacctgggaggcagagtttgcagtgagccgagattgtgccactgcaccccagcctgggcaacagggcaagattccatctcaaaataaataaataaataaataaaataaaatagaaggaaactgagtcacaaggaggtttaaatggatgtggtcagggtcacagagcaatgccacgggaggactcaaacccagggtattttctccttcagcccagtgcaccatctgtaatacacgtaatttcatatcataagatggaaatctagaatatatttccatggggctgtccagtaaaagtgaatgagccttaaacccaatagagcactacctttaaagatgtttaaatagtacacattcgcttaacctgggcacacacgcctggtttacttcttgaatatgtgatgtctgtgacacctgttgtttgctgagactctgtccaggtgtttcaaaaatgtgacctatgcttggcagccagttaaaaatgtgttcctctagttcatgagcacagggaaaggcccacttgtgcccctgggcctgagctgttttcgtaagctgacattatgccaaaagtctagtgatcagaattactgcatgtgctgtctcagtgccctcaatgatcagaatttgactgggtctgggctgctgtgactttgcagagatacaaaggatcttaataggtttctgttgctgcaataacagactatataaacttagcgcttaaacagcatctgtgtattatcctaccgtagtgtaggtgagaagtctggtgagggtctcaccaggctaaaatcaaggtatcagcaaggctgtgaccctttgtggagctctagaggaaaatttgtctcatgcttacttgggctgttggcagaattcagttccttgagactgtagggccgaggtccccattttcttgctggatacaaactgaggtctattgccagcttctagaggcccccacattgcttaaacctggcctccttccttcatcttcaaagccagtggtggtggctcaagttcttcacatgttgcacccctcggacccacgcttctgctttcctctcccactgaaggactggtgattggattgggccacctagataatccaggacaatctcccatctgcaggtcttccatcttaatcatatttgcaaagtccccttttccatggaaatgagtatatttataggttctgtggattagggtgtggacatctttgtggggcctattataaaaatgctcagaaagtgcattaaaagattaaaaggactaactcttcccgaggcactgctttctgatcctaaaacaaagcggaaggaactatcttttatagaataccagagacagttcttaaatctaaccctctgcttatgtggctttgattaagttaatagaccttagcttttatccttgtaaaattagtagacacaaaattcttatgaggattgtgttagtctgttctcccactgctataaagaaatacctgagactgggtactttgtaaagaaaagaggtttaattggctcacatacagttccacaggctatacaggaagcatggtggcatctgcttctggggagacctcggggagcttttaatcatggaggaaggcaaaggggaagtggggcgtcttacatggcaggagcaggagaaggagagagagggagggggcactacacacttttaaacaaccatatccctgtgagactcactatcatgaccacagtaccagggcggatggtgttaaaccatgagaaaccgatcccatgatgcaatcacttcccacgaggccccacctccaacactgggggttacaatttgatatgagaattgggtggggacatagatccaaaccatctcaaggatcaagtgataacatgcttcagagttttgaagctacatccgtgttcattattacagtggtcatcgggccaaggagagtgctgtccagttgcctctgtgctcctgtgcctgggcgtgaacatctcagaatgatctcactgtgattcagtagaccctagactgtcacgaaaggtgactagtggggcctggtctgggtgtgcaggcgaggtctgtgtagggctttgtctctgaccaggcctcatcattttgtttaggtgagaatacatttcatccatgacggatctcagacctacaaggctctgtacttctttctccatatattccctagtactgtgtactgaggagcctgtgggaagaaccacgtgctctatgtacggggcctgacaagctgactataagttgtgtatggggactcaatcatcactactctgaaagatagtctgaaccatttaacacaggcatttgattcaaaaagacatctttgattcatcaataaacagagattcactatatatctggtcacagaagagtggatcaagtattattcaatatattttcaatccatggaacaatttgaggaaaaatgggcttttaatgttaggatgtaccagggatctaatcttagacccccttctctctgccttccccacaaaaccccccctaggtgatttcaccctttcacacatctctgagctctgcccattgatatctctgtcctgaagttcctcaattacttcaaactcaacaggatccagatctaacacagtttcttgcttcataaatctgcttttcttatttcctgagttgtatacctcagtggatccaggaaatctcaaactaaaaccatgctcaattatttccacccctggccactccacatcagttcatgctccaagtactggcaaggctacctcctaaatatttcagacagctccctgaccttagtgatttatgtaagtcactcagtatttcttccccagacagtgttttgcaatgtccttgtggtttccttccagccttctcactagttgtcttcctgtctctccccaggcaactatccaccctccattctgcctgcatcttgtgaacacacagctttgatcatgatatagccctgccagaatgctgctaatgttcttgattattgccctcagaggattacatctcacttggtttcagcctacctttctggcatctagcttcactttctagtattctctttcctccaacctttgccacacttcagccactcaagcttctgggcattacccaaggatgccactcaggcccgtgccaccagctacccagaggacacttccttttttctcttcttgttcggctcctgcttgcctttcaagacccaactaatttgcccctcttctgttaccctcttctgagtccacaggcagacttagtctcttcctcttctgtatttccataacacttcttgaataccttaattaatttttattgtaattatttagttattatctcattgcttccagacagagagttttataatagcttcataaatgattcttggttagatggatggatagatgtatatgcatatgtatggtttttaaaaaatgttctaaccataacttgtcaattttgaaagggtaatgcattgcaaatattgtagtaaaaggggagcagtatggcattatcctcctttttttttaactgaagggctttgaatattacctagccttggaaacaagagcccaggcatttcggtccaatgcttctgagaaaatgtaacaggttcagggactttttaaaactaaccattttaattattgcctttcatgaaatgtgattgtgaggaaaattgcattctaggcccatgatttctttattttttaaaatgcacaacctatcatttctcattggaatttttagctgttgaacatttctaccatttctaaatatttttttctagttgtggtgagtcatattagattgtgcattagattttttctgaattatccagtttgctgagggaaatatggagacatattaaaatgtcccattgctagcatggaacaccttggatctaggagtttcgaactccagtgtcctcttactgcctgggtcaaaggcccagggaccaccttcaagtaccccttatgcaacatcttcctttaagccacagccctttaatttggtctttctcctgcctacaggactccttcacgattcttactcagaattcttctcactcgatatctcctcaagaatccttccctgatctccaccaaagcccagagagcttgcattgcactgggcacctgcttaatgtggcaaatacttgttttctactttttctataaatgagttcctagaacgtttatttactccttaaagaatacaaataaaattaattttatgaaatacacatgaccaatacctttgcagacctccgtcagcttctccctttcccaagttcatcccttccctgtggtaaccatgaatcaaaatgtttttttgatttttttttctttttcttttttttctttttgaaacagagtttcattggttgctcacagtggagcacagtagcgtgatctcagctcatgcaacctccacctccctggttaaagcaattcttgtgcctcagcctcctgagtagctgggattacaggcatgtgccactatgcccggctaaatttttttttttttgtatttttagtagaaatggggttttgccatgttggccaggctggtctcaaactcctggcatccgcccacctcggcctcccaaagtgctgggattataggcatgagccaccatgcctggccatgaatcaaaatgtgctcaatgtttgcctgattttcttttcttattttgaaaagcattcatatttgtaaaacaattgtaaaatacagtacaaagaatatcatatacccttccttcagatcccccaaatgttaacattttgccatacttaaaatttaaaaattattcattctctctctacacatacaaagaatactatttctttttaaacatctgtgaataaattttagacatgatgcccctttacttcaaaatatatttcctaaaagaaattctcttacacaactataatataatgaccaagatcaagaaatcagtattgataagattatgtaatccataaatgttactaagattttgacaattaacccactattgtttttttctggtccagaatccaaggattccatttcatttagatgtgctatctcttaagttttctttaatcaagaatagattatctgtctttcttgacctcgaaatgttgaaaaatacaggtcagttgctttgtagagtggacctcagtttacatcctcatggttggatttaagctgtcgtatttttggtgggaatgtcacagaagaaatagggtgtccttagtacatcggatcaggagggacatgtcagtttgtcccgttattggtcacttagttaagaaagtgtctgcagattgctcctctgtaaagttactaggttcccttctgtaactagtgattaacttgtgggagatcttctgagattcccccgctgctttttatacctttgctattaatgttagcatctagtgatgatactttcttgaaacagttattactgtggatgggcatttaggttgttttcatatcatttagtttttggtttttgctgttatcaatgatgcttctgagaacagccttttccccatctcttggtgtgcaggtgcatggacttttctaggggagccctgcttcaactttagaaatactgccagcttgttttgcagagactataccactttccactctcataagcagtatgaaagattttcctttctaccacatccttgacagtaaacttgtcagactttttgatttttgccagtttggtggtattattggtattaaatcacttttcaaatttgcatttccctataagcaaagaaagtagagcatcgttttatatgtttattggccactttttttccccatctgacaattttgtgtatacttgggagatttgcattcatattgcaaatgtgtcaaaaatgaatgagagagttattagaagttgttttgggctgggcgcagtggctcacacctgtaatcccagcaatttgggaggccaagatgggcagatcacctgaagtcaggagttcaagaccagcctggccaacatggagaaaccccgtctccactaaaaacacaaaaatcagccaggcgtggtggtgggcgcctgtaattccagctactcgggaggctgaggcaggagaatcgcttgaacctgggaggcagaggttgcggtgagccaagatagtgccattgcactccagcctggacaacaagagcgaaactccgtctcaaaaaaaaaaaagttgtcttgtaggaggaaatttgtttaatttatttaagttgcattttaaagtttcatgagcatctcctccaaactatgttggtaattaggaacagtatctttccatcatcaaatttatgggcttcattacttactacataaatgtcccatacaaagttctcataatgagattcacaacaataaacacaaacagatgtctgcatttaagaaaattccatgtataccaacttttacccaaatctagggacaaaagagctatttaggccacacagtttcctggccccaggcatttgttgtgcatatgttgttttgtttaaatcaaactgagttatacagtgcattctatttgacttgtattgaacaccctgcctgaaagacagatagtaatttcacagtatcagaatttttccagggacaaattctggtggtagtagatagtgtttatgttagaaggtttttgttcttgttgactttaagtttagattaacagttaagttctacacgtgtgtgaaaatgtgtggttaggagagtgatggagaaggaagatttgtttttactgtcacagagttgctatgggtaaggtttgtgacttggagccagttgtggagcccgactgtattgattttggctggcaaaactaaaccttcagggaataggtgaaagggcacctgcggaagtggaacaggcagctcagtttgatccaataagggaaactggcacacagtggttgagtaacttgctcaagatcacacaattttaaatggtagatgtaagacaagattacacaattttaaatggtaggtctaagacaagattacacagttttaaacggtagatctaggattccagctccagagcccacactcttacctgctatattgtaagctactgtgtgtttgtgtgtgtatgtatgcatgaatattagaatattgtgcattttagggcacaatggggaaaacacataattaagaaaattgaatataatgttattgaatacagaatccaacttgacttatgttcttttgccacctactaaatagaaaagcaatttctccagaagtccattataaataacttattgaagtgaaaatatttatcaccttacagaacaacttaaattctttaatgtatgggtcccatcttagttatatggtgaaatttaaactgccaagtgcctccccaaaaaactgtgctggcttaattacactgatatgatgatttacctctaggcattttcttaacaatactgaagaatgccaacactcaaattgttatgtcttggagaagagacagaggagaaattaaaggagcaaacagaacaacaacaacaaaaacctgcgactcttctagcttttgtcccaactgcattaggatatcaaagtacaaatccaaaagggctaaaaaccactaatatgtgtgatcgttacaggaacctgctgcaagtactcaatgtacaaggttccccacaaaataaaacaaagctccagccttggaggggacagggttttcatggacaaatccttgaatttctctttttcccacatttctctcacttccttaatgacatatttttagcaaataaaaattaggttaaaataaacactaagggcagttttgaagggggacataatcataaatgggcctcctgggtgggtagaaccatagactgggctgtggaggcagaggtgactgctaagcttcagtgaaaatgacagagttgtgaactgattattttcccactgtttaaccaaccgtctgttacctgccaggttctctgatggacacccaatatactgggttctgtttgttttttgtttgtttgttatgtaattgaaccgattatttactgaaatgtccttgggacatgggctcaatttattatataatgcacatggaaatgtggttttggataagggaaacacactggtaagtgacatactgttaaacagggcagcgatggtccctctcacattggttgttctgcaggaggcaaagctctccagctcctcctgcctttagcaaactcccttgattgttgtcaactggcccccaaagtgtagctcctgaaaccaaatgctgatttgttatatctttgcagatgttctcaaaaccaatgtatataaacaatatcctatgtcacatatgcactctatcacatttatgaattttctttcacacaaatgcaagaagtaagagagggcatgtgtgtgtgtgtgtgaaacccaacatccttgggaatctaaaccagttccatttttcttactaagaggacatgctctagtgtgtgtagaaattggatttctgaaggtgaagattgttctaactggtggcaagtgttgtttcattcttcttgtgttgagttgcttgcaacgcatttttagaaaattgcatcatctcatgattgccattaaattgacaaactgtcccttagaatcttaaaatagctacctctattcagagggaagaaattttttagaatacgtcatagcaatcaatgtcacttttgttctcacaaataataatgtatgatttttttagagaacaatcataatacacaaaatatagggaagagttgctcttcaaatatatgttgctaggttaagtttggcagaaaacagactctttgcttcatggttagctcattattcctctactgcttcaccagtgtgttcaccacattttatgctagtctttgctgtgactcatctattctgctctatagactatattgacagcagatgaacattaatatgtgtattattctccacaaaatgtcaaggacatacagttataataggtacgatgccctttagaaaatgttatctatataacatttatatatatatatactttaatatcaatttcaagactattcacttatgaaccattactaatgtgagtgttctagatgggaaagaaaactaacattaaactcttggcagtttcaagttatgaaaactcatagaggaaagtgttctgtctacaaagacaaataggtatatgttgggatgtatctctgactccaagctagattcatcaggaattaacactcaggaacaacatatagatcacaaatatgtttgcaatttacacccatgtattaaggggttcagcttgttggttcagctttgtcaattggtcacatagcttgacagaaagcatgggaatttgccttacttctacttaaattttggcgtctgatttttaacttaagaatcatgaaatcagtagaccatgctttgtataatgagaaccgaacattaaaaactcccaatctttttgttcaccctcacattccagtctgataccaaagccagagtgaagggcagtgtttgcaaaggagcttccagtgaagacggaataaaccctctgcttcagaatgaaagatttgccatcagagaaatgaggagcagaccactgcattttagagaaaatagtaggcattgagcagcgggaaccagatggaagccaggaaggagtagatgccaggagcaccagaaatgggtagaaagaagaaaaccaggcaggagcataggacaccaaagtggggttggcttgaggatttgtatcttagccaggaaaaaaaaaaaaaaaaagattaaaccacactctcttgagctttgaagttgccaatcctcaaattcacagttgtctactttttagttaaccatgagagtctgtttcagatcttggaaacccagaccatgtatttagttggggagtgtggtatttctccatatctgttcaggaaacgaacacatcatgtggtcagggtgacagcctttactcattcaagatcccacacaggatagcgggggtcctgaagatgtggggggctacgcacagagaacctgaggaccaaatgctagatgattggtctccactgcgacccaacccatgaggctgttttctgccttacacaattgctgaagagtttgtaacaattcaaaaagaaaggtttagaaaatgtgcagccattcaaaaagattgttgctagttggtaacagggctatatagttctaggcctttccaagatgtcatgtaaaaaaaatctatatatgtatacatacacatattatatatacacatatatacatatatacacatatataactatatacacatatataacgatatacatatgtatatacacatatataatgatatacatatgtatatacacatatataacgatatacatatgtatatacacatacatatatgcatatatatctgtatatatatttacatgacatcttaggtgtatatatgtacatatacacatatatgtgtatgtgtatatatatatatatttacatgaaatcttggaaaggcctaggaacctctccaccttatatattatatatatataatattacgtatatattatatatatatgtttacatggtatcttataaaggcctagaacctctccacctttatctgcaacttgttgccttctgtgaaatcaactgaatgttctgtcctaggaagagagcaatagttaggatgcgatgcacgttacgcatatcactcggcccctatttcagtcctgcaaggaatggcagctcattccatacctacccctgggttagcgtttctcccttcaaactgttaagaaatagaaaggaaccatttagtcccatagttggtacaatacacagagtagaatacaggagactacagacatggttgataataaagcttatttttaaaaaagtttcttgatgtactgtactataaaaatgtatgaatactgcattcgcaaagtgagtcgtcacattggtataatattccttaatgccctttttgttattgaaaattcagtcaagcaggagttgtgggacacctagggggccgttctgccattactgtgaattcatgtttttccaggagagttactgatttggagaggcagggaatgggggctggcaaccagacagtggcctctgtttctctgttggcagggataatgaagaacagatgaaattataaatagaattatagcccagaccaggattacttggataactcagtcaacacaaggttttgtttgattgaattttctagatgatttcatcaatgattaacctaactacgttagtggagatctaaaaggacagccagcttaaacatattcagcaaggccagcatttcctttttgcttttttttttttttttttggaacagtaggcatatcttcagttattggcttctttggctagacagttctatccacattttttttttgacaaagcagaaaaaattactaagggattcagttaaaaaatctacaagaaaatgggcaagctggagaagcatgtatgttgaaaaattatcttagatgctttacccaaatggcataccaggtcaaactgctgaatcaaccaatcaatcagtcagtctctcttggtctctttcaggcttgctcttgctctctctctctctctctctctctctctctcaatctctgtctctctctttctctctttgcctttctctagtgtgtcaattttatttctatttctctccttataatgtgtaattctttacatgaacagtgggatgtgctcctgcctctaagctgtcttcaaaaataaaaattggtgggttaattccatccctagttgatctttggacttacgctggtaatacataactttgacctgaagctgtacgagatgaccttcttcactcttgctatttcctaaaaataaaagtactgaataatagatcaaattagatcagattaggaaatcctctcaaaagttttttttttttttttggtttaattttattcagtttcatcttgagtttacaacacttaaaaatataagaggcttgagtttacaacacttaaaaatataagaggcggccgggcgcagtggctcatgcctgtaatcccagcactttgggaggccaaagcgggtggatcacctgaggtcaggagtttgagaccagcctggccaacatggcgaaaccccgtacctactaaaaatacaaaatacaaataaaaattcaaaaattagccaggcatggtggtgcccacctatagtcacagctactcgggaggccaaggcaagagaatcgcttgaacacgggaggcggaggttgcagtgagccgaaatttcaccactgcactccagcctgagtgacagagtgagaccctgtctcaaaaaaaaaattatgtctatatatatacacatatacctatgtgcacatagatatatgtatctatgtgcacatagatatatgtatctatgtgcacatagatatatgtatctatgtgcacatagatatatgtatctatgtgcacatagatatatgtatctatgtgcatatagatatatgtatctatgtgcatatagatatatacatatatatgtatacacatatataagaggaattgctatttgagaaagaatgtgcacatagataatatcacctccagatttttaataagatacttgccttcttactcatataagaacatcataatatttcctttttgtcaaaaacttttaaacaaataccaattacaatacattattaaaagtgacacttgttttgaacataaaatctaaattttctatatgatataaaaggtcagataaaaacagaaacttttgacatctaagccaactgttttatttgtcatttctctttacatatgtgatatgaataaggtcattgtaagacatttacaaagcaaatgaaatgctagtgacaaacctgctcaccagacctgttaaagctacctgactctagatgaagtggccataatagagcagcacattaacagaaataggaaatagtacataaacaatttgtgaagaattttagcacatgctatcccatttaggcctagcaaaaactctgtgatgggggaaactgaagcttagagagtttgaatgaaatttccagctaaaatggtcttattttagctgatttttttaaaggtagtaacattttattttatttagttgacattttgacattccccctctaactttaatacccttaccaaatgtaaaggtaaatacaatctttaaaaagaaattagaaagaaatacaatgcctataatcaggacacacatctcatgtactagaaatgaaacggcaacacaaagccataaggagcactgaagaaagaaatagcgcgtctagaagcagactggggtattgattgcaatggagctccactgctcttgaaaaggcctgaaaaaagttctgccccattcccaagagcctcgtttctaaaacacagcctctcagccatggccgagctgcctgctggcctgggtttcaggtatttcctatcagtatgtgatgggcccgcctggttggtggagagtggggaggcacagactccaactccagattagtctacagtctaaaaccccagaacatatgaggaaaacatatgctaaggaaagtacccagtcagatcaacgttccaaagatgaacttggtcctgattacatggaaataataaagcaatctggaaaaggcttctttaaaagcatggtgaaatcctgccatcttagaacgtagtgctctcataaaagttcagtcacctaaactgcaaagttgctttattctaagagtaatgaaatttattttgactatcttccagcttctgtggaaagaatacaaggaaaagtgttttttatgtttatactttcatgtattggctatattagtaagttaaaaaaaaacagactgctattacaaactttgtaacatgcactaaattcacaaaatcttaaatgaccataaagtggtcacttccaaactgcacccccatcctcctgttcccaggagcgaaaagaattttattcagccttcagatgagaacaggcagatgatagaggtcagtcaccaattacattataaccacattcaaatatttgggacctcccataacatagtttattttagatttttcaagaggtaaagaatgaattagtgtccataaaaatattaacaaaaaagaacacagagatatttttaacgaccaattagaaatcatgcaaatgaaaattagatcccctgaaattaaggaataaccttcacactggacctggtttatgagagaactaatgtattaaaaatggtactgaattcacacagaacaaagttcagagaaattaggagattaaaagtaagaaaaagaaaaatatataaatttagccatattaaaactaagcggagaaataaatattgagcttctaaacttgcagaagagaaaagcaaagaatttaaaacatattattccaatcaaacacatatggggaaaaaaaagacacaaataaaaggcatgattagtagacatttcaaactaaaattttagagattaatctaattatatcaataattaatcacaataaatgtaagatgactaatctcatccaatacaaagcagtgggtattcttatactgatattatcatatcttagtatattatagcaccttttattttaaattctctatttttataaggaaatttccttctacttcattagaacttttcagcaactaagctttctctcaacacagaaacacccaaaatcctatttcaaaaatttttcattgtctccaaaggatatataaaaaaccttttagtttaccatggtacccagtaactctagaaaacagatgatatcatcaaaaattcccagaggcaaaatgtggctttaaaaatccacattgatttggggacttttgattgagctaaaggcattttgtttctgatgagtttttaacctgtatttcttaaaaaaaaaaaaaaaaaaaaaaaaaaaatatatatattcagacttctggggattttttgaatacatttttgaatttctaaatcatggctgtggtctaagtagcagtttactaaaggacacaggaaagagatagaataaaaatatgaaaggctcttaaatgcttggaaagccctatatttcttgagttacttatctactttttgtcacttactattgcctccttctctctctgtcactcacacacacacacacgcacaccccagagcccatgatggattttctgtgtcaattctatgacactgccaatagccttgcagagctggtggttgaactgaagagaaccaaaaggaattgtaaatacctgtttcaaaaactggcagtaagcactgcacatgtaggatgccttcactcaagcctgttcttaagtaaagtcaagtgcagatagagtacattgccccacactgagcacaggaagccctgagaggttattatctagggaatgcgagaatctaggttggttggttgattaacatgcctcagctctccacttcactttggttggagtgatctgacctacatcatttcattcacttcagaatcatgaactttctgctcatgatcttagcagttaagagaaacaccagttaataaatgggatttaactaaacttgtggagccatttctgagacatagtactttcggatactgtgaaccttgacgtacatttcacagctgcacacttaactatacaagcaccagtggatatacttttgagtgatcagggacctttatagtcaggagattttgatgatgcttgtcatccaataggtaagtgattactttcctatagggtactgaaaattttatatactaactggcagtaaaagggaatgtggtttgattttaacaaagaaatgatttgtgcaatctccctgatgtgaactaactcaaaggactaatcaggactcactgattaatctgactcaagattaatctgcagactaaagttccaggaaatatgaggaaaatgaatactaagaaaagtacccagttaaattaatgttcaaaagaggaatttggtcctgattacagggaaataacaaagcactctggaaaagacttctttaaaagtatagtaacaccctgccatcatagcgaagtggtaatctaatagaagctcaattatttaatacataagctaaaactaaatgttttaatatggaactaaggcttatgaatattagcctctgtggcattaaacaactaataggaccttcctgggctttaattttcttttttgtacaaatgggaataaaaatcatacctattttatagtttttgtaaacattagtttgtttaaacagcaagtaatgtttaggattgtatctattatacaacataattgttaaccattattattattatgagttatgtgcatcaaatgagataaatgctttgcaacttgtaaatgccttgctaactctagggagctatatgttaataatctcttttggactatctgatggagaagccaatttctattggcactacaattttttaaaagctggttataaaactgaaaaagcaagcactatacaagtatattaaagaatttgggaattgtcttcatcctattttgaaagtaaagtagaggcggatggaatttagtacaaaattattactgaaataaaatgaacttggaagcatgctctggatgattgatgtattgtccctaattgacatgcatgcctgcaaatgctttttaaacctccttatttaacaaagaggtaattcagggtacgttcagcttttggttcgtgtgaaaggagcatatgcgattactgttcatttcagtctggtccagagcagaggttaaaacctctgagcaaagagccgttaagctaccaactcagtggaactgatggcaagtctaagtgtctgggcctcaagtttcccttagcatagccagaggaaatattttcaccctgcttatggatttcaaattctgaatgagtggggcctcattctgagaaatctggagacatgatatgcataatactgaattattattgataataataatattgggcaaagccattttcaagtcctactctctgctgaatgaatttagaaggcttatttttcttcttcccgacagtacatgtgagctcgtttttaattcagttgcgtatgtgcattgagcttgccctgatgatgttctcgttggggcatgtcccacagagcagctcaggtcgttttgactctgggtacttctgcttacgctgtagctaagggcagctagaccgttcttgcagagcctaacattttgggtgccattttataatgcctgtggcaatttgcatattgacgtggcctccctgctggaagccagatgtccctgcaagccccaacgtcttcctttcattcaactgcacccaactctggacttgacttggttgattttctttgctaaagttcagagtctttactgtttaaaaatcaggattaaatagatgcatttcagtttcgaaggtattatttgcagtaaaactgccaacataaacattttataagaaagccatgtatgtcctgaagtcataactgcaggcctctctttaccttcacattggctggtggcattgatgtcaatattcaacactctaagagttaatttaatttgaatttcatttcttctttaaagtaacttgatcttgcaacctcttttctctctggctacggaaagagtcactttaggaagctgaaacttccagcatgaatacttctagcaggtttatttgtgtggcaaatatatgcttctatctcattttttctttgtacctgtgacttatctacctacctaaaaagccgtaagtcctttctggcaactactgcgacattgcctctttttcctttttgtaatcatcttcattggcgtgaaatcttctttgaactgatcatttggcaacacttgcttgctgtgaaagaactttgactatatacatatgctatgatagatatcatatcaatattttccatcactacttttgctttgtcagaaaactcatgacttgttgtgagtcagaatgtgtcacagccaagctgtcttccaaaccttgaaatattttactatattttcccttcgaagtatttgactcatcagctgagaagatatcaggccttttacctacgtttggtttgatttagaaccatgaagatgatgggatcagtatgtccttgctgtgccgtttagcttcttagctgacccatttgatagaggctgaatgcttccttggaaaagttttgcaggatttatcttgtttctcattctgcattagttgatgtctgtctttgaaaaaaaattttgatttgcttttctgtatttctttttcaacttttaatctatattcccaactctaattcattctgtaataatgttaacccccaaaattgtatgaactgtcttatttgaatcaaaagatgaagtgcctgaactgatcttacgttccctttcccagtgtcccttccctttctcaaagtctgctcttctaaaagaaactgatgtcagctagggtaccagtgactgataccttggaggcattttatctaagatacacacaaagcaaatgcctctaaggtatcagtttaccaggccaggagacagaattttatattgtcctctaggttgtctaggggacaatataagattctgtcccctggcctggcaaattaattgcattcacctccccagttcttcatacttctctctatccaggccctttgggggtgccctcccacactgagtttaggcttcttgttaaaatttgctttggcccatgagacactaataaactaaacacagcaaggcttaaaaggttcttgactgcctcttcttcctctcttgatcctctgccattgccataggaaaatgcctggcttggttgctggcagatgagatttaaggaaaagagctgaatctacctggttattctagccaaggccccacacgccctcagaactgcctagtggacctgcagctgactgcagatgcatgagtaaagccccagccaatgccagaagaactgcccagacaacctataggctccttagccacacgaaaaaatggctgcatttttttctatgcccctgagtgtttggggcagtttgttactcagttaacgattaaccagtacaactcttaaagaaatctaatccctcaactatgcaggagggcaacacaaagactcttgttagtctctctgatcacatccacatcagcctgcatgacttgaccatatcattaaataaagagtaggactccagcgtactattgagtcaaaatgaacatctataaacaagtctttccagtggccagtttcagttcattgctttggagagttttctctttgtaagcaaactctgaatacagttttcatgtttttgttgttgttttcttttttcttcctttttttttttttttgccttagggcttgcctttgtcattgttcccttcaactgcatttctgcatttcttctctgcagaggacattctgctaaccttgccaagagccacccaggtgaaatgagatttgtagggagacactcagggagattaacagatctttttgcatgaagaataattgcaaaagtaatctcttatttgattgaagctaataagtggacatagtggatattatggtcttcttttttgaaatcttactaatttagaaattcggctgagtattttaatgttcagagagcttcccttcttaaggttttactgttatagaacttaatatcacctattttttaatattttgattcagtgattgattttcttggtaggtagaatattacatcttagcgaaaaattaaatactcttctgtagttggaaactttttgtgaagacataaaattttaaccacttaaacctaatctgtgacccccttacttaggcgtcgaccctggtttttcaagcatctctccctagagggcggtatagcctcacttcatgatgtggtctttccaatgttggctgctggccccatatcacctgaggctgaagtcctttagattacaagattggaatatttttagtaaatctatcaccagtagagccttcatcttaacatgataaatgtacaactcactggacgtatttggcttgagatttatggcaaatcagacacagcttatgagaggtggaaacggtgcttgtttaacataactgtggctgtttgttcaggtcaatcctagtctatctttgtgtcgacacatagtaacctgtgggatattatgggcagatagtggagcattggatagagtactaaggacgattcagtggacctgtgctctcattttggatatgtcattacaggtagtacttgccccacttggactttggtttccttatttgtaagatgagacagccagtctcaatatttttttcacaatcccagcaactctgtgatttatggtctttggtacataacagtagttctgtacagtttggtagaggaagtgataccagtgctcccaactgccaattcaaaggaaatgtaggtagttacccagtgatattttggttagcctacagaagatattttaaattctgaggaaaagaaaatgccagctgatcactgaaacccataaatgctaaataaatagtttttgtgtatcttcttaaaacatgaatattcttacaaagtcagcataaagtgttgatataagactgcctcagaagaaaaagtgtccactactcacaatctagcaccatgcataacaaagagtcttcactcaagaaatgtttgtgaattctcggcagggcacagtgacccatgcctgtagtcctagctactctggaggtcgaggagagaggatcagttgagcccaggaatttgagtccaccctgggcaacatagcaagacctcatctctaaagaaataaaaagtttatgaatgaatgacaagaagactaatcccatgtttggtacagcttttacttctaaaatactcttcaatatactgagtcaggattgatgctcatgaacttccagccatggctttaactctactcctttgggtgacatttgagcatattggatctgctatgcgtggaaagtcactttacttttatttgcccccactccattgaaaaaaaaaaattagatgatagcagcatttcttaaagaacagaatgcatatccctgatcatgctcacaattaggcgtaattcttttttacatgaccatttttaagttttcaaaaacaattgtcaagcctgttgtagtcttatctttccaaagctaaccatcattcttccggacttttttgtggatgttttttaatgtcttcattgctctccttgcaatcggtcctgcttgtctgtatccttcctaatctgtctccaagaattaaacacaatatttcaagtttcatcactgccatgaaaaccaggatcaccaccttttttattctaaatactatgttttcttctaatacaacttaatattagattcctcatcaggttggtttatattgatgcccaagtctttttcacaaatgcactgttaaatcatgtctttcttttatatccttttaacttttatgtaaatcaggatcttcttttaatcctccttaaagtacaacttcttagacttaacttgcatgtgggaatattatgggttctagttatgtcaacctactaagtctgctttaaacttcagtttatttacaacaatgttggcctcatggactatttacaggttttatttatgcatgcatctaatttaacaaagtcaagagagagttgtaatgcttactgctagaaaccaccttctgggaggtacaaaaacatctcagagttcttattatataccttcataaaactcatacaatcttctcatctcaggccagggaaaaggaaataagattatcatgacttaatttggtcttagtgatctgcactagtacctgctaaccacctttttctttcgtaagagctgacaaatcatcctgttaatgtccactctagaaatttactagaagtaaacagaaagcaagatgatggattgcagaatctatctcacgttcctttcatacattttgtgacacatttatgcattctcaaaccttctagcctgtcttcacacatcctgagagctcttgactgcagttgggtgagttggctcagcacacctcagtgtaatctaatggcttgaagttcaagtcctcaggactgctagtactgtcttaaaactggggattttatttcccccttttcaaggttcactttaccctttgtatgcacaggtcattgactttgagaggacagaaacaacatgagagattaactctgatatccatcaatgtttctcaactctaatctgcatgtttattccttccttgctccttttatttctccaaacatagattgaaaccatcaatacaaataagagatgtactcaaataactcatgttagacagtgtgtgataggtgtagtaggaggactagaacggcttagaagacagagacattaccttcatcacaggacctcagcaagtgtgctctttgaactggtctttgaaaaatgaaggattttgattggaagcattgagaggaactctaagtgcaaaaagtggcaggggctaaaacataaatgggaggtatgtcgacatttaagaaatggagcagaacttattaggtttacctagcagataagagcctgattaaaaggggcctttgtacgttcctcctcatttggatcatttgatgaacttgagggagattttgaagcttttcagctaaagctgtgatataagtaaatgtgtaagcttaatctaaaaaagacaagaattgcagttaggaaaccactaggggattttatactaacccatgccactcaaactaagatggccataaatggaaggtatggaaacagtccataaagtaaaggtggggagaagaatgaagatggttttcgtattggtcaaatatttaaaatatatttataatgtgtttgctctgcctagaaaattacctcacctatccatactcacccctccaaaaaatattaatacccatcttcactctttccactctatttcatgaggcacctaataaaaacctccaagatgtttttgtacaccctagagggtggtctttggcagtgagcatcagctctctcttgactttgttaaattagacacatggataatctctaaattattttgggtggtttcatacacagctttaaataacattggatcatattgtgtggaagattttgtttcagttatctttcaaacttcagattacactgaggataaagtctcaatttaacgttagtttgtccataacgcttgcctaatatttgcaattcttccccttcacacaaagaccgagtgggcttgggcttagaaactttggtagacaacaacattgaactaaaactgaatggcaacatttatttaattttgtccttgtattataccattactttcagttattctgttttttacaagtgatactgttgtcctgtttacgtcaaagaatacagttttagtttaaaatgaaattttatggaaaaaaggtagtcattgattaaaaggattttgttaagtatatactaacaggtaatactatgatttggcaaaaatcaagatggtgggacatgaataactgacattcagttaacactgctctagtataaaatccaattagaattacaaaaactgtacatattttgaagatggcttttctcctcttctgaattcaccaatgattgaaatcatgtccttacattgctgagaggtggtttgatggcccatggagaatagaaagttgtttgccattatccatgtatatgggataacagtggtaatctgctgtacttgaagcataaaatcaccattttgactcctagagatttgtagggtttttgtggcagctgtactactctgatggaagtacaaattctatctatctcatgacaaaaaggtttttttccaaagagaacatgaggtctcatttctcagttaactttcaaattgcctctaatatatctaatgacctcttttctaaaattagtttcatgaaggggttgattgattttaggctctttatagatttaatttaatgttcattctccattgtattattgcccagcatgagtcaagacaatcatacttatgattagagaaataaagcaaggcctttgggggccaagtatagaactaccttatccctgagctgggaggctgagccacacgtggactgaattgctgatggacaaactctaatggcttttttaatgcaaaaaatgcattctggaagcaggaagctgctgggagagcctgctctgaaattgcatcagcacactcttcacatccttggttctgtcttaggaaaacaaatgctctctgaattattaagccgacatgtggcttcatgcctagagcacaggtgcttgagtcagaaggatgtcaattcaaacacagctcccccatttcttaaggctagctctgtggctctgggaagttatttaacctctctgagcttccagtttctcaacttcaaaataaggatgcactagtttcctagggccaccataacaaatgagcataacttaagtggcttatgacaacaatagatatttattcttacaggccagaagtccaaaatcaagtcagcagggccacactccctctaaaagttctaggggcaaatcctgccttgcctcctccagtttctggtggctccaagaatgccttggcctgtggccacacaactccagtctctgccttcgtcttcatatgtctttcccaccttttcttccttttctctctgtgtcttttcctctgctatctcataagaacacttttcattggatttacggccagcttaaataatccaagaggatttcatcttgaaaggcttaactcatctgcaaagagcctttttccaaataaggtcacattcatgagttccagtgattgggatatgggcatatctttgggggagccactttgcaacccactgcaaggaatgatcatgatacttacatcacagacaaaacgaaacgagaaaatgctgagcacatacgacacagtcaagaaatgttatcatcattttatgataactatctccttagtttgtcattatcatgtttattaacattttgatagacctaactacatttaacataacagtgagctctattatgattggacctgtagagcagatgtaaaactccaattgccactgaacaagtcacacagagaaaagatggcctctttccccaaagcagcttgggagtcactggccttattttatcagtgtaaatgcacattatggactttaaagagacaatatttcttgtggtttaagagataggatggccattagggatcagggatgctaatgaaacatcaacaatgttaccttgtaaaattttgaacaaatactactattagataaaacttttaatttgaaactaaaagaagtgaagcgtatgtctgtgttttagatttgccttttttgaacaaaaggttcattcagtcaaacatgaagtcaacacactcaggaaagtgtcaggatttccagattgtgggtctttcttctgattcgagttgcatcagccacggttctaaggagaattctactcccaagatcagcattctagtggaatcataaaaggtcccacaccaccatcagtgaacttaggatctccatggggatgtttacccaaaactcaaactgaaaaatgtaaccttccagccaggcacggtggcttacacctgtaatcccagcactttgagaagccgaggcagatgcatacttgagtccaggagttcaagaccagcctgggcaacatggtgaaatcctgcctctactaaaaatacaaacattagccaggtgtggtggtacacacatagtcccagctactcgggaggctgaggtgggagcatcacttgagctcaggaagtcgaagctgcagtgagctgagatcatgccactgcactccagcctggtgataaagtgagaccctgtctctaaaatagaataaaataaaaataaaaatgtaaccttcaaattccttcccattctcaaatagagatggaatttgtcactctcagaatttaccctggtcatttctcggttcttgctgtctgccccaagacagaccacactgatgtggttcataccagttctgcagtgttgagcgaccaacaacattctgtgggtgacgagatgccacctgctggcttttttctttctgcatatgtggatgtttacacctgcccgatcatgcaagacagaccacactgatgtggttcataccaattctgcagtgttgagcatccaacaacattccagactgtttctggaagctgtgggtgacgagatgccagctgctggcttttttctttctgcatatgtggatgtttacacctgcctgcccatgcaaccagctcctcgtggcatggcgtggccattgtctcactatgatgaggagtcactgagacattttctgtctccaaatattctcatcagttaacagttaaagagagctgaagagctgactaaatctcaactactgaggccaaagaaatgtatgacttatctatcaataaaggaccctaagaggtggaatcaggcttacatctatgtaaactcactgagaaagccgtgttgtcattgctgttcttggtctgtgcctgcttttattcagcatgccacttggtaatggaaacttgaagaaatgatactacaaataagtgatattgaggatgacagtctgttcatttttaaagggcaaaatggcaaaaaggatgcatttgtcctttcagacctcttctcacaatggacagcagggggcagtgctaatatagggagagtttagcatcaggtaaacaagtggtatcggccttcaaaagtcagatgccttcgtgagccacatagcctttcacatttgaaatactctaactcacttttcctcccaagtgccatttattcatccttcacggcccaggtcaaatagcttagactctgagaagccatatggaatccccctgactgaattacgctccctctctcttggctatgggttgcttatgtgtgtcgccttaccatctccccccagattcacatgttgaaatcctaactccttagacggtggtattaggaggtggggccttatggaagatggttaggtcatgagggcagagccctcaggagtgggattagtgcccttacgaaacaggctcaagggagctcatttgctcctcctaccatgtgaggacaaaccaaggagatgccatctgtgaaccaggaggcaggccctcacagacaccacacctgccgatgcctcgatcatggacttcctgcctccagaactgtgtgaaattaatttttgttgtttataaaccacccaggttatggtatttattatagcagcctgcatggactaagacactgcccttccacagtattgcaaataaaactctattatagaaagtctgttgtatactggccaggcacagtggctcatacctgtaatcccagcactttgggaggctgaggcgggtggatcacaaggtcaggagatcaagaccatcctggctaacatggtaaaaccccatctctactaaatacacaaaaattagccaggcatggtggcgggcacctgtagtcccagctacttgggaggctgaggcaggagaatggcgtaaacccgggaggcggagcttgcagtgagctgagatcaagccactgcactccagcctgggtggcagagcgagactccgtctcaaaaaaaaaaaaaaaaaaggtctgttgtatattgttgtgtagctcttttcattcatgacttaccaaagtcccgagcacctacctgctagttcatctatgtacttactgataaatgcatataccctgaatgtggccagactactgctactatttctactattagtagctaaccagtcactttaaagtactgataaaatatcactgcccataataatgtttggcatcccactgttgacacaaaacagcactaagccacttcatagtttaactccaattaacacatcattagccagattaacacaatagcttctagtgattaattttttttctttttgagatggagtctcactcttgcctaggctacagtgcagtggcacgatctcggctcactgcaacctctgcgtcctcagttcaagcgatcctcctgcctcagcctcccgagtagctgggattacaggcgtaagccaccatgctcagctaatttttgtatttttagtacagacgaggtttcaccaggccagactggtctcgaactcctgactccaagtgattctcctgtctcaggctcccaaagtgctgggattacaggcatgagccacccggcctgattttctttctagtagtagcctatgacctgtttcgggcaacctttctctgagggaaagacacagaagcatggctggctcgtagagtcactactgtcaatccctttttcccgccctactgttggcgtagacaccttggagacattgtgaacgtgttgaaattctccaggccttctcacaggattggcaccaattgctttcaatgaattacgaacaggaaatgctcaaaacaatacaattgtttcttcctttgctagagaactcaactttcactcttccgcatgtggaaagcacaattccacgaatgactgtaataaatagaatatgtgtttatagatactaggagatccccagcggttctttccttctagttttagaatctggccacatagatcattataaactgcagcaataagactgaagtcagttttccatcatgtgtaaaaccagtaattgcatgtgtgtgtgtgtgtgtctgtgtgtgtgtgtgtgtgtctgtgtgtgtgtgtgacttgagtgatcccaatgctgctttataaatgatagaacatagcctttgtggcttcggaagactcatcatgaatcttccctgggccagctatatttttgcatagaaagtgtatgaaattgaaattcacatctcttccctttggatatactgtaattttcaaactgaaggtcatttgccaattcagcagttcctgcttcagtgccttgtgacatcaggcaggatgctgtctgaagaatgatcagagagatcctgttgcaccacacataataaagctttcaatccatagctgagcttttccaagctcttggcatgcaataaaatacatatttactgttgcatactgtcagactgcaactctcaggttggagaccttggaaccgccgcttctttgggcttaatttttcttatctgcaattatgggcattcaaccagacaacactcattttagactaaagaatctaccaaaaaaaaaaaaaaaacaccattatagtgtttatggatattttcccaagagggaatcatattatttttgagatttgcaccaaaatataagctcccagaggataggactctttgtgtctctgtattcactgttttatcccaagggcctgggatattgtctagcacagactagcagtcagtaaattttcattaaatagagaaaataaggaaagaggggagagagggagggaggcaggaagggagggaggcaggaagggagggaggcaggaagggagggagggaagaaagctagcatattaatatcttattaagttgagcttcactcgctggaataacagtgctgaagcaactctgaagaagatgtttgcaaaaagtttaaactatgaatgaggtagggcatgatggccaagtcaggaggatctttaaagccaggaatgcagcgtgggcaacatagcgagacccttattgaaaaaaaaaaagagagagagacagagaaagagagagagaaagacaaagaaaaacaatactataaatgatatcttttagacaaagtcttactctgtcacccaggctgaagtgcagtggtgccatctcagctcactgcaacctctgccccctaggttcaagagattctcctgcctcagcctcctgagtagctgggactacaggtgtataccatcacacccagctaacttttgtatttttagtagagccgaggtttcaccatattggccaggctggtctcaaactcctgacctcaagtgatccacctgcttgggcctctcaaagtgctgggattacagatgtgagccaccacacccggctataaatgaaattttaagagcaacactttcataagagaaaacacttctaagaatttcagccatccttttcccatataaaaatcacatgcagagagctgacttgtgactctttgatggaggcagttgggtatagtaaatgcttgttgtcaatccccctgggttaagagtgaatgggaaaagaagaagggaagaaagggggtgcttagattatgttttccaggtgtttgccagtgagggaaggtgaaagaatgctttagccaaagaaatcttagggttgaagaaagttgtatatgtgtgtgttgtgggggagttattttatatatagcagaagcttttatgctgctaaagggaaggaaccaggagaggggagaggaatgattgatggagcaagaccctggaagagatgagagtacagagattgtttccagagaagggaaaccttcccttgcatctgacaccaaggagaatgtaagggggatgtaagcaaatatttaaaaagagcaagaagaatacaaataataccaaggtgttgagccaagaaaaccccgatgctcctgaatcattttggtaatgttcgtttgctccttgttcattcatttttatgcagctgctaatcctgactcacagagaagcagcaacagaggcaaaatattaagaaaatgtattaaaaacttacatttggcatatttctaatagagaatccaaaatagattgccactttccaattcatatttatctcactcttagaatcccagggcaccatgagattgaaagtaatgagaactataaccaggagggtagcactagaaatcgaaatacgggcatgtgttcctgagtcactgagagctctgagggtacagaacatcacagcttttggaacctacatgagggaaaacagacaagagccagctggagcgacacatctttgtttgccagaatgttgtttatatctccatgcctacacgcccacaccctgcttggtcttctggtagccccctgggctctttaaggctctcttcgagccaccagtcttccctctgcgagtctgccttcaggtctaaaatcttctctgtggctttgaaccatattgcgtgtttggtagcggctctctttctgaattctatcctggtgctttcaagcctgttagtacatagccctggacttcaattttgtgctcaccattcctgcctcacacactgggtgctgcatgtactcctacatgggctgctgtctaactcctctcctcccgccctccatcagcaggtacatttgagccgagcttgttgcaggttgcacacggatggcagtgaagaggagggcagcaaagatcaccccagtgtctcagggaaaatggtgctgctgttaaaaagaataggacagccgggcgcggtggctctcgcctgtaatcccagcactttgagaggctgaggtgggcggatcacctgtggtcaagagttcgagaccagcctggctaacatggtgaaaccccatctctactaaaaatacaaaaatcagccgggcatggtggcaggcacctgtaagtccagctactcgggaggctgaggcaggagaatcacatgaacccgggaggcagaggatgcagtgagcaaagattatgccattgcactccagcctgagcaacagagtgagactccgaaagaaaggaagaaggaaggaaggaaggaaggaagggagggagggaagggagggagggagggacaaaccccaaccccaaaggcagtgttgaatttggtggggagcagattatgaagacagaaacatggaaataagcatatgggggttacagtagattttgaagttagaggtgagaatttggagatgccaaatgtagggcaaacaaagatcttgtgaagttacatgaatactgaggtagaactgtcttgtcctttccttctcctgcctctaatcagaagtcagtgtggctagtggagcttctgatccaattgctattcctcactccagcttctctgcaaggcagcagccagactctaatcctctaatctggtctgcctgctgcacccctatacatgctagatatttgtctcaataccacccctgatgtctggggcctgcatctcctttcaccctgaaatttaatctgccaacctgcctgcagagtcaagttcgaaagctgctcagtgcttcttcactatgggacctcttcactattaagccctggtcatattgctgatgcttattgacattattatgccaaacacctggctaagtgatttcacatggattttcttatttgattttcgcagtagccataagggttagaaaccattaacaaggtagccgtgcattccattctgtctgtgaatagtccctatgtttgcataattattaatagcaccctctcactttcaaagggttctagtttggatggtcaattatatgggcatcctaactgtcattacacttactctccttagtttacagatgaaatgcagagaagttaagtctcttctccattgttacacagctgataaatggctgagccaggacttgaacacaagtggtctaacccattgtgattgaattcatgtctacaagtccccttgaagtttggatggatacctggccttttaggatttgtttcttctactaattcagttgtcatattttgtgtcataccaggcagcttatcctcttgcacccccagccgactcctagtgatcaccaggccccactgtgcctgattagaaacagcagatatagggtgaccttttatcacacagtgtgatgaagaggagagaaacgaagtacttgcttgagtgggtaggagacttgaatgagacttttattgcataagcaatggttaggccaagtaatggcctagccatttattttggataacttactagttgactcaaattaccccatagtcagttccaaggaagttaataacatctatcatgtaactagctaaaatgctaagaacaaaaattccatgtagaagtttacctaaaaaacctgggcttttgcaaaaattggagtttggatatccatagtatcatttttacattaaaacaagttcttggccaagagtgtgagcaatacacattaaaaattcttcaagctgatataatacctttttctcaaagaaaaccaaaaagttaaaaatgcagctatcactttccacatcctgaaaacaagggaatgtaccgagatttgcacaattaaccatgcttttttaaaagcattctctccagcaattgatgacttacattcttggctcatttggactgggtggctctccatggttctgtcttgtgaggagggagtggaagcaagtccctgtggacacctatgctacgcaacatcctttcaatgctagaatagtaaaagttacattaaaatatccaaatttttcaagacccagaaacaactacaagaggccctcctgtgtattattggcgtgagatagataataggtgttcaataagtgcttgttgaattatatgtgttgacattagatgatttactaaagatgcttcttatacatataatttgtgtgtggcagtgggtgtctacagtgagactgtcttcaaggcggactccaacaacctctacctcttgatactcatgccctgtgtagttccttcccgctctgaatgggactaaactatagaccaacaggatattgcagaaataatagtgtgtaacttagactggtcataaacttcaaactccagtaacttagattgttcagtgtggcttcctccttatcgtcttggatttctggctctagaagaagccagctgccatgtcatgaggacacccaagcaaccctgtggagaaacccacctgctgaggaagtcaggtttgtcaccttcccctcctgacttgccagccgtgtgtgtgaaccgtgggagggcacctgcagccttcagatgaccatgggcccagtcaacatcttgtgtgcaacctcaggaaacacttgagccagaactacacatctatgccactcctgaattcctgacgcacagaaactgtgagataacaaaagtttatttttgtttaaagccattaagttttggaataccgtgttcttcaacaatagataacaaacacagatttattttatgcattgtgtgtgtaagtgtgtgtgtgtaaaaatttgctttgaactagaaaaagagctacataaagtgagtagaagaataacatattatataccctgaaacagaccagtcagaggaagatcttgtctgtcgacactggatgtgtaccagtgacctctttccaaggagctcccaacatatgttagcaatgatgattaagtgtcagaccatactaagatagaagctgctagaaagaagcaatctttgttgtgacaatgttttagtgagtactgcatctcacatattcaatgcctgtgagagaaagcagaagtagagactttctggtggacagtgtctcccactttttggagagggtaatagtagctgccacttgttgaccttgtagtactacttcctggcaccatgctaaaccttttatacatattatctcacttaattctcacagcagtcttctgagggaagtgtgaaggttgagaggagttaagtaacttgctgaagattaccaagctagtaagagacagaactgactttcaaatccaggctgactttttctagaatcttccttaaccagtacatatactacctctgatgtcatattaaacttgattttgaagctttatatcaccattagcttctatagaggtggccacagcataagttgataggctactcttttaaaaaatcttatatattaaatgaattacaaagcgatataatatgtcaccatttttattcatagacatgtagtgataggctgtgttttagaacccaaagcatgttcatgggatatgccctctcttcatctctatattgggtggggacaagacctttatcaagactgcctaagataatttgtattcccttcagaaatgtaataggatcctatcctaaccacacatattcttaaagacccaagagtacatgcagctgaccaggtttaagggtttttcaaggtagaaacactaccagcatggaggcttggctcctacccccacataacccagcaatcctggagccaatctccatttgaactgcagctttgccctctgtcagcttggccacattgggtaggggacagagtgggcttggggatggagggagggggatgccttctacagtcagaattcagttacgcttgaaaataaaacaggataacaatactttgcctaaaagatgaacatgaatatcctgcatcctgtcttgcattcttctcatctgaaatgctgggagcccagtgatttctcccactttaggaggttctctgttctcccatgactgctaatgccaccctgcaatggaaggcacagttgactcacttcgtgagctgctgtggactgtggatgctcccaagttgagcccataaccagtagagcttctcttttcactgggttttcccaatatatcaggtgctgtgtcaagtgctccatttggattatctcatttactcctccttatcctataagaatctgatacagtacatgactaccattcccatttctccactgcagaaacaaagaacagaagatcatttgccaaaaagccacaaatccaggaaatggtaaattcaggtctgttggacagcaaaaaaaaaaaaaaaacttccaaagaaagaccatctgagtcttcttagtattccttccatcaacctgcaccacagggcaatgccatctacatattagagctaactggggtgactgttctgggcttggtaggacctccttccactgcctgattttcagttctttcctcttacacctcatttttcagtgctcctacctcttttgtgacactgttggtgatgtttactacaaccttcaaaagaaatatttataggggaatgtggtatatcccagcaacaactcctatcttcacctctaccttaaagtccagccactggtcattggtgttctatctgaatctttttgttagataaagctatagaatcctagacctagaagaactcatggcatctattctaaccctctaattttatggacaagcaaacttagatccagagaaagagatgacaagacttgtctgcagtcctaattagtgttagagcccaaagccaattccctgctttccccacctcttcacacaagaaggaaggctgcacatgtcctcttgggaactgcagttgtcagtagcacaaactggagataataggaacaaaaactttaagaatccacatcttgcatttgaggttgtaaagagaggctaaacattatcttatcaagttaatcttctgaatattgccacttctcctattcctgctggacttaaactttggttgtccctgtttcctttcaaaaccctggagctgggtgctttgcaccaaccctaaaatgatactttgggcgactcccctgagtcctggcaaataatgtaaaattgagctcaggctatctttttatctttaaaattgatttggaaagaacattgtaaatgactttaaagactgccattttcatgtttggaaagcaattcgtgattattgtaaactagatttaacttggaatgtttaagacgtgggtggttaattcctgccacaattcaaagggagaaaaatgaacacagaaaataaaatagaacaagtacagagagtacagttaatagttcatttatcccgtgtcatccaaaaatatttttcacatagctaactcttgaagacaacataatttgcccaatttgatcacttaacttttaaaaattaaaagcagttgctgttggaggttttatctagaatgtgtcacagatttctctctcctgaacccaaggccacttggacataatttggtttttcttgatgcattagcgtccttgttgtgaatatattccagtaacaactcctcctgtattcacccccaccataaagtccaaacatcagtgattgatgcatcagtcatttccctaatgcatcagtttcacccattgtactggggtagaacactgtaatttatatccacctttctagtgtttaccgccccgaacggggattagtcccagatactgtgtatattgattttttttatgttttccattttctcagattgtctgtcatctgtcccttcctttggtgggtggcccatacctttaagttagcctgactcagccatgcaccctggactcatgggctggtgaagagaagtcaaggaaactttctgtcccacctctcccttgtccttgccacttcattccagtgccaaggctctctcttctgtttgagttactgtttccgcatgactttattgtttttgagccttgacttgcaggactgttatctacccactttggtactaacttggaataacaatgataataacacaaatagttgtaataatgataatggtgaaagaatgataccacctactatttatgccagtgttttgtactatgtgcctttgttacaacagttatgtagaagggttcttcttactcttattagccaatggagaaaataagtctcagagaattaatgttccaagacaacaaaactaggattcaaacacaggtgggtctcttcaattccaaaactcatgctcattgctctgaatcactttctaggctgcgttatttcaccctcattccttccctatgtatgcagcctcagctccatcagatggctgagtctttggtgggctggctttatagctggacccaccacaaccccttgaagaagctttcagcccacctgccttcaccggggacatccttccagtagaaattggctggaccagggcaggtcagaatgatattgcttctggtcaaaagtcactgtgagcttagttcagcaagctctttagaatcctgcataaggtaacggtgttaaccatgaggatataaagacctcttcactaagccactcccattagcttcatagagggaatcacgtgacatccttttctggttctggagaagttgtttctgtcccttttcaggaattgactgtgatcagaatagttgatgttgcaaaagtagtgaccttagggtaagtgaggtattattatattatttcaaatttgtttactcatgaaaaacaacagggaaggggatttagaacttgtgtcacattaccatgggagctaacttcaaagcacagaggagacatatgcaacacccattcccccatcactcagggaagactatgtgtctccgggaaaagaagagtaaggagatttaaaaacaacaacaacaacaacaactacaacaaaaactacttactggggaagtggggagaaaacaagcagtgtttaaaagtccttagattttctcttttccagtaataattagaatttgttgaattcttaccatgtgtttggtactggacccagcactttacgtgaatattagatgctcattaatattcattcattgaacagatgaggaaactgaggcttaaaatttttgctgaaagtcacaaagttaataaacggctcaacagggatttacattttggcaaactgcttcctgatgcctaagtgccgcactatactacattttattaaaaataagaaaggtttagtatgagctgagaagagttcaatcaaacatagatgcctgagaaaggtaagttattaatggaacatttaaattatccgtgcactctgcaggaagctgacttagagagcaatgaaagataattttctgatgcatccaaatgtaccaacgaaagaattatctgcttttgagctgcatcaatgccaaaggtagaaaaatgaaaataaaggaaagcttggcagcagcacctgatttttaaagcaaaagaacagtgtgcttttttccaaagtgattaattgtacaactcaataaatgtcagcacacgggaaagatgcctgcaaagaggaggccactataattaagtgaaaatgaagacagagaaaccgaaggaaaaggtctctagaaatcacagttgtcgggggataaaaagagatcaggggttactatcacaataaacttaagtcccaagtccctgagtagaggtagcagtaggaggggcagagatgcaacttgataaagggtaactaactgggtcctaggaagaatgacttcactgggttgtgttttccacttttcagctgagaaggcactgattaactccctcctagccatttaattgagttcagacctggcggggggcttacccatctggaaacagacacggaagaagattctcactaatcttgccctggaaaatgaccaaatcccatgacctggttttactgactgggggcaaaatcccctgccactttcaatctaaggtgttctcctcctttgggtcacttttgtttaggaacaattgctgagcctctggaaaatttacaaaaaaagtccaacatgattaagagcttgatgatgaagatgataatgatgacaatgatgctgtgatttttattatctgttgattcattcattccactaatcatttctgagctgtcatggaaaggcagtgctacagcttaaatcagcagatggaggtttcctaccctatgccttggtccccatgtttcttcccatcacatgactccacagagaatacttgtggtagagaaggaagatgaaacaaagattgcgaggcagttgagctcccaccaacttgatggtcacccctaggtcctcacactagcccaggaaggaaagtggctggttccctctgcagcagcgacatgtttgagctgtcagccaactctccaggatcagcctccaatgaattcaagagtgagtggcagctcttccagcgtgggcaaccaagtccacactcacagagtgtcctggggtaatggcctcattttcctctttctaattggacccaaagtagcctcttttctgggggcattttggtgttcaccaacattttatgtcatgtagggggaagcaagtaatgataaagggagcccattacgtttctgtattctaaatatatgctttgacagccaatttaggcagttaagtcactgctgccagtgaacacttcacacagtaaacacagcaccttaaaaaaattcgtttatcaaattcattaaagactggtttcaattcctaccaaaatgcaatttaaatcatcaccttaaaacaatctgctcaattgttagctggtttctgaaactgtcatccaagaaaaagtcacagactttcctgtgagggacagaccagctctcaaagggaattttccagggttgcctcactaccgcctgccacatgccagttctaattctgattctgccacttactagctgtgattctctgagggaatcacttaatttctctgtgcctcagtttcctcaacagtaaaacagggatgatcacagcactgcctcatagagggaggtgtacatgtatcccgatgcataaatattcattagcactgtgcctggcacatggcgagtgctataagggcttgctttcttaggggtatcatcatcatgattattattcattgagcatgtactccaaggtgggtgctggatatatagcaaacaaggtaagcacaatcctgtgtcttacagagagggaagacaatttaaaatctaaatcaatcaggatgtaattacaggggtgtgttagaaaggaaacctacagggtaccgtgataaggactgaggttcagggctgtgaagcaatgcccgttaggggaggcttttccagggcagtatcacctttaagctgatcctggaagctgagagggaagagaccaagcctctgttatcaccctagcagaggcagcatcacgcttgttcactgaataattatgggccaggctctatgttggtctttgcagttaatctcttcccaccaatatcctgaaagtgtaaaggatgatctccattttaccgcagatactattgaggcttagagaggttaggtgactcgtatgagtcaggctgactctgaagctcgctgtgagcttttctactgtgctctgctggccacctcttccaccaggctgtcatttggacaagcatcaaattagacttgaaccaggatgctcagtccatattgactgtaggttctgtcagtctcactgtaaattaacccaaactaagagaggtctacttagtttggggagctagaatactctgccttctggccctgggatcagggagagaaggaacatttgaatcctctccttcacttggtcagactgacctgtggacaagctgttaggttgactggtgcaccaactgcagtcttcatttccagatatgtaagccagtctggcaggccaactagatatacaccccatccccactggccaaagccaaaatagtgaggggttccactgaggtgctgacacctatgctaggtattctggaagtatttgcccttcttggggtatttggtgacaggtgctctagtgttttatctgtgctgagaacagggtccaagggcagttatccagttactttctcacattcagcccctactttctagagcttggagccccttttgggccctgttgtgagcaatggctgccatctgctgtatcctcttgctgtgcctgtaaattgttcctaaatacttcatttttagttattaatcaatgtgatcaaattcacttttcattcttcagagatgctcaaaaattctctttgctgaaaaagtttcccaccttttctcattttgttgtaatcaatatattgcctttatactgctttgttgtcatttcacttggatttggggaaagagatagctaaaaaaatgtactccacgcaccaccttgagctagaagtcagggcctccagactccaaatgcggaaaccatgttctgctggccagagggcaggcaggtgcagcaaaaagatacttcaaaggtgactcctgaacatttgtgttttggaagcagggaggaaggcgggggttaattcaacctgggggaattaagagcctttctctgaggaggtgatgattcccttgaggcttcactgttagaatatggttttcccaggcaaggtccttgtattggcctgctagggtactagggctgctctagcaaaacaccacagactaggtggtttaaacaatagaaactcatcttctcacagctttagaggctggaagttgaagatcaaggtgctcttagggttgttttctggtgaagactctcttcctatcttgcaaatagcaccttctcactgtggcttcatatggcctttcccttgtgcacacatgaagacagagagagagagagagagagctggtgtttattcctcttcttataaggacattagttctagaggatgaaggccccacccttatgacctcatgaaaccttattactttcttagaagctctatctcaaaacagagtcacattggcgctcagggttccaacatatgaattttggggggacataattctacccttaaactcttagcctttccataaatttatctttataaataagttctgatcatgaccttattaggatcctgaaatggacccaccagaaactcacagtgtgtgaagcaatgaaaccaagctgcatagcatcagggatatccaaaaagcccttgaggctgattttgttaggcttcatttctcaattttttatttctcaaatattttatctaagctcatctttgtttttacaagacaagcatctgttagcagcagtaggtttccgtgtacttgatgccttatagaggatagcagaaaacctctccccatccaaggtcagcattatgtgtcagaagactcagatgcaccaggtcttttggggaggagaagaatgtgggcttcacctccatcatgccaaagcacagtccaatttgacacggtcaaaacagacgtaggtattttgcaatagattagatatatagatttagacacacggctcttacataatttaacaaagctgggaaggtccaacactttcaatggacattatttatttaaattaaatgtgtatttccttgcccattgtaaaaaggtctttggacatattatcccagtggtggatatatcaacatgtacagccaaatcattcttaggccaaaagattttagaaaagtgctctgaaaactaaattcattagtcaagatttgttgaagaaggatgggcagtctacagctgggtaggtggacccctgaggcagagtccagtatcctcctaggattcagtacgattttggtggtttttgttagtcccttcattcgtttttctctttttttttttcctccttaacctccttttactctcttgaaatgccttactttttcttcctacatgtctttctccctggtcaataagatgttaaaaacatctccctccatccttccttccatttcctatgagcattaaggctactacagtctacacaacacggctatctctgctttgaaacaagaacattttttattgtacacaaatttaagatttcataagtgctgaataaatttttatatatgaaataacatacaataatatgatataatataatatataattaatgacccaggatgaaatctagcttccaacacttctttggaaaatttagccttacgaattgttagtgacattatttcctaatctaagacaattactttaaaaatcttgtttctagcattttaggtttaataaataccttattgaatcataagataagaccctactaggggaagaaggcagacaagagagtgaacaagaatctccaaaggtcatttattagtaaggccgtgcacatttgatgtttggaggccaaattaatgattcatcttattaatagttcaaataaaaatagcagacacctgctgaagagtttatacctaatcttaaaatatttcctgcttatcaaaaattagccaggtgtggtggtgcacacctatagtcctagccactcaggaggctgaggcacgagaatcacttgaacctgggaggccgaggttgcagtgagccaagatcctgccactgtactccagcctgggcgatagagcgaaactcaacctcaaaaaaaaaaaaaaaaaagtttcctgtgtgtcatatgacagaaacatggcctctgggtaggtttctgtgtctcccacaacccaacccaatctctagcttaatttgctatgtaaaacatagagctcagaacccaaaccctttcttgcaactttcctacatgtttggaatctttcatgagaaaatgttggagaacatactcaactcttctttcctgcgtttcatctttttatttcttgtccactggataatggttgtgtgtattgaattccaaagaaactaatccttggacattcctttagcttgataacagaggctaacagagagaggagacagaatgagagagagaatattcagagcctgtcagcagcccgtcaataataggggtgaattcctcagaggcagaggggatcgataaaggcgggactgtaatagctagaaagcatctcatttgtctccctaaagactttggcatctgccaaaacatctgattccaaaagccaccccagaggtcagccagatttagagagagatggttagagaggagtttaggatgtgaagtgcatcgtgcctgccaagcccatggtggatagcggagggatctgtcttctctctccagtttctaactggggctggtttactatttaagcgtttccagctagcagcttgctgcctgcaaactacgcagccatgagcagatgatcacaacctacggaagtgattggagagagatatgtcctgggggatgggagtaagtgggtgggggtgggcactgccatacagggagcccagaggaactgtcctatttgaaaagacacattcacaaacagaggagcccactctgccctttgtctcaagtggacaccattagatatagatattcaatacacacaagccagacaggctaagtcgtagcctctcttcagtaaatgccctagttgtttagagtaaaaatggtttagattagcacccgggcagtctgacaaatgtccagagggagttaggggacttgccagcatcattagcattttttttcttctttttccagcagcactaaaatatgtttgctcaaaacagagggagatgaaaaactactggcagccagtacttcttaaaagaaaaagaagcatgttttacttctctggggtgaacataccaattaaaacgatgctgtgttgtgacagattactgagcaattaatgcctgtttgagcatcatgctagatgcttccgcgaaagcaacctcactgaggctggggcggccacacgttacagcaaaacaatccttcctcaaacttcctgcagcacccttcacgccgaggagcccagaaaccacagaaaacattttttttttctttgaatctccaagagttacactggaagaattagcttggcagaaagatctcaagattgaattctattggggatttcatactttcctcatttgtaagcaaaatctattttccatgagatatttttagcgcaagcagctccagctgccctattccctttcactataccattagatgttgaggccattccagaaaggacacgtgatttctaagcatctctctttggttctttcctaagtgactagtctcgcaggagtcagggaataccagactcttaactaccaaagacctcaaagtccttcccagagccttgaattcttattgataggatgttaaaatgctttacagctgctttttctaagaggtcagcttggcggagcttgctcagtgacctcagtaatagagatattttcagccctgcaagccgcgtatgtaaatataaaattgtattaggctgcagaactgcatgtgtgggaacagaacaaccatactattgagaggaaatcacaggggaacactggtgtctctcactcagggctggttaatgcgtgcatacttttgttaaatcatcttgatctagtgaactctatgtttcagataagccagtttcatttctggaacttatgagctatgaaaagtaaaacctcaatcacttagtgagatgtccagcaaaatttccttcaggaagtgtttacgtttataaaaaaaaaaaatcattttcactccttacatgatacctcaggaaaaattgtgagtgtaaagtcaggttttcagttgtgtgatttgaaaaagtaatttatttgtgtgtctgaatgggaaagacatatttattcagacctctgaaaggagaatcgaagagcttcattgtaatgaacaggaaacatgctctcgatgtgaattgagaaatactttctgagcgcagtgctctaatattcctgagtgtgttcagtttccgtggatcaaatctttcccatctctgcatccaagctatttggccatgatcagatgatcagagctcaaggaagtgattggagagtgagccggctgcagctgcagtgtaggctgttttcagggacaaggagccactgttttgcaaacatagcatcaacatagaagttattttgtaggctccaggatgcagcgatgggctgcactgccagcattgttctgcttcaagcttttcgttctgtggtccagaggagctgtccacacatttgtagacgacgccaagaggaaccatcccacgaaattttgcctctggaaagtgacgatgaaatgaatagacccagaaccctcatcataatggtatggtatccgtggtaaagcagcctcagtggattgaactgttattatagagaggttacaatttaggggttttggtgtttagcgttagataaaggcatgtgtgacctagagtttactactctgaagtactgtttggggaaaatctttcggaactatttctatcattcaaagagcatattttcttcttcttgtatctgtcatgaaactgtacagcttctcggtctaccagaaattctcttctgcctcatggtttgcatgttgttattaccttttgtgcagaaaataagagaaaaatttggagtttggtttaagtgagtggattttattttataactataatttgaaagaagagcccaaaatgggcgttttttaaaaatcacatgtaaccattgaagttgtatagatgctgatagttggatctttaacttcaggatatttggggcttttctttctgactctgcaaaggaaatgcctttccagaatgcctaacttaggcacaatattagaataaagaattaagaattttgtagaatgcatagtgttttcattagaaagctttttcttgccacttgtcaaattacatttttgtctgtgctttaattgtaataaacaatgttttccttttttgtgcatctgtttgatcagcaagaataaatttgagggtagagttctttctttctttaagtttaaaaagagatctgcttagtcactaaaattagaatagatggtatggtaaagtttccaaaattgaggagacattgaagtctaggtggcttcagcataatcgacttttttctcttagatttcaatgttgagatatcaaggatgtagtaaataatgaatgaaaaatacctgttactctaaaagttcttaaatgaaagtcatttggcttgggctatgcctctgagtgacagaatactaaactataacattacttgcctacttcttcaacaaatcaatattttattttcaaaaagctatattattcttgaactagggggctgtgattatttctaaaaggaaacactaaataggaataatttcatgtttattattcccataagttttcacaaattaaattttaaaggatttgaaataggttcaaatgtcaaagaaatctttgttttccaagtttaactcttgttaataacattaacacactctttaactatgtgtagtgctcatgctataccagtaagtcttatttttctaattttgttagtctataaaatttcgcagctagaaatttgcaaaaaaaaaccttatacctcaaaataactgagaaatttttaaaaactattcacctagtcatatttttccaaggatccttttgatttatataatacctttattgatattaaataaggtgataagaatatactaatgaggaaaataaaggctcagaaaggttgaatatcttaacattacacagcttctaaataccagttccccgaatcacacttagagcaatgattccaaaagccagtgtattttccagtctgttcacacttctaaggaaataatgataaccgataaactgaatttatgtaagaagtctgatggaaatcttggactactctgagtaaaatgtgctcatacaaagtcattgtgcatcttgaaaatttcttctgggccactccaaaattcacacactcgctaatggtttattgccagcccactatggtccaagcactggttcaggcacttggaatccgccaatgaacaaacccatcaaaagtccctaccccaagttgcaaagtttgaaggtgatagaacattttgccagtgttgttgttatggaaatgctatactacaattgtgacacttagtctacaaactttagccaatgaaaatattttctgttttccaagatggtggtttgaaaatttattgtatttcaaaatcacctaggagttttcattcatgcaaatccttgagctcttgaccccaaagactctgtttgagaaggtgtggagtggagctcaggaacctgctcttgtagcaagcactcccagttgattctgacgaaggagtactttggatgacactttgagaaacatggctctggaagatggtaatctaaactgtccaccccttctcctcctccagtgtgatgttcttatattggctaatcgtcttcttactctggctctaaacttctgagcaaactttgatttttcttttttattcactttcccactgcccattagtcaccaagtattgtatattgattttttttttttttataagatcacagactctggagccagaacacctaggttggaatcctgacttcatcacttatcagctgtgtgaccttgggcatgctgtttaacatctctgtgtctcttttcctctcctataaaatgaggatagaaattttatcaaattagagcagttgtatgggtttgataaagtaagtgttaagtgcttagaaaagtgccgggatgtaacggtaagacgttcaatagggatgtgatcagggacatcctaactgaaaagtgacatttgaggaaagaccctaaggagtcaagggaatgacccatgccactttcagcagggaaatgccttatgcagaaggacccgccaaggcgaaaggccctaatgtgggaagaagcctggagtgttagaagaacagaaaggaggccagtgtgtccagatgagccaaggagtgggtcgtagaaggcaaggtcagggaggcaatggggtcagatcatgtcaggcacacagctatcaggaagacctaggctttttccaagtgagaaaggaagccactggaagaagcaggcccagaggttaagagcctgggccatggagccagaatgtcagggtttgagttgtatctctgccactcactagctgtgtgatcttgatgaatgacttgtcctccttgtgtctttgtgtcttcattgataaaatgtaaaaagtaacagtacctaccggtgtaaggttattgtgagaattcagtatgttaataggtgcaaattgcttaaaacactgactggtaactagtgagtgttatattaactataaccccactaactgggaggtcctgaagcagggaagtaacaggatctctggccatagagggtcaagggtcaaagcagggagaccattaattaggaagcggttgcaatgatcccaaagacctggatggtagttgttgaggctgtgaaaagtagtcagattctggatagatttcaaaagtagaaccaatagagtttgcctatggattgaatataaagtgtgggaaaggaaaaggtgtcagagttgactgtgcttgttatggcctgaatatccagaagaaccaagttgccattcagataaagaacacagaagtggaaagtttggagacagaatctaagctcaccctaaggatgctgagtttgaaatccctgttaggtctatagatggagatgtcaagtaggaagttgcatatatgtctggagtttcaaggaactatataaagaggagtaaagcctagcccaatgtaaacatcaataaccgattgataaatgatctttctctcttctaatctcctataatatttatagtgtataaatccatttgaaagttaatcacgcattaccttctaacacatctctgcctatttacttgaatgtataattgtttatttacttgctgatcacatatttttcttatctcactggtagacaggaaattccatctaccagagcaatcgcttcctaattaatgttctccttgctttgaccttgaccctcaaaggcagaaagtaagcctacttttttttttccgagacggagtcttgctctattgcccaggctggagtgtgttggtgcaatctcagctcactgcaacctccgcttccagggttcaagcgattcttctgcctcagcctcccaagtagctgggattacaggcacgtgccaccacatctgctaattttttgtatttttaatagagacgaggtatcaccatgtgggccaggctggtctcgaactcctgacctcgtgttccactcgcctcagcctcccaaagtgctggtattacaggcatgagccaccacacctagcctctaagcttccttcttgctccattagtacccagcccaaagccttttacatcgaagctaaatagggatctgttgattatttgatatttttaagcagttgtcactaatatgcaaaattcagttgataaagatgcccacttaactcttaattgaaatgtccaagagtgagttaaggatgaagaaagttgccaggataaatacaaggctttgaatattgatacccttcagaaggctttggcattcaaaacttcataatggaagttgtatcagagtctcattcctgtggtctaggttctgaatctttgtgcagagataagatttgggctggcataattgtagtctagcctatatagtccaaagtggagagaaattgctaaatatcaaaattaactaatgtagattcttatttaaaagaaacacatgaatcctgacatctgagaccattacaatggcctgttacgatgcagtcaagtttaacggggaaaaaatgaagaaattcctttaaagctttaattttatctctcactcaaaaaaactttttggtgggagaattaacagaaactttcataatttttttttacttcctttatagcatattttcttaaagttctcagacactaattcaatttatgtagatttactattttctggttaatgtctattatttcctatgtcatttactcatcaccaaccccagaagttagcttcattttaagtctttttctttccccttcccccgaaagagaatgtttttctgttcacactttggagtttagaggtggcacaagaggagaaagaaaagcaagtgttggtcaggctactagtctcactttggttatatgaccaatacccacacaccagattcacaggtctcaactcaaaagtgaaaaaaaactttaaaatccatgaacattctggggtttctctgaaatagtagaaaccataacatttaaatttaggactgccaaagatctagcatatacagcaagccaaatatggctttgtcttgaattttcgtctaaggcaggaaattaacaatagcctaaatttgcggtgagttgggaaggtgaaatctcttctgtgagtcaaggatgtgtgcacttatatggcaaacatttctgagtaagggaattgcagttactgctccaagacctccctgacaagtcctctctgttggtgcttcagaatttgctcggtccagcactctgattaactatacagtttgtgggtcaaaatctgcctgcagccatacagtgcttgagctaagaatgattttcacagttttaaatgttacaaaacaaaaccaaaaacaaaagaaggaggaagagggtggcatagggcaaaagatacagagaccatatatggcccaccaagcctaaagtattctgaccatttacagaaaatgcttactgacccctgtctggtgaatgacgtggcctcaaccacaaaggaacctttttttttttttttttaattaactttgacctctacagcgtattttctgttatccccgacaagataccagggaacttggttttttccctgggtacctgttgttcacctgagggtctgagaactactatgattgagaaactctagatttcaagtcagagtctcaagtctgtcacttaatattaataaaagcccagataacctagacatgctgactcatttctcctagttggctaaatggggactattatctgtcctgtctgttggaagcaccagaatattgactttttaaattattattattttactttaagttctgggatgcatgtgcagaacgtgcaggtttgttacacaggtatacatgtgccatggtggtttgctgcacctatcaacccatcatctaggttttaagccctgcatgcattaagtgtttttcctaatgctctccctcccctttccccccacccctcaacaggccctggtgtgtgatgttcccctccctgtgtccatgtgttctcattgttcaactcccacttatgagtgagaacatgtggtgtttggttttctgttcctgtgactttcgtagaatcacattgtaaactaattcacattataaagcgatggagtcttgcaggtcggcaggctcacatggcttataagaaatccacagtatgctggtcagaattcattgtatcccctgggtaactcactcagcaatatagggaggtgatttacattaggatttcactgtatttgttccacacccaaaaaaaggtggtacagtgaacaagagaggccagtgagggtgttatcaagcttctacttgatttgctttttgaccttcagcaaatccccacattcgggtcccccacttgtagaagacaataattcttctttcctgctcaagtactttgagaacctcatataaggaagcaagttaaatgaaggaaatgaattatttatgaaaacagtaattccatatctttggaacatacatttgtttaatttgtgtcctatgaatacaatcaggaccagagagggacatactatggaaactatggaaactactccaaaggaaataaattgactctcttcttatccctatagtaaatattctaacctaacaaagttttattatcaaagaatgttaacatgttttgcccagtttcatctttttcagtatatgtatgaagaagaaacaatttccagaatctctaaatcctgagctaatgtttctatttcatttcagtgaggttgaatcttgaatatatgaatattatcagattcccctgggaaagaaagcctgtgtcatggagtatgagtttaaacagtctaccataaatgggtataacatggagctttaaagcacatagaatctttggaggtattttcccttgtgaactaattttgagttgcatcccaaagccacagaaaatggacaaatgaattgaatggcttctctctgggtatgagaattaattgaatgtaatgagagccttagtaattagcaacataaatcttcgaggtaaaggcttactaaactccaattacgccctgtatcatcttgttcagataatcttgcatctttttaattctccaaattgtaccaaatttagaaatgattagaagcaaagaaaaaatacacagtgtctaaaaagaaaaatcaaaacagcttaaaatctaaaaccaacacagtgataaagaaaatcggaaaaccaagtatcggtgtggtgattgggggaggtgatacatagaaacttataccaaaaacaaagcaaattcaactatatgtagatagagctatagataaatacatatcacacacacacgtatatatactcatatatacgtgtgtgtatatgttatatataatatatatatattatatatataatatatatgatatatatagagagaacattatacctttagtggatgtacgtgttttgggggaaatcatactgtggagatgaaaaacatcatattaccaagtaaaaacatgtagttttatggctagaaaaagtatagactccaacaaattactgctaataaaacgtctgttaatttttaaaacataatcaaatatagaaaaaaactggtatgcttgtttggggttttgtttctttgccttctagaagagtagtttttaggattttctctaaacgccaggcttcaatataataaaactttgtgaaaactgagtaatacagttgaggatataatgtgtcttttggcaaaccagatataaatacagtatttttgtcagccttcaataagtttcttgtggatagctgttttattctcagattttattttcatggaactgatttactctgataggggctaaagcttagggtttttgaaattcatttttccaaatctatttcattctgctggaacgtattttagtttttaagaccatgcccaatacattcaatttgcatgcagtgagtttgtcatggttagattgtctaaacatcagaaactcaataaacaactgagacaattgcaccttgcatttggtaggcacagatgacaatagactgctgctgccctgcacttacagtttggtggcagacacagagctcaaacaaatggaaaattgtaatcatgataagtacttccctgagaattgcattctaccttaccttaaaactgcatcctttggacatcgcacctcctcaaatcagtcagggaaggcctcccctaaggcagtggcaatgcagctgagacctggagaataaatagatgctaagaagaaacagaaaaacctctgtacccagaaaccacatgagaaaatgccacatgccagccctgatttacattgcattgccatgggtgaggaaccagggtgtgtgggtctgagtcacttgccaaagcacttgctggcagtgtgatctctgggtcagctatttaaattctgtataccttggcttccctgtctgtaaaatgagagtcgtgagggtgcctatctgccttagtttcctatttctgctgtaataaatgaccacgaacttagttttaaacaacacacatattgtcttacagttaaaacacgtgtattacatttctggagatcagaaatctgaaacggatctcactgggctaaaattggcagagctgcattcctttctcggggtgctaggggagaatctgtttccttgccttttccaagttctagaggctgcccacattccttggtttgtggtcctggttcatcttcaaagccagaagcatagtgtcttccagcgactctccgactctgatctctgactctcccaccttcctctttcactcgtaaggacccctgtgattacattggccccacctggctgatccacgctcctctcccatctctaggttagctgattcccatctacagcctggattaccctctgctgtgtaaatgacataggcacaggttctggggattaggacatgtacgttgttaaggggctgttgttctgcctaccatactatctatcagggttgtttaaggattcactgagtgaattcaagtaaagggcctgtaagagtgcctggcacttgctaagaattcactaagttttagctattattattgtgtatattgtcttattgaaacaaagaaaaatttacaaacttaatttactttaaagaattgttatagaaaaaagaatctgttaagcagaaacttactttgtgcttcataaaatgtgtaaaaatggaaattcaaagttagcttatttatgagagcactgaaatacttattgaatagattattcacacaaatagattattcaaagaacataagtttatttgagttctcttctgtgttatccactaattgccagttttccgaaatttaactttcagtttcttctgttttcctttcatcatttattaaaggaatgttgcagcctttaatacaactgaaattaaccatttaatttcaactttgtcattctcaaattgtgccaaatttaaaaattataaggaacaaaagcttgaatgtttaggatttaaaaccaccacaatcataaagaaaagtcgaaaatcaggtgagagagaatgcattttaagttcagtaggtacaactgaacttactaatttagagatggagaatagattgtatctcatttgtaattttaaagttatctcagtgtttttaattgtgagtagattttttattacagatttgtaatcattaagaaacttaagaatgcaaaattacagcatcttgattcttctaccaataggtactcaatcaaaggtttgatgaatgaatgaatgcaagccatatcttatgggtcataaaggtagaaagtaggaatctgttaggtggaaagaatatggattcatttggtagattatctgcatccttaatattggtcactgggtaatcaagggccttctttgctttcatacactttatgagaactgagtaacccacagattaccttaaaattctgctttatgaataattggaggaagtgaacatggaaataatgtccaaaaataatagttctttgctgagcacttccaattctgatagtcactttgctacaaactttgcacagtattctttatttgttgccacagtccctctgaaggatattgtgatttttgttccaatatagttaaggaagaaattaaagcacacggagtagctctgaccaattgaaatataacataagccacatatgtaattttgaattttctaggggccatatttgaaaaagaaaaaaagcatattaagttagttttaataatatattttctttaaacctatatatccaaactattattatgttggcatgtaatcaatataaaaattattacaatacttcatagtttttttcacgccaaatcttcaaaatgtggtgtacatttatacatataacacatttcaatttggatgctaaatctttaatcacaaatatttgttcagtattcagatttcataaaatttatagttgaaagagtaaattcatattccaaagtttctccaaaactagttaaatgttttccagttactagataaaataatcaattcttaaagttaaatcaaagttaaataaaattaagtaaaattaaagatttagtttctttgtcacactaaccacctttcaaggacttcatagccacttatggctagtggtggctgcattgaactatgaggtgtagctattactgcatttgtccaaagtcacccatccggtgtggccctaggcaaatgtgtacctgccaccttccctgcaagcccagccacacccacctctttcacttcacaccctgctacagtgcaaccgcgcccattcctcccattccacccacctcctctcctctcttcacctgcaatctggccatgcccacttctttcactccacccacctcccctcccctcttgcaacccaaccacaccctcttcccactgcaccttcctgccctccgtgtctctgttgactcaggtctgggatctcttgcagtggcatttttctgttcaatatccaataatacagtggcattattctgctcaaatggtacttctctttaaaagtcagggtttttaatatagattatatagaataaaatgttagaaatttgatattatagaatccagctgcctcactggaagatgaaatccaggcccaaacaggtaaattgacttatctgtagcttctacaaagttgctggcagagcaagggtatttgttcaggtctcaaaatgatgagacccacattctttttaactacatggtatttcctcctcttaatccagaaataatgagctatagttccaaggtatgtgcagaattttaagtgaaactacatagatgctagctacaaaatacaaagtaatgtcaatagcatagcaaatcctatccagtttctggttatcttagaggaataaatccatttggagatgaaagccaattctgtcatagggattcttgctccaaactagttttttgacttttctttaaggattaaatacagagataatgagttcaagttaatctgtagagtaaagctatgagcagaacagatgctgtggagatacagaatgcaactgtgggggctcatgggtcccacggcagagacaacaaagagaaaaaaagggaaaatcactttgttgtaatctcttcggattgaagggtttatagaattctattttgggaacagacatctatctctgtcatgttgcagaagtctgaatccggaaatgtcgtgctagaacagaaacagaatcatataatgacaaaatctgggtattgatatcaggcttgttgtgccttttgagaactgtaggacttcggataattccctgagttccctgagcctcagtgtccttatttgcagcatggtggggattcctcacaaagctgttggtgatgatctaaatgaaaactgagtaaaaacactgatcacagtgcctggatcactgagggactgcacctctttttaatctgtaaaatgaggaaaatacctgctgcccacctgcatcatagaaatttaagtaattacttctacaagtagaaacatactgtttattagattggattaattctggggagacgttttgacacacatgactacccttcagttctccactaataaggaaactagaatattaaatagaacactcatcaggtgaacagagttgctcaaaaagacgactcagtgaaaaagccagtgaacccaatgatattccccaaatgaaagccactgggggaaatgagtgagccaaaaggcagagaaagggatcaaggacaaggagagatgtagacaaggaagaggctcctcgagcagggaaagaaattaagcatgaaactaaagtggcctgtggttgttaaaggggactgtttaaaggtttgctttaaaaccggcctgcttttctgtcactctaaaggtgacacttcagtctgtgtcatcctccactctggtttttatttccttaaagatgttggttctttcatagtggccatcctattttgtctcatttttgcccatgctgttgaaaagaatgctgatgggtttcaagttaaagattacatgcatctatttcttccttttagctctgaaaattgagtgaagcatagcaaatctgtgattaatagaactggggtagtatcacatcttcaggggctggcatgatgggcatcggaggcttttgttttgacctccaggcaaatgaaccagtgaacagccctggaggactcatttgcaaagaagtggggaataaaaagtctcatcacaaattcgtcttctttttgcacaactataacaaaaagaaatgatgaaccatatatgtgttcatcacaaaaccgtaaggacctttggaatcacccaagttcacctacagaagcttttcagatctgttcttagaagatgttcgctacagatgtggttaaggtcattaaagaacaccaagacgttagatgactttcttaagggtggagattgaaaggagaaacgttaggattgtggagtgatatcatcactgagtgagttaaaaagtaaccagagaaatctggtacccccatttgagaggactgctgctgcttcacacaagtgcacatttttaacacttccttggcaaaagccaggagcctaatttcaaactgagaccgccaaaaagtagaaaaaaaatcacagctgaacagctttgccctggggttccgcagaagacactgtgcctctctgcagccctccttatttcctggatttggcaagccctacattgagttcaccttcccaatcttctgcctctgtttggttgaagtgtagggggtagttctaagtgtgtgtctgtctgtggctctgtttgagttacagtcagttaaagagacgttcacaccttgtgttgcctttaaacattcagccctattcatatccatagatgcactataaatgtttgcatgtgcacataccatgtagctatgtagctggataaagactcgtttatgatgttacatccattaacctggtaaccagatttttaaattgaccttgtatgtatggaaaaataatctagtatcttagtcagttaggactgaatctgtcattttagaatcttgggaaggtaaaagcagtaaggatttgaaattattgttatagaattcataaattttagcagctgtctcatttgatcgctcaccttctagcagtaaatatcaaattatcaccattttacacagaattccaaatcccaaatactcaataccaagtggattaaaagcagctatgtgccaaagggcagtcattgaagtgggaaattagggagaggggctggggaggttgcaggagatgagaactgttgtgtggggttgagcttcctcaggccccacacctgccctgcctgggattgtctttttccttgattcatatttcctgtggttttatgaatcaaaagtttaaactattcttagttccgggaggtcattttctggcgctctttttaaaataccacatgggaattatttcggtcagcaaaaatactgaacataccattttctgttagctctctccttgccatgtttgtttcacacatacttgatttctcagcaagtgctcccttttacgatcataatcatggcttaaatttaacattgtttttttctccaaatggttatcttactctatgttcaaaagtttagatttagaggactcagttcaaaattcagctcgtgatttccatttagatgttttcccaaaatacataatgaataagtatcagaaaactgcagttgcagaagtataaaaaatcaagacagagtaaagcctctccattttttctttttatatatttttaaattgtaaaagaagtatatactatgagaaaaatataaatactgcataccagtataaaataaaaattgaaaacatttgaggtcatttttttaaaacttcttccctatagtcccacactcctctcagatccctacagaaaaccattattaacaactacatatatgtggttttttttttttacaatatggatttccatgactcttaacatctgactcattaagagaaggtctttctaattagaaaattaaacatgatcatggtgtagtacacacaacacagagccagtttgaggcttaatttcctggtgcgatttggtaaggaggcctattgtactggctattataacgtacttcagtcatagtcaccaagtaaagtggcaacttcagaaacctgattataaaatcatactttggggttgacctacccaatgccaagacattgggcaaaaacctgaaattttacttattatggagatcattaagacatctgagggtaaacattttaacaccagataagactagaggataggccggctgggcgcggtggctcacgcctgtaatcccagcactttgggaggccgaggtgggcagatcacaaggtcaggagataaagaccatcctgactaacacggtgaaaccccgtctctactgaaaatacagaaaaattagccggacatggtggtgggcccctgtagtcccaactactcgggaggctgaggcagaagaatggcgtgaacccgggaggtggagcttgcagtgagccgagatctcgccactgcactccagcctgggcgacagagcgagactccgtctcaaaaaaaaaaaaaaagactagaggatagggtgaactttatccatttggtcctgatattccatgaacaatggacagtgtcgtttcatgtactcttgttttagcagctacaatgttttaaactgaaggggtttgcaaacatgtgtaattcccgcctcctttatccctgataccatgaaatgtgagcctctacttttttttttttcatctgagtacctgcttctagatgagctatttaactttattaccatgagctcgctggtatgaaaggtttattcatatttgttcacagcctcaataaaatataattggccataaagccagcaagtgttgaggtctaggtccaaagaaacttaatatgtagcccattactctctttgtcacacttagtatttttcagcatcttaaaatgagagttattcccctctttctcagggatgctgtgtgataacaactgaggtttaaaggctgtgtgatcagttttatgattcgcatattgacagtagtagtcttactgacttccagaaggaggaaataaagacttgagatttctagaaaatagcgataaagcaaacatctcccttttgttgacctgaaaattatattctgggatttacgcatgcataaaagaagaaagtcagtcttatataaatcttaacaggccatgaagcatttggtgatggttattttgtatattcaaaacagcctgtgttgtatcatgctaatgcaaagaggccattattttcaaataaggttatctctctatagggaggataagacgacaatcaagggccacggggggtggggggtggggcaccatccaattgtgctttcctagttgccgatataatttttaagtatcaagaatatgcaggcccttcagaaaagtctttcaaatcaaattggagggaatgagagggctaagagtggatggtgtataggctgcacactctgtaatgtttgccaaatatctgaaggcgtcagagagtctgttgtgcccgcttgcatgtttataggagaacgttaatcaattagttccattctgctatagatagtaagtaattacattcactggaagccacagcaatgtgattaataatacattccaatttcccaaagtagcatttctcccagaacttaaacatggctctttgaaaagtacatttttgtatataagagacgtggttgaattgaaatttattcccccaaaaataatactgtgagaagaaaaatacagagttttatataatgccttccgactcttcctacataaatgggtaaaatttaagttactttttttaaacaattttcaaataaattctcaagaaagagtattttaggcttaaccagtattttatgctatatggaagttttagggaagccagttaatttcttaataattatggagcacctgctattttcaagttctgacactaagctctctaaacgatagaaaggtaattaagctactatctgtgtatttaagaagatatcacaacaataaggcatttggcctgtattaagtgaatacaatctaaagggaaataagataatttccacaagaaaagcagaaagaaaagtgccatgaggtttcaatagagggataaagaagacaagaatccacccaagaaggattgtatcatagcctatatacagaatcatactcagagataaaggcagaaaagttaactgcagaccgtcttgtgtaggaacattgaccttgaaagggtgcccaagaatgcctacttgttgggcattcagtcagaaaacgggtacttttcctacctgccaggctctgctccctctctgacacaacatgaaatctgggcacttttaggattatcaccaaacctccttgaactttgcacacactatgaagttaaagcatttcccatcgaataagctatttgttcaatacatcaaaaaggctgaatgattatgtttttggaaaaatgtgcctcatgagatacacaatgtaattattttctaaaatcaaccctattcattgctgatatttttgcaaacaatggaaaagttgattaatgagagttcttgacttctaccaaaagaatttcttttttatttgatatagtggtattgacataaaccatcaaagagaagtatgtttgctgcggacatccatactagaaataacttggtagtttagtggacaacacattgtcctatgtctctacccgtagccattgtgaatcattctctcagaagaatgtcttgtatccttgaagtatgtgttcttatagccgggctgttctccccttttgaggttcagtggccgaagggagaagagaaagaaaaagaaggaaaggagatctgcatttttgagggcatgttaccaaaaggtgaaatttaacattaatttggtaatattcaacaccagtcatcaccttttcttagaaatattcaaaggccacgccaggcatggtgccttacacctgtagtctcagcattttggaaggccaaggtgggccgatgggttgagcccaggagttcgaggctgcagtgagctataatgatgccactgaactccagactgggtgatggggcgagaccgtgtctctatttaaaaaaagaaaaaagaaagaaacgaaaaaaaaaagaagaaagaaagaacacatacttaaaggccaggacttaaagctgtagaaaaatcattattttattcctgggtccatggttcctgtgcctctttaagccctcaataaggaattactgatgagtcaggtcatatctctttcaaagaggtttgttattttaagatcaagctatattaaagaatcgtttgcatttagaaaatgaacaacacattaaagtttaaccaatcatcaagtatcccttattattacagcagcttattatttgtagttgttctaattcactttgaattctatgacatatttttattacatccacttaaatacagtcatctaaatttcaccaaggaaaacacataagacatctcacctgtgctaacaccctccgcatcctgtattttatttctcctttcaaacataaagttttaaataggtatttcgaaaatataacatgtaagaaatgactctattgtaaaaaaaaaaaaaaaaaaagaattttagaccaaattgtgaaaacatgtgattgtagtttagctttcttgttccaatagtcagttggactgtacatcaaattcttccctttgcaagaagaagtcatgtaaaatgtagataatgaagaaatagatgaagaacatcaatgagaatgtgacattgcatccaccttttcttaaattgtgaaagacaagtaattgaaaattttaacttcgagtaactaactttcatgttacagtccttatatttctttcattcttaatataaaattactacttgaaaactgtttacttcccctttaaaataaatctctgtcacttcttagaagttttgcttagcatcacgttctcgtcatttacatgaagaggtttgagccataccattaattgccacactgatttctcacatgagctgactctgcctcaaaatggtttttattcttttaaattaaagaagaaatttggtgcaatgtaatgattactatggcttaatcaatacaagaaatattctcttgtcctgtacatttaaggagagggcattctagttagacagaacagaaacacaattttattactaccttcaaaattttggcacatgattcacatttgagaaatcttcacgagtaaactattgatctattgcagacctgtattaactgcgaatatatcagcagtagaaatccttaggattattgtctaatgtagaggcatcaggcaaggcttagatcagagtctcagtcacaatattcttcccaaaagacatggtcttaaacgtgaaacccttaagggttccagactccatgccagcaggccacgaagggaataaatgaaacaggctagacaatggctcaaatcggattggtgggtagcatagcaaactagggcaggcatggcccatccagagggttcagccaccactcagcttggacaacagtttccaggtcaaaaggtgggatcagtatggtcagatctcgaatttttcaaaaaaaactagtaaccagggtttatatacaaaaatctcccaattgttaaatgctggcaacaaattcatataccttaaaacattttttggcagaaaaaaaatacaactgtgggactaacttgaatcctaggctgcctaattgttattctcttttaaattttcattagggtttcactttaattcagtattccaacttcaaggtaccagtgagaactataatgtctgcaatccattataatatacttggctgatatgagtggaaaatgattttgctgttaatgtaaatgtaggattaaggattatatttttgactttgagaaacatgcattctggctcctaattcagaaagatttccacaggtataattgaatagtcacaagtcagactatcttttcttgactgtaaaacagtacaagcggaatgtggtaataaatatctgacacttaattttcagcaacataatgcaagtaggagatgtgagtactaatgcatcaaaagcaacaaatccttttagaaatctgtttacaaagcagatcagagatatcatcggttattgaaaaaagtgggtagagagtggactctcatgttccatattttccctttaactgagtcataaattatcttccatgctgactacagtgcttatttagtgcttactatacaaccatgaaaatttgttcatgcctcactctattgtgctgagatttcacagaaaccccgtgaacccaatgctacatacctaattatgtgtcaatttttgtccaatctcagaaaataactggaagtatttatttaagttatgcattcccctaactgataggcacaagtatcttggtcaaactgctatgaaaaaatgattcctggtagagatgtgtgatttggctggggttcatttcagggaaggaacagaccaaaattgggacagatgcagaggtcttgccctgaagcctgtcagccagccaccatgctgtcaattctttgttttagcaccagtgcaacctggcatctgccctagttcagattttcatggctcctcaataaactcctgcaattcctgtaccccctggagaagatgtcactgacatcttcttatgctaaaaaatttgaaattctatctcactagttttctcactgagactcagttgcacagatcatttcctaaattgtgtgacacagaataagatgtaccctgtaagaaaatgctgctatgtggccaggcgtggtggctcacacttgtaatcccagcactttgggaggccgaggcaggcagatcacaaggtggagacatcaagacaatcctggccaacatggtgaaaccttgtctctactaaaaatacaaaaattagctgggcatggtggtgggtgtctgtagtcccagctactcaggaggctgaggcaggagaatcgcttgaacccaggaggcggaggttgcagtgagccgagatcgcaccactgcactccagcctggcaacagagcgaggctccgtctcaaaaaaaaaaatgaagaaagaaggaaggaaggaaagaaagagaaagaaagaaagaaaaagaaagaaagaaagaaagaaagaaagaaagaaagaaagaaagaaagaaagaaagagaaagaaagaaagaaaatgctgctatgcaaaaataagcatgggaaatatcacatactacagactggagagagagttgtgttgcacaatgggaattggagctctgaggaattctgcagtgagaaggtcagtttagctttgttcaacgcagcatttctcaagtttagttgccattgtaaatctcttctctgtcatcctggctaacatgttgtgaagctctagaatacagttggggaaacactgatattgacaagagaggatgctactcaaggcttccgagttgggaataacttgatcagacctggctttcacaaggaaggttgctgcaacgaggaggattacaagaaaatatacaatcattagaatttggtgatgggggccgggcgcggtggctcacgcctgtaatcccagcactttgggaggccgagacaggcggatcacgaggtcaggagatcgagaccatcctggctaacacggtgaaaccccgtctctactaaaaatacaaaaattagccgggcgcggtggcgcgcgcctgtagtcccagctacacgggaggctgagacaggagaatggcgtgaacccgggaggcggagcttgcagtgagtcgagatagcgccactgcactccagcctgggcgacagagcgaaactccatctcaaaaaaaaaaaaaaaaaaaaaaaaaaagaatttggtgatgcgttcattgtgcacataagggataagggaagttgaaaatgagtaccaagtttccagttttatcacttaggtggatgattatgttagtaaaatcatgataaagttgcatggaagggtatttagaaggaaagggaatgagcatatagttggtttgctttttggcccttgaaaggacatatggaagaaatgataatgaaattttcatttgttagacttttagtactttctgatgcaaatctctcatcacagcacctgccaaaccaactcctctaagctctgtaaagacaaataagttattttattcttctggttatcctgaatacttagcacaatgtctgtacccatttacagtgtaaataaacatatggttgcaaatagttatatggttacaaaaagaaaatgaccttagctaggtcaaggaaaataaagagtgcaggtaggggaatcccctcagactggaggaagagctaagcaagaggcctcagtaagcacggcgggagcaggagcccaggaacaataggaataacaataataattataataatgataataaatgtgcagcattcaagacactgtctttggtataaatcatggctgttttctgcctttatatatcattcctctcaaggttcaagttcagagaaggaacaatctgattggtggaggtgggtcaggtcaccttgtttgatgtgctctggaaggtgaggggatagaggaggtgttccccataggaaaatcaaggtacaatttccacaacaaggaggactgtatatgtcacacccatattgactctgcctttttctccagcagatgaaaagctcaggcttttatacaaagactcagtcttggcaatgactactgaagtcaacccaaagagcagagggggacaaaactgaacatcaggcctgttggaaaggaagggtttcccagtgtcggcttccgttttgcagctgtattcaaggcgaaagtaatgagatgttaaaaatacataactgaatattcagattttagcaagatattatcaataaattaagtgggtgtgaaaacagccccaaaattatttccagtgctttatttacaaatcatgtcaagggcaatgtcatctagtgagaaggcacagctgtttccttctgaagtagaatccagctgagagcagggaatgagagacagtagcatctttttgggtgcatcatctggactaaatgtggagaaagaggagctctgattgaaaaatcatttttcttgcctaagtggtacttgaggtaaaaaaaaaaaaaaagaaaataataaaggcttattttttggggtccggttgtaggtttacctggaaatggctgatacaagttgttttatttaaaaacacacaaacatagaagtttagagtttttttaaaaaaagcttcagaacaagaagtccagaaagattactgtttttgcctgaggtcactcaacctatcagcgatagatgttgaatacaggcttcctgatgccatccaatgctctcctcactgtgaatgcagtgagatgcactctgcctaaaagaaaaaaagaaatggcttatcatggcagtctccactctgtagttatgggcagtgagaaagaagaagtcaacacaaattcagaactggttcctgaaaatatgttccctaatgccaaccaaagcaagaaggatgccaattttaaatgctgccaaagatcttttgatgcagtctaggtagcggatctccttcccaatctatgatacccttgcaaaagagaacaaagtcagattaaatgtctctttgtcagtgtactttaatacctttccgtggccttggaaatttattcaaaggaaaaagaggaagacggggagaaaacaaagtgcaatactcttttctgctgttcacaacatcaaattggtaattataatgttggtatttgccacatgccagtaggagatcccgcaccgttgaaacataaagaggatactgtttattgctctgggaatttacagtcccgcttaggcagaaaagtaaccatgaaaagttcttttttttttttaaacatatgatattggttaaaacttggctttcttaacttccttggaatttgagtcttctttgtgggataaagggagatgacagaaataggataattggaaccttttgtagttgtgcacagaggggatttaaaaatgaaatagccagtgttgcaagacacaatgagcacaaagaggtcagttgtggaaggagtgagtgtgcaggggaagagaggctgtttaacctaattatccttatccaaaccaaggggtcttctggctactcccttcctttctgaagcatcctattcctttcactgccactttcgaggtgccctttttgtgcccggagctggtgccctttttgtgcccggagctcctcctcctaatgctcaatgcatgagcagctaggatcatcctgcactcataaaccatacactgtagcagcgcagctcaagatgacctcaacacaattactttataatccaacttacaactgacatccactgagcattttattatattccacacatggcgctaagcacttcaccaatattctattaataagcctcacaacatctaataaagtagatactgtggttatctttattttgcagataaggagactcatttccagagaggttagggaagtcacccagaggtacctggcaagtaagtgtgaaggccagcacagtggtcttacccacagtggccaacaccacagtcccaatgacatgctttcatgcttgaaacgtgtatcctcatccccaattccttgggcctttgcctaggtgaccagtttgcctcttctgagataatattctaagttattgaagattataatgggtttgtagcttttccaggcaagtgaagctgcattttaatagagacgtcccagaacagaaacagaaacctaggcttatgcactaatttgaatagtggtgttttgagacatgtagagaagtgaaagagggcactgatttgaaggacagtaggtctgaggttcttccaagcaagtcagctcggctttcaagaggtactaactctggtccaaagagaaatctccaccatctgccaggagatccctggctctggaagccatcatcaaggaaatactggatttggtggctcacacctgtaatctcagctaccaggaagctgaggtgagaggatctcttgaaaccaggagttctagactagattgggcaacatagcaagaccccacctcaaaaaaaattaaaatgaaaaaaggtgtgatgatacacatttgtaatcccagctactcagcaggctgaggcaagagagtcatttgagcccaagagttcaaggttgcagtgagctatgatcacaccgctgcactttagcctgggtggcagagtgagaccccatctccgaaaaacaaagccgggggggggcggaaagtaaaaactaaatactagatttagacctagggttggggagagatttttccctgccctcccccaagaagttttggcaacttctgaggacctcagtggctgtcacagatgggcacagcagagggcggggagtttgctactggtatccatgggtagaggccagccagggatgctacaaaacatcctgcaatacaagggacacccccacacacaaacaacaaatgatcagatccaagatgtcaatagtgctgagtttaagaaaccctgatttagacaatacctgagggacatgacaagcatgaccaggtttacaaattccaagcacagccgtggccagtgaagaggctggctttattccagggttttctcctccatttcctaaacatgcggtgtgatccagctggttagttaattccacctgactgagtatacattaggaaaagagaatatttgattttataaatgagatctccgtgcagtataaaaatagtttgtgttgggaggtagtgccacagagggcactattatatgattttctgcctaagaaaactattaggtgaaccagcttctgaggcattgtttctcaaagtgtggtctgtgtagtgtctttaacaggcatcacttcgatgctctttttttttttttttttttttttttctgaggtagcgtctcgccctgttgcccaggctggagcgcagtggtgcaatctcggctcactgcaacctccacctccgaggttcaagtgattctcctgcctcaggctcctgagtacctgggattacaggtgcatgccaccatgcccagctcatttttgtatttttagtagagacagagtttcaccatgttggccaatctggtctcgaactcctgacttcaaatgatccacccacctttggcctcccaaagttctgggattacaggcatgagccaccgtgcccgccaatggatggtctttataaagccagattactaaaccccccaaatgagagctactgagctcctggttagggtcaaggaatccacattttaaacaacttatccatgtgattcttacaaacactggagagtctcttctcttggggttatagtagtaactttcaaagtcctactattgtccaggtcccaaatcaagtctcagtgcttgtatgaagaaatcctgcttcaccttggccaacacaatgttctcctttgttttcagatgctgcaacccatattcttcatttgtcacttcgtttctgccttttgtgttttatgtgtaccatcatctccccacatggactgtgtatagtctgttctaattctctcttatcattgattcctggcactggacagacacgaacaatgtttgacagagagtcattctcataaactagattaaatacatatgggtgcccttatgagaggtatccaattcttgtttctctgctatttcagttcttcttgtttacctagtgaggtgcagaacacatacccagaggttaatttgccctttaattggggaccttaactactggacttcaaaatgtcaagaatttactgcagtgtgcacaactaaataaaggaaattcaacaattagttatctgcaaaacacaaagttcttgattgcaaacccaagaccctaccattattctccaatttccacaatgcaaggcattaaacacttaaatcaaagtattgtattagctttatctcctggtggaggccttaaaagacacaaatgcattacggtgccattaaataagtggtttgtggagtcgactgggttacagggattgtacctaggctaacaatctgatccactagcaataaattgttggtctagatatctggttgccttcacactcagcaattggcatttacatgacaattagtttccttctcaaaattgcttaggtaataatgctttattgccttccatttataaagacaaatccttctgcagtaaaaagacagccacaagaataaagcatatgtaatggtggtattccataaattgaccaatttttccattagagctttacagatttgaaagaccttagtctccccacaaaacttacatacaatgtgcttttcagggtaattattaaacagtgagtgacattcatattgaaagcaaggtaatgagtagtttgaatggctacaggagggcaattttaggtgcttgttttattttaaaggaaataacattggtctgtagttaattttgccagtagtgggaagctggagtaggctccaagccagcaagcagacaggatacctctgtctctagggaaaatgcaattggaaaacagtccctataagataaaaagataactgcattgattcagatctcctcagcctcatcttcttggaggctgtatttgtgtgtcttcacctgatcatttgtggaagaaatctgcttcagctcggaatgcttttcattttctttaaaaggtagaggaaaaatagtataatgaaaaatatattgctttggagttgattactttttaataggaaaagaacactgtattctaggtgagaattagctgcatgcctttgtaaagagcagtatcaatccaggcatatatatttgtatgaaacatgtttagaaatgctatgagctagctgtggtatttttgttgttgtcattgtcattattgttatgccctggcttctgaggatggaggcaagggcatgtgagttagagttttgtctccataagaataaatgtttgtcccttagagatttcccattttcaacagcagagcaggctgaagctggaaatattaaaatacacatgacttctcgaagacagttggatgcctttagcaaaaaaaaatcaaaaacttcaaaaagggtgattaactaaatgcccaacaggaaattcagaaaataataaaccctaaaatcaatgtattttattttctaaatatcacactaagatacttattggtaagatatatacatatctctggactataatttttttctggaaatggatatctctgaccagtgatgaagtccactattgaaaaagtataactccttcactgtttgctgttagattctaagatgggctctgtaaactctgtaagaaatgaatttcttacctacccaaacccctctcccatcaaattctgatttgatgagaattctctaaatgagaattttcaccttctaacctattgaaattcagtactgtgaacaaatattacaactttatacctgtctgaaaggctataattggagtactatgttattttaatgcaatcaagataattttatgcctatatacctgtacagacatacacagcaaatgcacaacatctaccccacacacacaataagcatgcatcacacacacacacacactgtgcacacacagactcccacatgcaccacacacccacaaactgcagtctctgttattgttggctcatctacattctcactcatgtgcacagcaccctttattttccaagaaatttctaaatactgtatacgattagattggcacaaaggtagttgtgggttttgccatcatttttagtagcgccattttaaaaaaccactattttaaaaataatcgcaaaaaccgcagttacctttgccccaacctatatttcacagacattgtccactttgaaaactgtacgtttagaaatacgaggttttgtcgtgttcatttaaactcccccagacaagtctactctcattggtaacttggagctgctcagttgggttgacctttctagcaggaagcagtgagcctgagtaccactaactttaagagctcttctgcagggctgaggctcaggagagaccacagtgaaggaggaagtagatacttgctgctttacttcctttaagcagggtgtacactggttgagctgagcctgcagatgcaccatggaccagtcttgtttttcctatgacagaaaggctgtgcagcaaactaacctgcaggcaaatggggaaatctactggaaatggaagagaaaaaaataaaatgaattatccaagcattctgcgataatgaagaagtaatcaatggcaaatgccaaaaagctcaacaggttaaaaaacttggaataaagataaaatgtaataaggaagtaataactgaagtgggaagaaatgaataggaggtgccttaccaattgctcaatttaggacttgtgaatcctgtcatcatgtacatgtgtctaaatcttaagcactatgtttctgttactctaaattcctaatggtacttttggggccattttaatggaatggattcaaatgcattgtcaatgaaagccaggtttctgccccccggttgcttagattcagtgatgatgccatttccggattggatagcctatctaactgaaaatagttagaattgagcatgttaaaacataacataggccgggcgcggtggctcacgcctgtaatcccagcactttgggaggccgaggcgggcagatcacgaggtcaggagatcgagaccatcccggctaaaacggtgaaaccccgtctctactaaaaatacaaaaaattagccgggcgtagtggcgggcgcctgtagtcccagctacttgggaggctgaggcaggagaatggcgtgaacccgggaggcggagcttgcagtgagccgagatcccgccactgcactccagcctgggcgacagagcaagactccgtctcaaaaaaaaaaaaaaaaaataacataattgagcatttaaaaaggactttcacatagtatattgactttgtttgctgcctttcctccaccattatttttcttcctttcttccaactttgttgagctctcctgtgccattcgacttctcacctttatttcgacttctcacctgtatttcactgccagtattttccagtaaatgatctagaagccaattttccatttcctcccactcatttcttagtcccattgcaacctggatctcagtggtcagtggaaaccacaaccaaaggccaagtgtctttctcatctacaccttcttctcagtacatccttgatgttaaaattaaaacacacgcatacaaaattcgagaataagacgtagtagactgtattttaaagacgtcccctccagactgcctgattattcaaacatgaattttcgtacagctgtgaagggactttgcagtcataaattaaggttgatcatcaggtggccttaaagtagagaaatgattccagattgtcctggcctgatcacatgaggccctgaaagccaaggcttttttccctggctacagcagagagatacagaagaagagatatgttaggaagatgaggcaaaaggagaagttagattcaaagtgtgagtgattcagctggctatttctggtttagaaagggtccttgagtcaggggatgtgggtggcctctgaaagctaagaataacccctggctgacagacagcaaagaaatggccacctcagtcctacaactgtaaggaataaattttgccaacaaccttgcatgtgcctgaagacagcttctcccctggagcctccagaaagagataccaccctgttgacacttaggtttaagtcttgtggttctccaagcagagagtcagctgagccgcactgaatgcagatttctgacccatgaaaacagatcataaatggaggttgatgtaagccactaaatgtgtggcagtttgttacagtggcaatagaaaactaatacagattgccagaactttttcttaggtttctgacattttagcattcaaattcccatgtctctaaatcatggttaagtgtcccatcttacttaatttccaaacatctagcctcttctctactgaaaatggcaaacttactttctgactggacaccatgggaccagactttgaattcttatataagaatatgtgagactgtgcgttttgtatgtacatatatgcatgcatatatatgtatatacataaatacatacttacataagaaatgacaaatacccattatgttcaataataatagtttatgtatatacacagataggaatcttagccattatacatacacatatatatattttgttcacaactccagggactcacatatattgtttcacagcaaccctataagctataaactaattgctctattcttacatataaaagttaggcagagataagtcaaataccttgctggacgttatctaatagacagctgaagatttaagcacaagtatgtctagatccaaaactgcaaggtccttagttttcagcctgtctatctctcacactgaatctttttagacattgccaggccctacatccatctctgttcagatgccatgcagcaccttccttaacctcacctgtccaggacattgaggctctgtaatggctccgtaatttccccttttatctctatgccttctcagtatttcctgaattgccctccatctaccatatgtaaaggaacttcaagactgtgttcttaattctgttaatctgttctccaaaaattcagtttacttttagacttttaaatttagttattttcatgactttctgctccacgtctccagtcctaactttttcttaagttctaggcacacatataacagctggactttcccttttgacaatcttctggatgcaacattcaacatgtctaaatcagcattgcacattaaataaaggggggaaaccctcccttcttaccaccctttttccctcactcatattacccatctccttcatggccagtcagaaacctggcatctttgaacttcccttctggctaagacggtgggctcagtagctggaccccctggacttacatcccagctctgctactgactttgggccaattgcttaatttctccagaacccaaatattcctctgtaaaactggagtggtgataacaatgataacaatacttacctcacagggttgttggatgatttaaataggttccataaaaaatttagaccagcatccagcacatagtacttgctcagtaaatttcagctctcattttttatttaattgctagatctttataatttccctgaaatgtatggttatgtttctgttgcctaattttctgtattccaccaccctatgttaatatctagattaatgcaaaccatctctgggtcaaattatctgcaatccagcctgcatgtagctaccgaatgaatctttctaaagcactattgtaattataattcaaaaatcctttagtggttcctcatgatttcaggatacagtggaaacttttccttatcttggcattcaaagccttccatgaactagctcctgacttctaccttcaattgattctatctctcctctcctatttaaccctgggcagtagacaggcagatttctaattttttcttaaatattctgctttggcctgcctttttgcctttgttgtaactaatagttatgcatactatgtaccaggcaaggcaatgtgttgatatttttaagatgtcattttatttatcctcaccacaaacctataaggtagtgactatgctatccctattttacagatgagaaaactgaggcctggaaagggtgagtgattggccaaaggacacacagttaagaagtgatggatccaggatttgaatcccagatgattctgtaattttaaccattctaccttgatgcctcccctctgctacatttcctttccagcaggatgctttcctctgcattcatctctttgattcccacctattattcaaagcctaccttagagatatcttttctataaagcttccccagactccttcaaactctaatgaactcctctgtaggatacaagcttcttaaaactaggaaaggtgttttatttttctcacaaagttcagtgatgtcttgaatacagtacttaataaattctgatgatttattggtcttggatttcttttctaatgaacttggaggcatctccttgtaactaagccaacaaatctctgattgctccttattactggttcttgcccattgtcctagctaggacttttgattaacaatatgtttctaaaactaaagcagaaaagaaatgtgttggaatggtgtggagtgtctcatagaatggttgagaaacaggcttggtctagaaacgaggagaagaaagcctgtagagggcccagcggtgccatcccatggaacactccatgccatgcttctggattttcccctcctttgcatcaacacagactctgtctatctgacatccccatatgctgccgggtgatgcctctttttgccaatatttcaggaagctatgattagcagctgaggaaatggagaaatgagtcattctcatattgcagaagttgaaaagtgggaggaactctaggataaagaactgtggtgcctaaagaggaatagaggacaaaatagatgcaaatattagacagacagaaagtcgcttaacagtttctcaagattattcaatgctttgttataagacagtatgctgatcttctaaaactgtgattcagaaatttaaggcaccattgttggatggatccacagatggttttcagaagtttgtgactcttgaccatgcatgcacattttctgagtgcttatatttttctgatgagtgggttcatagcttttatcagattttaaaatgagctcatgatctaaaaaggattataaaatactatttttagccatcaacatatacacataatctaaccccaggaaatcaggtgatccagagtcagactctcatcacaccatataaggaaaaaataataaatctgaagattctgcatgtactataacatacctgttcatctgtcagatgtcaaagcgttactttgagggtgaaatctgtttagcactaaagacatatggtggaatttctaaatatcaaatgaccagggatcaatggacttctgctcagtggaatccttagtttgcctaactaagccaattacaaagtaatgatataatttatctccccagctgtcattttatagcatcatgctatttttctgattggtttcaaaagaaggtcttctcagtctgcatgctaagacaggaataatcagaatccctttttccctgtctggcacaaatcactgcatgacaaagtagagacaggtgaatggctcaggcctggggtacatgtgtgcctatcaactaaatctaattattactggggaaaagagaacagcctagtcctgtggcctccaaatatttctgcttcacctagtagaaaaaaactgaacatactcctatattgtatatctgtttatcaattatatggcttttatcaatagctaatatttcaaagcacaatatatatatgagacaaggttcattgttaagcataataaatgtaaatccctaatttattctttattaaacatatatttaactaatatatactgaaagccttttgagtgccgcgtgttctaatcactgaggacccagtgaatgaaatgaaattgcatgctcatggaacatacagcctggtagaggaagagaccctgagtaaaacaaataaataaaccgtacagttgtgttacgtgtcagtgactgtgatggagaaaatcaaaacaggaaagagcatctgggtgggtttgaggggagaactgcacttttaaattaaatagccccagagaaagggcttgaagatctaaagatgagggaactaactctgtagctctttgtaactatttgacatacagattcaaggagtccatgtctgtgtgcattctattaaataatagtcaagcataatttctttatttagatagccaatatacaaaaaattctaatatcttcttcttgttctctaaacaatcactttgggaactcccctcggaagatcacttatttagtctacacttaacaagagcaattgctttaaacacaattctcagacctcagccatattattacagttgacttttggagtctaaccagaattataaagtttgggtggctgttttgacagccgtggagccctgttgtcaattaactgttcaattcaatcttgatttggttgcacgggtggttttacatcatatggtttatttagctgtgaacaattctcttaaacgtccaaagtcattttgtgttgctttattgcaggtgaagagggaggatatatgcacaaaagcagtatctgaacagctggtagttagttactcacaggaagtggtaacttgacagctttcctttcctttctgttgagttacattcatgtagcatgagcatttccctttttaccaagaagaaagatttgttcagcctggtgacgcttcagaagagaagagtttaacgacattgatattttgaaatattttgtgactcaaattatagcaatacgatgagttttcgagggaaggtttttaaacgggagcccagtgaattttggaagaagagacgaactgtgaggagagtaaaccaagaagaaatccacagatttagttctgtaggtatccaaatgtcaatgttttgctttccatctttccttcaatcctttctttcaaaaatgattagctctacagtggtattctagcagaggctgctgggtgaagtcttatatggaacagaagattccatttgggtcctaaatattctcttttacttccatcattatttttgaagtcacgctgttctcaaaccgcatgtaactcttgtaaaatatattaatagagaatttaatcattaaaacattactataatatttggaatttaaggtgatcttagtattatggtacaaattaaaatttctgaagaagttattctctttattaaagaaaagcctctaattgcctaaggactcagttgatgacatgtatatggttgtatttttaaaaaattgtcattgctctattttatcatatgccactaattatttattttaaaattcttagaaagagcaatccaaaatatgaaagaaaaagtaaataagcatttgattaatagagccaaggaggactttaaaaagtgatacttttaaaggttttaaaggttaaaaagatttggttttgttttgctgttaaaaatatttctgccttattgtttgcaaacaaaatgagagcttgaaaacctgtacttattacagaactttacagatctataaactgtagaatgtatagaactttacagttctataaactactgacagttgaatatcagagctgattgttagagcacttcagtgactttcatgtaaagtgaagggcccactttgtatgttaaatggttgcggcaatattcctgggtagcttattttagaagaatgttcatttcacatggtggatctggctttgcttgcctttttcggagcagggtttctcaacctcagcgctattgtcatttggggtctgagaattcttttctgtggggggctatcctgtaccgtgtaggatggttagcaaattcctggcttctatccatttaatgccagtggcaatccctccccagttgtgatgaccaagaacatctccaaacattgctaaacgtctccgggagggtgatcactgatcacccatatgaaaaccacagttctaggggtgaaagatctttttgttcatagaaacatctttaatatagaaacagagatggcttttcaaaaatattatatatatatatatgcacacacatgcatatatataggctctttataaatatgaataagtacgttgcctctcaatgaatagaggccctctttatactaacaattagttgacggtaacttgatatgaatagagtttattagaggtctgctcagagggttggtactgtgttgttgtttgttcagtttctatctcaggagtgtgtgtctgccattggtgaatacatgcagttgagcccctacccttgttcacattaaatgtagctctaatctttccactgggtatttcataactggaatatgcagagtcctggacctgacctctttctccccattggtcagaaataagagcctggacctaaccacttcctccccactggtcagatatatcttccctactgactccaaaagagccttgtcagcctgttaaggagaataactgtttcaaaatattgcctggtttgagattatttttaacttgagtcttgtccccaaaacataatttccctgctgtatttatctcaatggaatttagaagtagcatggattatgtcaccctgagagttatttcttgtgtccactaaaagagaaaatgcacagaagaacgtgtctatcttaccgagaccactcatacagtgttggcaagaggacagtccccagagtctcaccatataatgaagctaatcactctatgaattatcttaattgaatttgaatgtattgctactgagtactatgggaagagcggccagtaaggacgcggtattttcccacagcattcagttagcaatgcattcaaatttaattaagatcattcatacagtgattagctttcttcgacgacagaaggcactggggatgtccgtgctacagttgcctgcttttggtctgcctaagataggcatatctactttcacaggttgtctcttgtattgagtacaggattgtttgatccatccttaagtattatcctgagatgtgcttttcattttggaatccaagaaagtgcaacgagtaattagagcactaggatttgaaacagatatcctgaggaagtcgttctccctgccgctctcacctgccatctatatgaccttgggcaagttacttaaatcactctgaacctcagtttcctcttctgtaaaatgcttataataatacctatcctgcgttaagattgcttattagaattcagtttggtactgtgcattctgaacagttacaagtgttgtgttgtgtaacttgaacagttacaagttacaagtgttgccaaagttacaagtgttgtgtagtgttattaaaactaagtaaaatatttccatttccaaggacaagggaaaagggacactgaaattgtctttctagtgccttcagcagtcgaagtcactggactacaggtcacgcttttctcctgggaatctttttttggtaacagaaccacctaggagacagacttctgaactgcattaagctgagtgcttggggtcccagatctttctatgtgtcaatacagtttatttcagaaataccatggttttttttctacccagtctaagcagagtttagctgaaacccactcacagcctcattgtaccgtgcccagcacattcatctaagctttctaaaatctaaaccggccgggcatgatggcttatgcctgtaatcccagcactttgggaggccaaggcaagtggatcacaaggtcaggagatggagaccatcctgactaacacggtgaaaccccatctcgactaaaaatacaaaaaattagccggccgtggtggcacgtgcctgtagtcccagctactcgggaggctaaggcagaagaatcacttgaacccaggaagcagaggttgcagtgagccgagatcgtgccactgcaccccagcctgggaaacagagcaagactctgactcaaaaaaaaaaaaaaaaaaaagaaaagaaaaaaaaatcttaaaccaacatccctagactggcttcagagcctattcatttgaatagtgatgagggaaggagcaattcagttgacaaaatgcccaacaaataaagatgagacctaaagttaaagaagaaagcaataacttcttttaaatttttggatatactcataaattgtagtgaaagaagaaaaaagtgatcgttgcagatacttatcatatctgtttttgtgatgattatgtagatcttgaactcaagtcatttctgaatcgaaagaaaatttagaaatggtttaattttacagtaatctcaaatacctatccagagctctgtgacttcctaagaattatgcaacccagattttataccctcttgacccagatggactagtctgtatattctgggtttttttcaaatgctatttgaagctgtatattttatgtagaatttttagttgttttgaaagtttcccttattaatctaattttcaagtgtattgtctgagaaatgccacttatcacaaacaacatacaattgagagactgaagttgtgttatgaaaaaagcttaaggaaaagtgaaattgtcatgttagatcatcaagtagaacttcttcccttaatttttgaaatgtgtgtggtggtctgcagttgatggttttctttttaactgcctttctatttttattttattctttttttaactaaaattcttcagtatgatctctagtgcaaaggaagtcaataaagagatcatttccttcctaaattatgtgtcctaatttagaaagattaaaaacagacttaagttgaattactatatcaatcatctgcacagtcataaaaatatatgaacatatttaaataaatgtgatttgttgtttttaagttgttactggtttatgggtcattaatctgcaggatttcaaaatatttggaaaactggatacccatgaaaattcatcctcttatctttaaagtacctattagcactttaataggaaaataaaaatgaaaactataagtagaggatataatctgaatagctttaacatatctctaatatacattattttatattgtgttgtactattattgttcaagtcagttttttcttcttgaatcttccatgctaatgtgagaagcctcccttactggtgatctgtgcttcgttaggtgctatctctttgttttgtacaaccattcatagggcgttgcttatttaggctgttgtgaaacgagccagttagctgaaagaagcaatggatggggttccaggagccaggattttggttctaggaacaatgaaacaaggctgaatcagggttgaaacacaaaggaaagcaggaatgaatgttggaaatggacaggttgaagaatgcaaagaagcaggagtaaccgggggatgtgaattcaatccaagaaatggagatgtgagatttgaaacttggtctgcctaagaatccaggtgaacacagatcagaggacctgggtgtgagctgcaacactgaacagttagctcatgtgtcagggagctgcagagaagctgcttccaaaatggaaatgggaggggtacctgtaatttaactaagaatggtcttcctttccctagcagctgactgcgaagggagggagaagagttaaaccagaagtgagccaagcttctgagcatgggctggaccatttgctagagaagaagagtagcaacagggacaggaaggagggtcatgatcccagcaaccctttatttcctggaaggtggccgtggtacaaaactttttgattgtaaagattccctcaattggtggcaattgtcattgtggatgttgacatacacactaataacattcattatatggttccttaaatctaccttttcattttctttccctcctataaactttttttttttttttttgagatggaggctcagtctgttgcccaggctggattacagtgatgagatctcagctcactgcaacctctgcctcccgggttcaagagattctcctgcctcggtctctcgagtagctgggattgcaggcgcatgccaccacgcctggctaatttttgtatttttagtagagacggggtttcaccatgttggccaggctggtctcgcactcctgacctcaggtgatccacccaccttggccttccaacgttctgggattacagacgtgagctaccacacccggcctgagccaccaggcccggcctggtcctctttcgctaccactttgttcccctgaggtgcctggtgaccttattataccagccccagccttctcttgccgtttgctgcagaaactcaaaagtggagcagaaatagtatgccaaatcacagctctattccagaatcctcccaacagggagtgaagaaaaagcatttctgttttctgttctctgttttgcaaggctatgttctttgctggtagagtggagtggagtggactataggcttcaaactgagctgggttagaatgtcaattctcccatcaacttgcagccaagttgttgaagtcttcaaaatccaagcttactcatctaaaaaaaaaaaaaaagagcagtaatgttcttttccagggttgatgttggtattcagtgagagaagatattaaatactgattatggtctttgccattatgtatgatagtggtagtagaaaaataataaccattattggcatttacagggtaatttattttaaaatggtagtgcatattgttaccattattatcaattatttggtgtgactgttatttctacaagaaaacacatatgaattagttttactataataaataaatacagtaaatgtgacttgtaagatgaaaatggggggaggaagaaaggtgaaacccctataatatacaacagatgagacatacctaaatcattgctagcttaggtgtgtctgatctgttgtatattgcaggggtttgccggaacttcccacacaaccaggcacctcctacagagagcaaaattatagtatgtgactatcgtcactgaaggtaaacggggtcttaaactcattttttggcttccagatattctgctgtcataggagagtgatgggttgaatgggtaaggcttaatggaaaattagagatcagggctgcactgaatgtatttccctggagaaccaggaaggttcttaagcccccattttcaggatgcttgatacctggtgtacttttcacagaatgagacaatcttgggttgcactggtaattcaggagtttaccaaacctaaattcccacacctcaaagacagaagtcattagctaaaagaggtcctcctttaagaccattcaaatccaaataaacataaaaattgaggaaatagtagtcccttattctaggcactattccttgtattatatctcattagattcctatagttgcaagcattggaaacctactccaatgaacaaacacagtccagagaaggggacagaaggaagagtggagagatgggctcagaaaagaacgaggaatggacttagagaagctcagaacagtgggaaatgggtggttttgatgattcaaactaatggaaagtcttgtgggagtgtagccccagaaatgaaacaattccaatcctttcatcaacatttgcatccttccactcaagattcagagttcggcaggaaagcgttgaatgggtcttgctggggtcacacacccatgatgccagaaaatcaggacgctttcattagtcaaatccaccaaggctgcttcttatgggaatgtggaaagaagtaagtccccaaaaggaaattaaaatgctagtactaaaagaaagtaggatgagtgccacataggccaaaagacaacaaatatccactatgcatattcaacttcaagtagccacaggtaggaaaggaaataaaagaatggtctgtcattatgggaagacatattgaaattataaaatgcctattgttgacaaaactatttacatttgtatgtgtgacatgtatgtgcgtgtacaacacttgacctgtgagtgaatgtttttgtgattattaaaaataataagatagtatctgaggttaagctggtgacagctctcatcacaggcttcatataaattaatctaaaattctccagtttactctaaggcattaatttcccttgtgtcaggcagccttgtaattgggttgtgatgtatttttaatgatatttattatcattcaagtgtttctagaaaactaaatgagacatgtaatttagtttgatttagatcttcttggatattttctacttctttacaaatacagagaagcagccacttttaaattttatttttatttgctatacaaaaatgtgtgaattttaacatgctcataagagatatacatggtcagatttctttaaaaagaaaataagacttcaaagatccaaatttagtttgaaagtgcaccttacatcacaaatcctataaagctcctttgtgtccttgctttccctaaagaaattaagggttaacaaaatagaaaattctgatttttctaacgataatgtgtgtgttgaatgtaacaatacagtcatcccttatatctgcaaaacattttatgctttaccgactttcacctgctttatgtcactgaaatggactaagacattcaaagagttactgctgattgatttcttgtgagatctgtgtccgtctttgttaccaagggagccatttccaaattcagcttaatctgagtttgcccagctgcacagttgttaactttgatttggctggtgtttttccattctcatgaaactgtgtggttcaagacagacagaaggttaaagggttagtgtaagatggcttattctttacttaatcacttcctttttggtaggaaaaagtagccttgttttcagaagctcaaacatttgagaggttctccaggggaactccctctgatgaaaggctaaattaaatctgttacatgacccaggctgacagctgcggccgtgcatccagctgtatggactttctccgatcttctcatttgttttaaacacaagtggcgtggaagttggcttcattccaattacattaaggtcaaagggtcctggattaagtcaaggtctaaagaatccatgtgtcatttagatcttctatttcttctaagaaatctaatcagttatcttgatataacactgaaattggttaacagctgtgttgcttctcatttgttttggggatttcaagattggaatttttggagggtctctcaaaagaccccatgaatcgtcactgtgagtgatttgcttgtccgtgtgtcaagatgtgaagagaattgaaaaagaattagcatgtggtgttctaatagagcctactctattggtaccaaactaaatacctattttttgttagtttttctgtgtcattaactaggatgaatagttttgaaaactaaagaagccactcagatacaggattaattctgttatgaatattgaaaatagaataaaggttcagatatatgggaacaacagtgctggctgaggaagagggagttccaaatggcatcacaggatctaccgcatgtcacagaaagaacatacaacttctcaaaggaagtggggaacgctcttttcataatgtttcttgaaaagactaggttttctgaaaaagagaaccaagaataactacttcaggtagacaaaactagagcaaccccaatggtgaataaccaagacatggctccctaattacattcaaaatgtagataccagatatgcggtcctcagtcacgagggatttgccacagagatgttctctcttcctctttccatcagtccttttcctgattagctccccagtgccgacaagctcactttgtatctgtgtaggtcagagctgcagaaagatattcaaagtatctgcaacattgattgttctttagatttttctatttgcaaagctaatgagtttaatattaaaccaatcctaaatttaatccttctcttttgatctgcaagtataaatacatgaaaatattttctaggccatttctcaaggaaaacaaaggtagaatttcaaagtcactttcatttgctgatatgctaattaggtagatcgctttcctttttcctatgggggatagagtagactgacttcactcaggagattctggaaggagaagctgtcctttttttatttgagtactcttcattatgactaccatttttgcctccagtagaatcattaattttcagagtgttattttaataaaatttaaatcataaatatgaaagcatataggacagttcctggtacatgaagaattcattgtagttggtttgattagctgattggcacatgtttcttgggtaaaacatgtagggtaattttcaatcatcttcaaataaaaacaaatctacatttgtctgatattcagtggttcacttaccacttttcatactttatctacttgatctttgcagcaacactgcccttttcccatttatcccaatatcagctgttgcaaatgacttgtcaaagttacgtagctggtaggtaagaaatcctgaacttccaactagagattctgatttctaatcctttgtgacaatgaccaatacacatgagtatttaagtaagttaccagatgttgatggttccctacagaggtgaaaaatattttagttattaaattgctaattgcccatctcctttttgctgacattagcttctagaaccacatatataatctgtaattattttccctggtctcctttccccagggttttgtgtatcttttcttaattacttgaaactgttaatggttgaacttctatgtgaagtctcactgtgatttttctaggctgcctctctggtggattttcagagggtaaacaattttaaaatcaaataactccccagtgtttccatgaacatatgatagttttgagaaaccaagttcattttctcaccacgaggaaagcaatacatgttcattgtagaaatttggagaatgcagaaaaatcaaaatggcaaaatcctaaatatcataactgataatattaggacccatatctctaatgttttctctttaaatttattaaatcttgtgtgattattctgttgtattatatttattactactttattgaacaataaatacataaacaattttgctttttattacaaactttaaaaaatttagttttaatggatatgtgttgtttcttaggatgaatgtaccataatttcctaattatttcttacccatgatgatttactgtttctcatttttagctagttggtgcccttactatcccttagacatatgggtattctgggctcaaactctaatgtcataatagctatgaatctagaaccactgtcaaggtgaccttaacctctttccttctgaggtagcgagtgccctttctttatctttccttttgtaccagtgcttgccatcttgatcatgaactccagccacttcgtgttttccaaaaagaaaagccaattatatgcaaaatattgtgagttcactaactttgctgaagaattgaagtgtttagtaaatttatggcatgcactgcaccattatttatggcatgtactaatagtcattcacggatttatgccaacccttatcctagtttcaatgtccttcccaaagcacatcacagcattaagcctatctccaccatacacagttctctgaaagagatacactgtttggaacagcagctctggagtcttcactcattgggtataatctccactagcctacctttctcccttatacctttggattagggtgactatattttctccatcttgttacaaagataatattgcaaagacatcctcgtataaatcttggattatatgtgtgcttgtttctttaagatagaatcccggaaaaggaattcttggatctggatgaaataatataaatttatttatttaacaaatagttattgagtgcctactatttgctctttgtagacattaaatttataatactgatgctttaaatccctgactagtgaacattaaaaacccataggctttatctattaacacttggataatgaggattttacgtgtgggctcttccaggggtttaaaaagtattatctcatttaatcctgtgaggcagcactaactaaaccattttacagatggagaaattaatgcatggggattttaattaccacggctgaagttccacagctcatatgtggcaatgccaaaactggaatcccaggaattctggcactagagtatatgttaaactctctgttgcatcgtaacatagaaaacctatactcacactctactttatactttggatttttccaaaataaggctgggtagtctagcttatgtttcagttagattgtacttccattctggaggaatatgaaggttggtaattcagccatgtaatttttagtgttacatacttcaaatgcttattttcttcaatgtcatttcttcatccatttgatcttgaattatagtgatgaaaataattcagatatttgtaatggaatactttgttcttgcttgtttcaaaccaattgagatgccctgggtagcccagactattacaaagatgacagttttaccaccctggggcttagataatcgtcttggcattcagtagtgaaatcaggtagatgggaagcaagcatttgtttttgtgacaggagcccattcttctgctgtgaagttgatttggaggagagctgtggatttggggaactagatcaaagaaatctcttaattctctgtaagaagaatagggcctctcaccactgtggtgcaacaccaaccctaatgcataataacaggtactggtgggtgccttttcccatgcagagtgactttagaacagctaatgaaattcattactcatttgagagaaagagagaaagaataaaaagcactataaaaatccaagccaattcagagtaatcttggcacataccttatccccgttggtgcatttccaaaagaaacaagcacattaaattcaagagggacaacccaacccttgttaaagctgtaaatcaatgctgctcagtccccagtttcactcaatgtctctgcaaggagcagtagtgagaaattaactgatcccaccatccttgtatacatctgtctctttacatttgaagggagcaggcagctcccttgctgcggacagaactactggttatgtagtccggattctcgccatcacagatgtgtaaagcatctgtgacaactttggcctaatcccaggctctagacactatggaatatatcattgctatttctttttaaactttatgtccacaaaattatgatgcattggatatcttgaatgttacacaatgatcaacaaattcactggaaagattgaatttcaccaatctattcctccagaggccaaaacttagtaaattacatgaagtagatctgctggattttgcagttccatgtcaaaataaccccagtgcaatattctaaacaggaaaggcctaataaatatcattcattaattgatgtcatagcctgaaatgaatacctaaaattatgcctttagatgcttgcaggccatatgttttatttgggtatatcgaaccaaggttgctgcagccacagcacagagtactaaccactatacgatcacggcgaactaccagggaccattatttgggtatatcaaggcaagttaggatttagtttctctgtggttttattaataacttgtgacttgggagctctgatttgcctattgtactaatttaggtgggattgattttaggtaacattggggtaccagaaaaagatcttctttgaaagatcttcttgtctccaactccttaaataatgctggatttggggactaatgggtgataaaatttaaaagatagtgagaacccgattatagaagtcctctcaaaacatccatatgtcatttgcctttaaacctataaattacaatatacactaaaaccacactctcatatctctactcattttggtgtgaggagggagaagataaaagtgttattagccacatcatggactattgctgtaaataccaaagggcatcatatacttaagctgaagaactcttagagacataaacaatgaaccaaatctaaggcagacgtaagagcttcctgaaagggttttactgtacattttgtttcgtttgctacatttgatacctacacactcaatagggaggaaaaacaggtttcagaataagccaactgtttcagacttgaaggcctgtgggggcagttggtaatataaaagtaatatgctgcagggtaagataaagactactgaggcctacagctgaattggagagaaataccatgacttaaagacattcaaagccaattaaaaagaaaataaatgtgggtggcaaaccaaacatctggaacgtgcatttgccttttgagctgtcaatctaaatctttggaattaacctttgcctgggaaataaggaattagaacttaaaataagtctaaatagaataatatcaaaaggcaatgattccagaaagtctttttttccactccccaagtcatgccatagcatctctgaattttcttcctcaaaatactcaatgtctcacagctctttcattaaatatgttcgtcaactgaatttcttttctccaaacattgtgtggggtatttcttttttactaaactagccatctttctggaaggaccttctagacagaatattcacctggcattacccttagtttccttaagcatttgtgaagtgagctgggtttttttttctaatgtagaaagtatatgatgacccttgcctttggcccactatgttcacatttgttttattttttatatttggaaaattatcaaaatatatattgactgctactttgaaaagcccattagcatttattaaaatgtcaatgaaagttcctagggccttatcagaagagatcttccaaagaaagccttaggagtcaaagctaactctgtgtactttgcagaatgaggaagggtggcatgtgtgagtgtggggaaggaagagtttggtggggaagtatctgttgatgtcacttacgtgaaaaagaaaaataataatttttttcacttatgggatcactttagcgttcaaattttgtaggaaccactcaagcttctaggagccccaaaataacccagaggaccaccgcttttcacttaggttgcataaatgcttcatcaaaagggttagaggatgcagattgtgtttttggttttctgttttggattttgttgtgttttgcggcgagggagggtccacttttctcaccttatgagttctgtacaattggaacaaacacatcaaccctataatgaaactgtcacatttctccctctattttatttttatttttggcactatgaggggcttctttgaggggagcacattccctcttggcttcaggaatctaatgcaatgtgattatcgggctattttttcacttatccattttcatcacactgcatccataatagtcctgtcgttcagttctattagaaaatgacctagcttgtctctgtagagacaaagaggctcagagccaagcaattaatcctgacacaggatccatgtgttcgtgacaaccaagagtgcctgtgatactttcattgctaacaaggtgccaacatttttaaatagacccaacagaactcatgaggaagtatctaattcagaagaaatgatgataatcatcataataccgtagcaagtaagcagaaggtctttcttcatgttgacaaagataaaatttacataaacatctattctgtggatgtgatagggctgggtatcatgagccttggggactcaataagaacagcttgaatttctgagggagatatcaggtattttaggattttctcatattatttcaaatctggaaataataggtgtgtggctttgccctaaattcctggagtctctgtgactgcattggaaggattgtgcagtgttaaagcctcaatgataactaagagatgaaatccaaccaggcatagaaaagggagatggtgtatgtcagtgattaataccatattttctttttctacagcaagaaaagcctaggcttctcgagcctttggattatgagactgtcattgaagaacttgaaaagacctaccggaatgatcctcttcaagatctcttgttcttccccagtgatgacttttcagtaagtcttctcttctcaagccatttagattcaggagggccctacacattgggtcattgtctttccctgtagattcagagagtccaggcctccctgtggccaccctacatctcagtctctgcagcaggagttcacatcctataatagaaagtaccccagggccccctcaagttgaaagattggaggctgagtgagtcagtggccactggggactgggaggaggcccaggacactgcccggttccagctggcactcgtgtgcctgccaatgtctgggtttctaaccactgccttacctggactcacagagcacttcctccctcagccatttctaactgaaagcttccaagcaactgaaaccaaccaatggcaaagacaggactccattagcacaaaagatgcagttcttaaaaatcacccttaatcttggtttgtctttcataaggagatactgacacctgggggcaaagaaaggtaggctagaacatcttcatggagagattggcggtctcagatagtcccctttaggacaatgcacactaccacacagacagcctctgaggatagtagagataatgaatgaaaaggaaattcgctttggagacaaacacaaagttgtggatggtgagcacccacatgttccaaacataaaatactgttaccttgtggtcttaaatgtttttaaattgtgatctaatatctaactgtcaaacagagatctcaatgggcagctattaaactttcctgtctcttcctaaaagaaaggtggtctcagacatcacaaacttcaacatcttaaggcaaataaaaaggcagctgaagggtatccctgtgaaacagccattgtccatgcaaacctctatcagggagcatgggtctcagtgcccacacattcctcaagcagcctcaaacttccattttctctcttactttgagggcaggtctggcttctggcttttaaagagtttttttttttttcaccttcctccatggattcatgaaaaagaaggtatatggaagttaatgattttctgtttcaagtgtgaagaatcatggaaaaaaggagacagatttgtaaacagaaagaaagaaactcttccaatgtttttcaaaattttaaacggcttccacttgagtgctggcacattttgagagagacttatctcgtgcagagatctcatttccgtggttggactaggccactggaagttgaactgcaagcataaagttaaaccgcatttttttaaattccacatcctcattttcatttttcagactgaagattaacctgatgaacagtctttttctttctttctttcttctttctttctttttttttttttttttttaccgagtgtcactctgtcacccaggctgaagtgcagtgccatattcttggctcactgcaacctcctccacctcctgggttcaggtgattctcctgcctcagcctcccaagtagctgggattacaggtgcatgccaccacacccggctaatttttgtaattttagtagagatggggttttgccatgttggccatgctggtcttgaactcatgacctcaagtgatccacccatctcggcctcacagagtgctgggattacaggggtgagccaccacgtccagccttgaacagcctctttatgtcaaacaccaccaaaaatcatgaatccaggagcatcttttctcctagttatgtccttcaaaaatatgtcaaatgctacttcaaggcctcccagctcaaaaagagagtggaggatgcaggtagatgggctgtaaagttttggcatcttcccatgctcatttaaattgaggagtgtctctgattactccttgatctttatcattcttggcagcgtaacagacaatacaagaataactctttgtttttccagtgtgaacattccaataaatacactgaactattttattccatggctgcttaaaacccttctgtggctcccccactgccttcaaaatgaagtgcaatcacctcggcatgacccaatgcctgcttcgagatgtggtccttgcccatttctcaaagccatagcctaccctctcccaccccatcccggcccatcatacaccgtcaccctcattcccaactggggtaaaagatcagcacagttccaaacatactattctataacacaccccaaaccatttccttcctttattcattcagcaaatacatgatgtataatactgaatactgggcattatttgatgaatggagacaggagtgattagacagaaatcacctggggttctaagggagcttaccttttggtgggtttacttattaaagatttacttattccaaacaaaaaggtaaaccaattaatttaccagataattcagataaagaccaattctatgaggaaaataaaactaggcagaatctgatgatagaatctgagtagggtaagagctgtgttggtctaggtgaccagggacaagcctctctaagaaggcgacatttaagctgagttctgagttctcaagaaggatcagccatgctggggaaagcatgtttcaggctaaaggggtagctggtgcaaaggccctgaagagctccaagattggagattggtatggctggacaggataaggcgtttgcatcttattctaactataggcaagggcaagtcacaggagtgtttcaagaaggaaaacaaatgactgagtgtggattcctaaatattaaaagttcatctgggctctgtgtggaaaacacaaaacaaggcctagacaaagtggggagtgtgatccaaagaatcatttccaattaatctctgcccaagagattttcaatgctacctaatccttactatcagcaaatgtcacatcctccaaatggctaaattttaatttgcattaagcaactgacaaacaaaaggatagtgttagatattatctctacataaaattgcctatttttgaataatagtggagattgttcctcattttaactgctctacagagtacagcttggcaaactgtcgcccatgggtgacctgctgcctattttttatgtcccatgagctaagaatggtttttatggttgttaaaatagcttagggaaaaaaagatgatatttcaaaacacattaaaattatctgaaattcaaattctgatacccataaagaaagttttattgaacacggacaccattccttgacctcttgtcagtggctgctttcatgatgtaaaggcagggttgcaacagagttgcagtagaagcaacagagacattcagccggaaaagatttattctttgacgctttacagaaaaagttggctgacatagagtacaactgcatgcatttttggtttttatcctcacactctttgtggaatataggcgtgtctgtaaatctctgatgttacctgcttcacccacagcctatgtcacattttagggacgtggcgcaccaacaggaagtgtccatgcagtcagcaagcatgtcatttcatcagctctcccttcagcagtgggtgaggctcctctggggtgtgtggagtcaatctccacggagtcaatgtgaagtggtcatagaatgaccaccccaatcccaaggcattgagggatggaaggagaggggccgctccaagcttcccacccccacctctaaatgtctttcatccagtttctgccctgcagattggagaatccagctcacttgtatgtttccacgttaccaagcacccacacttgcagcacacatgattcattactcggtttgtttaatcaatatttattcagcacccacgagctgctgaatatagaacagcacttcctagactagtgagactgacaagaaaagcaaaagccctgtgtttaaggagctcatgcccttttatggatgaaaaagcaagttgatttagaatgcttatggttaagaaataccgagaatcagagacttcgtctggtatctggtacacgagaaagattacttttcaccaaggcagtattcttatattgtgactgtatatattaaaagtttttctctattcactctgctgtcccaagccacaaataccctcatttgcctggaccatacctcccctccaagaagtggttttgtaactggtcctcctgctttcttctttgctccgctttgattcgttcacacacagtactcaatggaagctgttaggaacacaaattagataacgccatgcctctggttaaaacttctcagtggcttcccattgccttaagagtcaaatccagctcctcccataacccctgtcatctggttccccatgttctctgagctctcatctagcctactttcctcagtcactgcacagacatcaagcattctttctgttcccccaacttgccaagctcatcctctcggtagggcctttacactctctgtatagctggttcctatttttcagtcacaactcagtttaaatgtcacctctacaaagaagcatccctgacttccaagctacattgccctcacacccagttactttataacatgaccccacctgcttctcttgataacacttatcaccactgggaaatatcttggtttgctttttcactcctctgtcacttgtttctcactgttagacagtagcctctagcaggacagagacttcttctgtcttgattgttgaaagattttcagcagctaaagcagaacttggcacaaagcagatggaaaataaatatttatttcatgaattatctttcagaaacatctagattgctattttataacataatgttgatcccttgagtaccttgaggaaccaaaaggcttttctgaaacaaaattcttgagaacaaagaggatgaagtaattggctttgcttgatggtaaggaaaatacttcctgctttggcacaactcaactcaacatatcaccttaaaaaacagcactaagaacacgtttccctttttaaagaggcccattccttctaacatagtgcctggctcatagctgatatcagcaaagcttagtttcctccttttaacacttttttttaaagagatggagtctcgctctgttatccaggctggagtgtagtgggaagtcactgcagcctcaaacttggcctctcaaagtgctgggattacaggcgtgagccactgcacccagccctctaacactttagtgtacttcttcacttactcattcacttcctttctgttactagacaagggacaaatcagttcatatctgtacttcaagtacccaacacaatgtctgattcataggcattcaatagattatcaaacattgaattaaaatagttttcttccaggttgagggcctgacacagaagcactttcctttattttggcacaccaggtagaagctagtcctccttgtatgtgggttctgggactaagcagtatgaactcctgcactacatgtgtcctaatgattcactaaaataagcagtattgatgtatttattaagccattcattgcaaaaacttgtactgcttcaataattgtatttgctactttttttcatctttctttttcaagctggtagtaatagaaactttaaaacaaaacaaaaaataaagaacttagtcaccaaagtgtgtgactcagtaaagtggcaaagaaagtaagaaaagaaagcaagggctaagaaaaatggtttcaaggacacattgaatcatattgtcaaatgattcagtttaagaaaagactgatgcaaaatagcagaaaaaaagttgagaaagtcagaaatgagtttcttcctgagcaaaagatgtagaaagcctgagatgggatcatttctgggaagtacaaaaccataaataagaaagttctgatgtctgaaagctggtaagactgtacactgtgtaggaagaccacctatcaactatacttcaattttgtccacaccagtaaaactctatttcaatttaccttcatggaccacctttggtgatctaagctgtttatatccaggacaccaatacgaataagaagcagaccttacacttgaacagttagactttcaacaccgggcagtgcaattttcaaagtcaaaagtctatgtcacatgactacagtcacctaagagtctcattatcttctcaaattccatcttcatattagtaggtcagaattgtgtcccagggtactcaaaggcattctgcacttttcactggctattaaaactcagaatagtggatatcataatataccaatggcttgttcttttcatagtatgtctttagcaatgaaaagcaaatggtatatggggacttctagactcaaccacaagggtcattctaggaaaggaagcagaaagatttgaatatgttttaaactgcaaatcagtaaggtcatgagttttctttctttttttttttctgagacaaaggttaacattttataagaatctcaacctcttttaaatctgtggcttttgagcctgaaaagcaggcttttaaacggctcctggtgttcatgtaagaacattgtaatttcaatttgaaaactgagtaatagtctttgtcgaattagattctttctatgttataatattcctctcatttacaagctaatgaagttaagatttggaaaggctgttgttcaaggaaatagagcaactggaaggacaaacacctaacataagcaccttgacttttactattagtttctgtctaaacagcatgcttttggccgacgcttcttagaaaaaaaaggcacacaagttgggggaaatattaacttcctgaatcccacagtgagtgatgccattagaaaataagtactgtagtgaaacagttctggttgtttatttcatttcagtaagaatgtgtgtggagaccctggtctgtgtttgattgtgctaagaatgtatgtccacaccagacttggacacaaatgttcatagaagcattattcataatagccccaaaatgagaataacccaaataatctatcaactgatgaatgggtaaacagaatgtggtatatccataaaatggaatgtcattattattcagccataaaaaggaatgaaatgttgatacatgctgcaatttagatcaaccttgaatatattgtattaagtgaaagaagccagtcccaaaagaccatatagtccacgtataggaaatgttcaaaataggcaaatccatagagagagaaaggagattagtggttgccatgggctggggagatgggaaaatgagaagagaatgctagtggatatggggtttcttttgggcatgatgaaaatgttctgtaattaaatcgtggtaatggttgcacaactctgtgaatataccaaaaaccactcaattctatacttttaaaggataaattttatgacagatcagttatatctcaattagatggtttttttaaaaagccattctatgtgttaggatagaggtggtgcacgtgatcacaggaaggatacaaaggaatcatgaaagcatatatgtagatacgagcactttattctttaaaaggaatgaatggaacatagcaaaggagtaataaggaacatggcaaaacttattttacagttgttatattttacccccaaagcagatgtaatgtggcttgcttataaacaataaaacacacaggtaaaatgaccggctgaattcatcagcagcataacctttcggcctaaaatattctatgggtaagctgcagacttcatgtgtgctacagagagtaaataacagcattcagggaagaaaaatgtgtgttggatgaattagaaagcttttgaaaaggagctggcacctatacaaaacctgagatttctaaagaatgaggaaagaaaaagacttttggagaggcagaggagcatgggcaaaggccctgtgcaggaatgaggctggccctgaaggagaaatgcgggcagccaggtgggatggagccggtgagagctggcagtgctgggccgctcttcagtccatttctcttccctagaccatgtctgcaggcctcgcagcaggcaaccctcttcactgggctttcttggatggtaaactcagaccacagacctcagagtctttgccagggggaggtcctggtgcagtaggtgtctttatattgttggagcacctcgtttctattaatgctcacatcttcccatatgtagaatgtttggtcctcacctctttagaggagatgagacatgttttggagcctggaaaataagtcacaaaaaagaagtgaaatgactggctcagtagtttgtcaatccaagagtaaaacaccttgaagttcttcttataggattctatcactactatatacctaaatactacaacactgtgtcttcatgcttaacttggctggaatgactgctatcaagtaatagacaactgttcattatttgtatatttgccatacagttcaaccccagcaaaacaagaagggccttccctttaaagcacaagtcaggtactaaagtaatattctcatatatttaaacaataagtaaaataaaatcacaacaatactcttctgaatgtggtaaaagatgtttttcaagaaactaatgtaatctaaggacattctctaatagaataaaagacaatatcgatgtctgagaaatttaggttaaaatcacttttaaacacatgctgagggtcattaatcacaaagttttagttaatagttcttattgtgaggcttataactccccaagcttagactgattgattactttaaacaccatcattttgtcctcctttttgaacagggggaagctacaatactgtcagaggaagcttttctcagccccaagataggataagcagcccttttttagacttttacagtgacctttggccaattgagagatagtcctgatgtgcttggaaggaagtcttctgtagccagtatagccagcagattggtggctgtaacgaaacctccaagaccatccactgcaggctacaagaaaccagaaagtgacagggctgcaagggaggatgtctgaatctcatggacctgaaactataaacacaggcctgcatgcatcatttcaggacagtttttatttccaaatgcctgatctctggacaatagataggctccttatgaaatcctaccaccaaaggagaagctcagctgagttccactgcagtttcagatcccttttatgctattgagctatactaattgttgaccagagttttataaaagagaacaggaaatctcttgtggtcaagacaatttgtagtggtctgaaagcatctgattctcagaaaagaaaaaattctttgtaaccatattaaaacccttaccaaatatgattgtttacagttttctttgtattcgatcaattcatttttgcttcagtggagacacattaaagagatctaaaatgagaagaagtgccacagtttttaaagtggaaacttgtggagtccttgcacttttttttttttttttttttttttgagatggagttttgctcttgctgcccgggctggagtacagtggcgccatctcgactcaccgcaacctccgccacccgggttcaagcgattctcctgcctcagcctctcgagtagctgggattgcaggcatgtgccaccatgcccagctaatttttattttattttattttatttttatttttagtagagacggggtttcttcgtgttggtcaggctggtctcacactcccaacctcaggtgatccacccgcctcagcctcccaaagcgctgggattataggcatgagccacagcgcctggctgtccttgcactttttcagacaaatgctccagcattataataaaatacaactaagatcaatagcacgttatgggcatacatcatacatgtattctctttcctataccttgtgtaacctgcacaggatattagatatgcaataactgcacatattgtaaaataatgttttagatttatcacatggttccaagagcataattcagcctgttgtcttatttagtaaaaagtcaacatcattttataacaagagaccaccaggcattgtacacgtgattaagcaatttttgtaactcggcctgaattaattcgcagtctcataaattggatgtgaacattaccttatgtatttgggggcctatctaactataggacattactaatctagtagccatgtgattactgttatggggaacccaagcctacattccagaaacttaccaataaaacaagcaaacaaacaaaaaacttcttaaattagctaagtgttcacgttagtattattatttattgaaatggagttttgctgttgttgcccagcaacattgctggagtgcaatggcatgatcttggttcattgcaacctccccctcccaggttcgagtgattctcctgcctcagcctcctgagtagctgggattacaggtgcccgccaccatgcccggctattttttgtgtatatacattatatatatatatatatatatatattttttttttttttttttttaatagagacggtgttttcccatgttggccaggctggtctcaaactcttgacctcaattggtctgcccacctcagcctcccaaagggctgggattacaggcatgagccaccgtgcccagcccactttattttattatgtcacagagcagtgatcgtagtgggacagtaagtttactacatagatggaacagggagtggttgtgtcacatgcaaaatatgatggagccaatttggatcttattatttatgttttacttaattataagcttaattctgggccatgttactctactctccatcagacttaaagtatttttttaaaaagtcaagaaagcaatggagactctagtggaaaatggaaaagaggaatagcttgcatttttgtataaaaattttattaataatggccataatatagaatttttttttaattagaaagaaaaatgtctaatgttcccagtagattataatatgtaatattccctggaaaccaagcaacaccatatatctgtaaattatccatccgaataggaaacaaaggcatcccagatcatttaaattcagcagtaatccccaaagctcaatttaggcatggttcttaatattctactccaaaacttcaatatagtttatttactatttatcttctaacagagtgaatagcataaaataagcaacttgaagaagggaactctaaaggaattaaaaatgtaaaatgtaggccaggcacagtggctcatgcctgtaatcccagcactttgagaagccgagacaggcagatcacttgagtccaggagctggagaccatcctggacaacatggtgagaccctgtctctacaaaaaaaaaaaaaaaaaagtgaaaattagccaggcatagtggtgcgcacctgtagtctcaactactggggaggctgatcactggagccccggaggtcgaggctgctgtgagctgtgattgtaccactgcactgcaacctggccaacagaatgagaccctgtctcaacaacaacagcaacaaaaagtaaaatgtaaataataagatccaaattggctctatcttactttgcatgcaaagcaacggctccctgttccatccgtggcactatgcttgctccctgcacctatgcctggtttgaattggtagccacagcctcttctgagtatacagctgcagttaaatcctggagcaagtgcagtggcccagggagctcagtccacagctgtgctttagggcgagcattcattttcatcattgatgtctctagatcctagttttctcattatttttcatcctctgatcttattaaatctacatgacattcttcctctttcacaggatacaaaccccgtgcttcccgacatgcatgtgcacatgcacacacactcacaccaacacatcacacccattcacacgtggacagacacacgcacactctacacacacacaacactcaccacacacattcacaccacacatacacactgacacatcacattcattcacacatgtacacacatacacatgcagacacactccacacacattcacataccagacacaccacacacattcacaccacacgtacacactcacaccacacatacacaccatccacannnnnnnnnnnnnnnnnnnnnnnnnnnnnnnnnnnnnnnnnnnnnnnnnnnnnnnnnnnnnnnnnnnnnnnnnnnnnnnnnnnnnnnnnnnnnnnnnnnnnnnnnnnnnnnnnnnnnnnnnnnnnnnnnnnnnnnnnnnnnnnnnnnnnnnnnnnnnnnnnnnnnnnnnnnnnnnnnnnnnnnnnnnnnnnnnnnnnnnnnnnnnnnnnnnnnnnnnnnnnnnnnnnnnnnnnnnnnnnnnnnnnnnnnnnnnnnnnnnnnnnnnnnnnnnnnnnnnnnnnnnnnnnnnnnnnnnnnnnnnnnnnnnnnnnnnnnnnnnnnnnnnnnnnnnnnnnnnnnnnnnnnnnnnnnnnnnnnnnnnnnnnnnnnnnnnnnnnnnnnnnnnnnnnnnnnnnnnnnnnnnnnnnnnnnnnnnnnnnnnnnnnnnnnnnnnnnnnnnnnnnnnnnnnnnnnnnnnnnnnnnnnnnnnnnnnnnnnnnnnnnnnnnnnnnnnnnnnnnnnnnnnnnnnnnnnnnnnnnnnnnnnnnnnnnnnnnnnnnnnnnnnnnnnnnnnnnnnnnnnnnnnnnnnnnnnnnnnnnnnnnnnnnnnnnnnnnnnnnnnnnnnnnnnnnnnnnnnnnnnnnnnnnnnnnnnnnnnnnnnnnnnnnnnnnnnnnnnnnnnnnnnnnnnnnnnnnnnnnnnnnnnnnnnnnnnnnnnnnnnnnnnnnnnnnnnnnnnnnnnnnnnnnnnnnnnnnnnnnnnnnnnnnnnnnnnnnnnnnnnnnnnnnnnnnnnnnnnnnnnnnnnnnnnnnnnnnnnnnnnnnnnnnnnnnnnnnnnnnnnnnnnnnnnnnnnnnnnnnnnnnnnnnnnnnnnnnnnnnnnnnnnnnnnnnnnnnnnnnnnnnnnnnnnnnnnnnnnnnnnnnnnnnnnnnnnnnnnnnnnnnnnnnnnnnnnnnnnnnnnnnnnnnnnnnnnnnnnnnnnnnnnnnnnnnnnnnnnnnnnnnnnnnnnnnnnnnnnnnnnnnnnnnnnnnnnnnnnnnnnnnnnnnnnnnnnnnnnnnnnnnnnnnnnnnnnnnnnnnnnnnnnnnnnnnnnnnnnnnnnnnnnnnnnnnnnnnnnnnnnnnnnnnnnnnnnnnnnnnnnnnnnnnnnnnnnnnnnnnnnnnnnnnnnnnnnnnnnnnnnnnnnnnnnnnnnnnnnnnnnnnnnnnnnnnnnnnnnnnnnnnnnnnnnnnnnnnnnnnnnnnnnnnnnnnnnnnnnnnnnnnnnnnnnnnnnnnnnnnnnnnnnnnnnnnnnnnnnnnnnnnnnnnnnnnnnnnnnnnnnnnnnnnnnnnnnnnnnnnnnnnnnnnnnnnnnnnnnnnnnnnnnnnnnnnnnnnnnnnnnnnnnnnnnnnnnnnnnnnnnnnnnnnnnnnnnnnnnnnnnnnnnnnnnnnnnnnnnnnnnnnnnnnnnnnnnnnnnnnnnnnnnnnnnnnnnnnnnnnnnnnnnnnnnnnnnnnnnnnnnnnnnnnnnnnnnnnnnnnnnnnnnnnnnnnnnnnnnnnnnnnnnnnnnnnnnnnnnnnnnnnnnnnnnnnnnnnnnnnnnnnnnnnnnnnnnnnnnnnnnnnnnnnnnnnnnnnnnnnnnnnnnnnnnnnnnnnnnnnnnnnnnnnnnnnnnnnnnnnnnnnnnnnnnnnnnnnnnnnnnnnnnnnnnnnnnnnnnnnnnnnnnnnnnnnnnnnnnnnnnnnnnnnnnnnnnnnnnnnnnnnnnnnnnnnnnnnnnnnnnnnnnnnnnnnnnnnnnnnnnnnnnnnnnnnnnnnnnnnnnnnnnnnnnnnnnnnnnnnnnnnnnnnnnnnnnnnnnnnnnnnnnnnnnnnnnnnnnnnnnnnnnnnnnnnnnnnnnnnnnnnnnnnnnnnnnnnnnnnnnnnnnnnnnnnnnnnnnnnnnnnnnnnnnnnnnnnnnnnnnnnnnnnnnnnnnnnnnnnnnnnnnnnnnnnnnnnnnnnnnnnnnnnnnnnnnnnnnnnnnnnnnnnnnnnnnnnnnnnnnnnnnnnnnnnnnnnnnnnnnnnnnnnnnnnnnnnnnnnnnnnnnnnnnnnnnnnnnnnnnnnnnnnnnnnnnnnnnnnnnnnnnnnnnnnnnnnnnnnnnnnnnnnnnnnnnnnnnnnnnnnnnnnnnnnnnnnnnnnnnnnnnnnnnnnnnnnnnnnnnnnnnnnnnnnnnnnnnnnnnnnnnnnnnnnnnnnnnnnnnnnnnnnnnnnnnnnnnnnnnnnnnnnnnnnnnnnnnnnnnnnnnnnnnnnnnnnnnnnnnnnnnnnnnnnnnnnnnnnnnnnnnnnnnnnnnnnnnnnnnnnnnnnnnnnnnnnnnnnnnnnnnnnnnnnnnnnnnnnnnnnnnnnnnnnnnnnnnnnnnnnnnnnnnnnnnnnnnnnnnnnnnnnnnnnnnnnnnnnnnnnnnnnnnnnnnnnnnnnnnnnnnnnnnnnnnnnnnnnnnnnnnnnnnnnnnnnnnnnnnnnnnnnnnnnnnnnnnnnnnnnnnnnnnnnnnnnnnnnnnnnnnnnnnnnnnnnnnnnnnnnnnnnnnnnnnnnnnnnnnnnnnnnnnnnnnnnnnnnnnnnnnnnnnnnnnnnnnnnnnnnnnnnnnnnnnnnnnnnnnnnnnnnnnnnnnnnnnnnnnnnnnnnnnnnnnnnnnnnnnnnnnnnnnnnnnnnnnnnnnnnnnnnnnnnnnnnnnnnnnnnnnnnnnnnnnnnnnnnnnnnnnnnnnnnnnnnnnnnnnnnnnnnnnnnnnnnnnnnnnnnnnnnnnnnnnnnnnnnnnnnnnnnnnnnnnnnnnnnnnnnnnnnnnnnnnnnnnnnnnnnnnnnnnnnnnnnnnnnnnnnnnnnnnnnnnnnnnnnnnnnnnnnnnnnnnnnnnnnnnnnnnnnnnnnnnnnnnnnnnnnnnnnnnnnnnnnnnnnnnnnnnnnnnnnnnnnnnnnnnnnnnnnnnnnnnnnnnnnnnnnnnnnnnnnnnnnnnnnnnnnnnnnnnnnnnnnnnnnnnnnnnnnnnnnnnnnnnnnnnnnnnnnnnnnnnnnnnnnnnnnnnnnnnnnnnnnnnnnnnnnnnnnnnnnnnnnnnnnnnnnnnnnnnnnnnnnnnnnnnnnnnnnnnnnnnnnnnnnnnnnnnnnnnnnnnnnnnnnnnnnnnnnnnnnnnnnnnnnnnnnnnnnnnnnnnnnnnnnnnnnnnnnnnnnnnnnnnnnnnnnnnnnnnnnnnnnnnnnnnnnnnnnnnnnnnnnnnnnnnnnnnnnnnnnnnnnnnnnnnnnnnnnnnnnnnnnnnnnnnnnnnnnnnnnnnnnnnnnnnnnnnnnnnnnnnnnnnnnnnnnnnnnnnnnnnnnnnnnnnnnnnnnnnnnnnnnnnnnnnnnnnnnnnnnnnnnnnnnnnnnnnnnnnnnnnnnnnnnnnnnnnnnnnnnnnnnnnnnnnnnnnnnnnnnnnnnnnnnnnnnnnnnnnnnnnnnnnnnnnnnnnnnnnnnnnnnnnnnnnnnnnnnnnnnnnnnnnnnnnnnnnnnnnnnnnnnnnnnnnnnnnnnnnnnnnnnnnnnnnnnnnnnnnnnnnnnnnntcacaccacacatacactaccacactcacattacacatacacatgcactcaaatgcgacacactcatgtatacacactaacacacatactcattgcacatacacactacactcaattgcacatgctcacagacccaaaccacactcatactcacaccatatacacaccacacacacaccacaagtacatacatacacacaccccacatacacacgcaccacacacactcataccacatacacatacacactcaccacacacactcacacatatacacattcgtcacacactctaacactacacatacacgcacaccacacacacacacaccgcaccacaaactcaccacacatgctcacataacacatacacacaccatacgaacacacgcactcaaatgcaacacactctcatgcacacacactccacacactcattgcacagacacacccacccaattgcacatgctcacacacacacaccccacacacactcatatatgctcccacacactctcatcctcttatggaatacacatgtacacacagtcaataaattcaacaaagaatcatttaggtatccaactagcactgaggttataagtgaacaaaataaaatgtcctgcacttacatcaggagtgaagaaaggagagatttggagaaaataagagtccaggattggaagagaaggaatgatgggaaggacgccgcccttggtggcagagctgccagcaaggtctgtgaactcggaagacaaaactcccttgacccctccctacccatcttctccaatactgaggatgggtttggagattcttatctgttccaacagctaatctagagcagtttaaatgaatagctgtgatttgggggatgtgcaatatacgagatctcagctgttggtaccatggatgtcacagactcatcacctgagaatccctgtaactactgaggtgcacagactaaaggaagcagatggctggaagtggaaacttgctgttttagggcatttcattctcctgtgcttcatggactgaagacatataagaggcaataatctatgaaattctgtttgtgatgttttgttttaagaagtactttatatattaattaacatatattcatttaaaagaatattgtttatttagcatggaagttgaaaaagttttcttatttcagcaaaaataaagacaccaaaaacacaacctatttttttcaaggttcagatttactaaacactccttcttccttcccacccctaactacaactacatgtgcacacacaggcacacgcacacacgcacagttagcttctaaaagggactgtgtttatcctttgatatttgagattatttacgatattattaaaataatgctgactttgtaagttttcttcttcatttcaaatttattttagccttagcagcaataataaaaaagattccactttgggaggccgaggcgggtggattacctgaggtcaggagttcaggaccagcctggccaacatggtgaaaccctgtctctactaaaaaatacaaaaattagctgggggtggtggtgggcacctgtaatcccagctactagggaggctgcaacaggagaatcgcttgaacctgggaggcggaggttgcagtgagccaagatcacgccattgcactccagcctgggcgacagagcaagactccgtctcaaaaaaaaaaaaaaaaaaaaaagattccaatagaaatcagctaaattgaaaacatatagatgcctaaatttttgttttctgcaaagggggaacagcttaaaactatgagctacactaataaaacagtaactgttgtaaaaatactagtactggtaatcaaataaatgtccacatcttctctcctagagattaaattgggaagaactacagaagtgtctctgtcttctgttaactttaaatactaagatctaaaagacttcccttttgtgtgttcagtgtgctggtctgctcgacacttctaagccggaggactcaatttcttttcattgttcgtttcaggcagccacagtttcctgggatatccgcacgttgtactcaacagtacctgaagatgcagagcacaaggcagaaaatttactggttaaggaggtaaatgtgatgcttccaatgctttattttaaggcttttgctttttcccaggggattctcaatgcaatttactattattatcttcctgtcattttcaatagataattccaaatattctaactagtggatgtcttttttttttttttttttttgagggagggtgtcactctgtcacccaggctggagtgtggtggcaccacctctgctcacagcagcctccgcctcccaggttcaagcaattcttgtgcctcagcttcccaagtagctgggattacaggcacacgccatcacacctggctaatttttgtatttttagtagagacagggtttcgccatgttggccaggctgctctcgaactcttgacctcaagtgatccacccacctcagcttcctgaagtgctgggattacaggcatgagccaccgcgtccggccatgccaggctaatttttgtatttttagtagagatggggtttcaccatattggctaggctggtttcaaactcctgaccttaagtgatctgcccaccttggcctcccaaagtgctgggattacaggcatgagccactgtgcccagccaaatggccagatctcatgtgaactcagagctagggctcatgtatcaccaaggggatggcacaagcctttcatgagggatccacccccatgatccaaacgcttcccaccaggccacaccttcaacattggagattacatttcatcatgagatttgggtgggaacgcatagccaaactacatcagggactgatagaacatctctgggtatagcattgacttgcattttattggtgtataagaggcctacaaaacagcttctttctcttctaaccagactccaggcagctttagagcaggaattgagccagtgcatagcagctacttagcagatgtttactgaataaataaatgatgcttatcctttccttatagaaaatatggtgacaaaatttagcccagcacaggtcaaactgaaagtagtggaatctaagttcagtcttgaatcctgagaaagtggtgtgtcccaactaggaattcattaaagctgcatacgatagcaatatcttttctcggctcttaacatatttatgttacataagctagccttattaatgtacatattaatacaaatatgactgtacatattttctgttgtactgttcagttcagatcattgttttatcggtcttttttttcccaattccattattttgaatgtatttcccaaagttcacattgcattacaataccttttaaggagatagaaaaaagaaaaaatgcagactcagataacatcaggatatctgagaatactgttttcacatttactgataaaaatagtgtgtgatatcagtatgataatattttgtttagagttgccttagagaaagtcttagcatacagtagggtgtcactattctttaaaaaagttggcaaataattttttataccagacaatcagacttattcaaaccaggtctgcaataaatatgtgttaacttaggcaggatttgacatttttataacattgacttcctaatggggaagtttaaccaggtcttgtgcattcttcagaaatacattgcattttcttcataaagatctttaactttgttgtaaaatttattctaaggtccttataactttgtcacaaatctgagtggaattttaaaactccatttctttttcttactgttaattacttaatgaattaattcttactgttaattactgatatttttcaaaagctgttgatttcctaatatgaataactagcttgctaaactcttatcctaatagttcgtatttaatttcttaggtgtgtaggcgtaaacaagtaaaattttcttcttttctaataagtatattgtttctttgatttttatcttattctattattttatatccctaaaacaatattgaataataatgctaataccaggcaatatgtctttttcttgaatttagggggagaccttagtattctttcatcctttatgaaagatggtgttttatgttcgtttctggcgtttctttattgtgttttaaaaggtgtctctctatgaaattttagagtgtttataaagactggctgccctgttatcacatgcatatgcgtcctattaatacaacagcttttctgttttagttagcactgtaataaaatcaatgggctgttgtcctgtggatccctacttgtatttctggtataaactttctacttcaagttgtattattaccttaataccgagttgccttctaattgtttttactttatttcaaattttggagtttatattatgagtgaaatttggctctagttttcttttttcctttccttagagagatgctagctttaaaaaataaattggggcactctacatctttttctgtgttctggaatgaacaaataaaccagtgaaacaaaaaatacctaaaacaaatttaagtgcatagtattatttaagaaatagtaaagatggcacttcaaagtctctggggaagagtggccaattcaacaaatactactcaactatccattttggaagaaaataaagttgtgtccatatctcatattacatacaaaaataaattccagatgaaaaaaagaatctaagttttaaaaacaaaggttataggccgggtgaggtggctcatgcctgtaatcccagcactttgggaggccaaggcaggcggatcacgaggtcaggagatcgagaccatctggctaacatggtgaaaccccgtctctactaaaaatacaaaaaaaaaccaaaaaattagccagacgtggtggcgggtgcctgtagtcccaactactcagcagggggaggccagagaatggtgtgaacctgggaggcggagcttgcagtgatctgagattgtgccactgcactccagcctgggcaacagagggagactctgtctcaaataaataaataaataaataaataaacagacaaacaaacaaaataaaaacaaaggttataaaaatgtaggaaaacatttttaagtgggaagttagggaaaactgacagatttaaccaaataaaaaattaaaatttgtatatgacaaatgtacagtaccatacacagagtcaaaataaaatatttaatcagagaaatcatttgtaactcattatgtcttttgctgaacacacacactcacacacactcacatataaatacatacattcctagtattcaaaatcctacaaattaatttttaaaaagacaaataaccggagaaaatatgagcaaaagatatggccaggctgcttaaaagaagaaatgcagtaggctaagagacatacaaggttgctcagcctcactagtagtcatggaaatagaaattaaaagaataattttagggaagaaaaaatttaagataaataccatttagcaataataacaatatagtgaaagaaacacgatcacatgatgtttgaaatactcacatctgtaacttttgaaatgtaattcataagacatatatgctgcattggaaattttgaattatcaattaataagggtgaggctaaaattttttcacatttatattttgtaataatataaaacaaataaaaaattatatctatttaaatagcttagttttgatgcccatgatttttttttctttcttttttggagatggagtctttcctctgtcacccaggctggagagcactggcacgatctctgctcactgcaacccccacctcctgggctcaagcgattttcctgctttagcctcccaagtagttgggattgcaggcgcccaccaccatgcctggctaacttttgtatttttagtagagatggggtttcaccatgttggccacactggtctcaaactcctgacctcaagtgatccacccacctcagcctcccaaagtgctgggattacaggcgtgagccaccatgcccggcctgatgcccataatatattgttaggagaaaaaagcaagtcacagaattgtagtatgatatcacgaaagatataaaacctatacatatatacacaaatatgtttatataaggctaggaaaagtataaaagaatgcacacatcaaactcataacattggctacctcacaagtttgggactctagtgggaggggagagattgattttcaacttatataattctcttctgttgtgctattacacataaattttgtaatttaaaagctattttggaaaaaattagttagaatatatttttagtagagatgggggcagctgggcatggtggctcactcctgtaatcccagcaccttgggaagccgaggcgggtggatcacctgagctcaggagtttgagaccagcctgaccaacatggtgaaaccctgtctctactaaaaatacaaaattacccgggagtagtggcacatgcgtgtaatcccagctatttgggatgctgaggcaggagaatcacttgaacctagaaggcggaggttgcagtgatctgagatcgcgtcattccagcctgggcaacaagagcaaaactccactcaaaaaaaaaaaaaaatgtatttttaaatgctgccagaattggaagcaactgaagcctgttgcctaaacttgtctgcaaaagttaaaaatccaacataattcttcaagtcattagataaatacctaaaagactacttcagattctttattattattattattgttttagtttgctgatgaaaatggcatgtggagcactcaaaatctcatgcgtgtcttgctttaggattccatctgttgggcttgtctttctgtcatagaagtcaattacattcagcaaacatagtccattatcagttgtttttaatccaactacaacggatttataaatgtttctatcgttttaggaacttttcatttcatggtccttttgctctctttgggggtgtatacggcatttgtatatttccagctttcagcagtttccaattgctctcacatgaacaaatgttcctagcttgtggctctgagtctctagaacccaaggctttcagagccttggatttggctgccagcctccttcagctcctgcctattaacactgcctcattttattgccaggcatgctttcaagataggggccagttagcctgaactctaaattctgggaccattcagaaccttcacccccaatctctagatccaaccaagtttcaagtgtagctacttttccaggggaaagatagcatgaaaagcagataagtggatccatacaacacaagagacttcaaaggactattctagggttcccagaggccttcagttttgcttgtgcttcaagagcttctacctcacaacttcaaatgtccagatagatcttttcatctatccgtagttctctgagaatgtcaccttcagctgaggacaagttgacaacaaaatttgcctttattttattattgctccttgggggaaatttctcaccttcacttttgttcccaccttaattccctttcaactgcttgtagacttcttttctctcttgtacctcagcgtcttacttctctaagaactgctccaaggagaaaccaagtagagtgcctttcgccctagatcccaaatatatgctaaacttttatgttgcaaagctcaggacagaacattcaactctcttgggcaacatgaatgaatcttcttatcatattttttctcaactgtatggatctaaaatagaaaaaaaaaagggagagagaaaggaggaagactgggacaaaactaccttattccctgctaatttttctgtgtcactagtactgaaaaccctgcaaaaactcccatagtagtccttgattttaaggataaagataaagtgaaacctgtgcttcataggatgggaagaagataagccctgcttacaaatatcccgtgatgataatggaacatgaatagtcaggcctggagacagcagataagaagaaagaggtcaccaaagagctgagctaagactgggaaatggtcccagagaattacactgcaaaaagtcttgaccccaattgctaatagcagctaacctttattgactgcttactttgtgccagatacacttctaagccctttacttgtagcaattacaaacatatgtttgttattatcatcattatcaccttttaataacaaggaaactatgtcatagaaatattaagaaacttgcccagccagcattagacaaccaggaatagacagatccaacatctggacacatgccaccagctccgtccctgggctcctaactgcgatgctaactgccaatagggtgttttgctataaaattgctatgttcctctggaaagaaaacttctctgagtcttcaccctcacagccccactgtggtttctgctcaggtgactctgatgcatacagtcagtgggccacactttcaggaacattggctggatttttgaaactagattatgctagcactgaaatgaattcattgacgtttgtagagctttgtagaaacacttgcttgacctaccacaagtgtattaagcaacgttattggtccaccctgtgctacattgccctgcggctcactgtggggtggcaagggcaaataccatggttgctaggcaacagattggcaagaatctagtttcaacacatccagctcagtaaaaaatttgagttttctctcactgctctctactttgacaattctcagcttctcatgaaaggcattaggcattcttttcttttttttaatcttcaatgacatcatattttaatggaagttcactaaaatgaacagcttcttccttttctgttttatctgttattaattctcctccctatctcttaaatgtaaaattaaacattccccacacaaaagcataggcttatttcacatccattaaaacactgcatgttaacatcaagctctagttgagtacacagttgcttatacattgtgtgtatgtgaaaacttttgagaactctgtgaaataggtattactacctcattttgcagcctagaaaacaggctctgagtgaataatgaactcgcccaagttcacacagagccagaattaaggctttgctatctttgacataatattccatgttcttacacattttattgtctctgatcctttgataagttcctttataccacatgctcactagcctgactggatgagggtacttccactcctcacaagggaacgtatccttcattttggcaaactattaacttttctgccttagtttttccatctttaaatagggatatgaaaaatcctaatgctgtgattctgaaaataaatatagcaatagtatgaaaacacttggaaaacaactactggagagcattgtctttatctgaatctgcttaagtggcttaaaatgaacatccataaccataaaaaatatctaaacacttccgtgataaaacaagcaccactcccacaaggggtttgaggaggagaggggggcaattaaagtgatctagaaataggatgcaaacttcctaagcaaaacttctataacgaagcttttattttaatatacacaaagggatcatataaagttggaagaaagctcagcatactaattaaaaccaagctcttggttcagtctctcttaacaaaaggagatgagggagcaaagaattgagaacaatacagtggctcaagagggaacaaaggtctagggaccacttcagctgaatggctgagagaaatactgacaaagtactaaggtagcaagttactctgacaacaaagccctctctgatttctgaaaaccaatgctgctgcgggagtagaataatgataagtgaggagacttcatccaagtctcattttgatcatggcataaaactcttggggacttaggaggtatgataacattgaaagaacagaagcaggctgggtgcaatggcttataccagtaatcccagcactttgggaagccaaggcaagaggatcacttgatctcaggagttcaagaccagcttgggccatatagtgagactctatctctaaaaaaaactttttaattagctgggcatgatggtgtgcacctgcagtcccaaatactcaggaggccgatgcaggaggatggcttgagctcaggaatttgagactgcatgactgagccatgcgtatgccactgagcttcagcctgggcaacagagtgagactctgtccgtagaaaaataaaaaagaataaaagcaaatacttatctctacagccacatctacacatgtacacacacacacacacacacacacacacacacacacaaacgatgatgattatgtactgtcttcatccaaatagtactaggctaccggggcaaggaaaagttcagattttaagcaaggggttcaaaccagaaatgaattctggaaaggaaaaaacaaaaatgaaaacaggacccaagattaaatggtaaatacaaatatgatttaaggcgaagtaaatgttgttgaaatctctagctgtccataaaaaatacacacacacacacacacacacacatacacacacacacacacaactcatttaaatcagggcagaagccaactttatgtaggcacagaacgttcggcaagaggctaggtctgcacgatgttcctaagtgtctcacacacatagaaacatacacacacacacacacacattcagagtctttaattagctaatatccatcaagactgtcttagaaggggatatgaaatgaaacatttctaaaatgtatttgaccatgtagaaattctgtccatttttctccaagtatctttaagaaacacctttgagaaatgctaatgtaaatgtgatccaaggagatcaccagaaactagaggcacaatgtagttcaagtaaaacagaaatcaacaattgggtgaaccggcatgtgcatttcattcaggctgattctaatgcagaaaaagaaaatattaaaccctccaggagatcagataaattagttgttttcttttcatggccaaacctctattctttttttttttttttgaggtggagtcttgctctgtcgcccaggttggagtgcagtggcgcaatctcagctctctgcaagctccgcctccctggttcacaccattctcctgcctcagcctcctgagtagctgggactacaggggcccgccaccacacccggctaatttttttgtatttttagtagagacagggtttcaccatgttagccaggatggtcttgatctcctgacctcgtgatctgcccgcctcagcctcccaaagtgctgagattacaggcgtgagccaccgcgcctggccctctattcttaattcttactgttagcatcgaaaatgtctacctgtgttcagggaggtcatgcaattctaagacacaattcggcacaagccccagtgatggtagttctatgtacttaccctcatacagcaaattataagtataaataatgttactctcagagtttgaagtaattaacaatgatcataaatgtcagtgtaatactcttttagcccttaaatttctcccttcattcccctacctaattatcagattagcctttctcttgtcctaggggcaactgtgaatccagtggcataaacgaggtatataagactctgctaattgcaattcagttaggtggagctaattatctttacaaagagtgaaatttacatagaaatttcttgtcccactgatttactgttactacagatcacattgtgttgaaagctaaagtgtatgtgataaagagaatcaaccattggatgaaagattagaggaggttcattatccaacatgggcttaaccactggctaaacacagtccctgccctcaaggtgcataccatcaggcaagaagttacagacctctgattagatttctacgacacactctgacaagtaccccctggagtatactactttaagataaacaaggccgggtgcggtgactgacgcctgtaatcccagcactttgggaggccaaggcgggcggatcaccaggtcaggagatcaagaccatcctggctaatatggtgaaaccctgtctctactaaaaatacaaaataattagctgggcatggtggcaggtgcctgtagtcccagctactcgggaggctgaggcaggagaatggcgtgaatccaggaggtggagcttgcagtgagctgagatcacactactgcactccagcacactgcactccagcctgggagacagagtgagattccatctaaaaataaataaataaataaatgaagataaacaaggtcaggtttgcctgtcagaagaaacaactaaaagcataccagagtatggattggtcggcttgggaaggaataagattgaagaaaaattggacagatagaagactatttgttttaatagtccagatgcatgattacaaagagctgtactaacagataggagactatttgttttaatagtccaggtgcatgattacaaagagctgtgtggctatgcgattgtggtactggtaaagacctattaaggagatagcattgacaggagttggggactgaaaataaagtaaagaagaggaatgtgtttatgatgactcccataattatggcttgggctattacctagatggttgtgccattcatttaaataaggtgcccagaagagagtgaagattgctggaaggatgaagcaaagaagataaccttatttgccaacatgcagagagagatccaagaagaagataaatacataggtctggagcacaggaaagtgtgggcagttactctagatttgaaaattcaagctttaaacctggaagagtatgcccatgaacaccagagaattgggctggaactgagaaggcaggtccctgagccacactctcactaaggggcaggcaaagaggaccctgtgtaaagaatggagaaggagtgggcagagaggaaagcggggaacaaggagataccgatatctcagaattaaggaagaagggtcaatagcgagagaaagtgcatcaatggcataaaatgccaaagaagaatcaagatgggggctcactggatttgggtattggtgtccctttacttgcaaagcataaacccacttcaggaataaacccaataaaaatattagaattcttcaggcagagtgcccaaagcataccaaagttaaaaatagttccataggccgggcgcggtggctcacgcctgtaatcccagcactttgggaggccgaggcgggtggatcatgaggtcaggagatcgagaccatcctggctaacaaggtgaaaccccgtctctactaaaaatacaaaaaaaattagccgggcgcggtggcgggcgcctgtagtcccagctactcaggaggctgaggcaggagaatggcgtgaacccgggaagcggagcttgcagtgagccgagatcgcgccgctgcagtccgcagtccggcctgggcgatagagcgagactccgtctcaaaaaaaaaaaaaaaaaaaaaaaatagttccataggccgtttattgatctttaaattgtgtaccaaaatactgcttaatgtattgcagagcaaaattctgtaaacatgaaaaacaataagatccaatgagtataatattgaaaatgaaatctctttgtcttcctcttcttcccttgcacatttggactcagacaagtggcatttaattaattcaggagaaaattatgaatattcaagataagacttgcgtcctaaacatagtgaagaaaattacagaggagggggagttggctataatttaaaagtacttcatgctgctcatttttaactgaaagaaatatatctaactagaatgaaatttatcttgtctcaagaaaacatggggaatttctttttttacttttatagttaaaataattctatatgctttgtgtttaattttggaccacatattatgtaagctgacaaagaaaccattcttttgaccaaaatgcctttgtttagtatgcttcatactaatttttgaatctcatgtgtagaatactgtgcactcacacttgcccatatataagaatgtctcttactagttgatttgggagagtgggttgcatgtataaataaattaagtaaaaatgaatgctgttttctgatcctgaaacactgggcagcaaatgaatgactcatatgtatttaactttagaccagagcacagttagtgtggagtttctcatcctagaactaactcctatagtgtgacctcagggctatatgaacaattgaaatttctacagcatattgagaaaaaaatgaaaccacaaacgttgcttcaaaatttttaaaaggttacattctttcttaataaaattcatgtagataaaaatatttgtatgtatgttttatttttattttggttttgttttgggggttttggatttttattttttgaaaaataaggctcttcattcactaatgaaggtcttgctgatgaaaatcttgttggaagttaaggaactttttattgggtgtgtactttttacaaaataaatttaaagccatgtttatttaatgactttaaaaatgtaatggaaaaattaagatattaaaatctgttgtcttacatttggcctagatgtgttcatatgtggtgactatattcctatcatggccaaaacaaaatggatcgccccaatttttttacactaaatgtataacactaaaggtaataaatacacaaaaaatgattaagataaattcaagtgcatgtattatttactgaacttaggataaaatatatctggaaaaacagttgaaaaatgaaaacaaaatggttacgtgtttcacattaagaactctgaagaaacttattttctattcactaaaatttctagaataatagtcttgtttccaaatatgaaaacctcctccaactctaaattggctttcccttctccacaataaaaatccccctaaaatgtttggcagtaaatcagtaaaacacaaatgtacaagttagaggctttggagcataagaataaaaaagaacccatttttaagtttgaacctaaaatttcaattgcactgaaaaatgacccagtttttatgccttacatgagagcaatgattggatcataatagtaccaaggtgttttagtaccatccatcattcatgtcctgacaaatgacttgtgagatctagctgggaaattacagtgcatgttcccaggtcaaaaagtctacttttataatttattcaactgccttaacacagcacattttgaaaagagaaaccaaatattttggttcactttcaatttaccatgaataaaatactgaatgaaaatttaggctactgtagttcaaagcaacaaaatcgtcttaaaatgattttcccctggattggcccttgatatgacattatattttacaaatgggcatgcatgcttatatatattgtaacaccatcttatatcaagtagtattttttaaaaaccagaatcagttaaattagatctattaaattagatcgtgctgtgatttctgaaactgagacattcttatatttacattatttattttgcccaaattcattatttgtacttctgcctcaagagtgtgtggtataagtttttttgtttgtttgtttgttttgttttggttttttgagacggagtctcgctctgtcgcccaggctggagagcagtggcgcaatctcggctcactgcaagctccgcctcccgggttcacgccgttctcccgcctcagcctcccgagtagctgggactacaggcgcctgccaccacaaccggctaatttttttttttgtatttttagtagagacggggtttcactgtgttagccaggatggtctcggtctcctgacctcatgatctgcccgcgttggcctccctaagtgctgggattacaagcgtgagccaccgcgcccagccaagtttttaaatattaactgttcaactggtttgtatactgcagaaactaattattacactttaaaagaacacatggtgtgatctagttgaagaccaaaaaaaaaaaaatgttttcagtgccttttctctttttcactaaaatgtcaatgtgttgggtgacccacacatcctggtttgcaggaacagtctcatgttctaagggtcaaccttgctaatagtgcctcttttcactctgaaatgtctcagtgtgaacaataaattatctggccactctttcaatgcataatttgcctaaactcaatttcatgatgcttcattttcaacatttatacaatagccacaattacttctcaactttataaagaacggcatgaatactaaaattgccaccatcgttttacaaatacagaattatttccagtggtgactaagggccaaaatgaacaccatttatgcttgcattaatctttctggcaagaacctagtcaggtaattaaataaacctctatagccagaaagaaaaataattttgcatctgaaaaaaaaatgttacttgcttattactatgtagccagaattcaataatcaacccttttacgagatgaacaaattgcattgccaaacccaaattgctatttgaggtatgtaacatgatttgaattgattctaatgattatctggagcagaggaacaaggagaaaaatgaaatattttctttacagcaccttagggtgttctttataatagcccactcatttttaaacatttagatttttagaactttcaaagtatcatttgttgtcatttccagaagaaaatgatacagatgatcattgatttaacaaataaatattgaacgtccactataaataaaacctcatactggagttgatatgtccttttaaaaggctgtgtctagatgagtgaaaacaagaagataattccagctactagaatccactgtgtgaaactaggaccccaaggctctccgttcatggtcagacaaggactggaccacattatcactcatgtggaatcatggaatctacctggtgaagtagcaacatttctctatgtccttcagaatcacctgtagtactttttacaatgtagatttcttggcactccctctagagattctgattccgtggatctcaagtgagacccaggagcctgaattttaattatccactccaaggaccatggacatatacgttttaggaaactctatcctcatggcacaaaagcctttgaccatgttgactttggcctgctttttggtgtctaaacacatacaggcagagatggcaagcataaaagctaactaagcaaacataataaatgaaaaaagatgagccaggacatcgctgtttggagtaattaaccatctcagaaagctcttgctcaatattcacagcctttgcctttgaagctgactgtggcagcctccagttgaaaggggatgaggagctggcattttgaaacaggtgccgtgggctgggaagtcagtaggggaaaattggagtcattgtcttactgtaccaagcagagttgtagcctgtgactttgaatttgcaacagatcatttcagcttagattttggacaaagaggagctgtagtcataattataatagtttttaatgatctccttagagtgactgtgtgggctggaacaaagaatagagaataattttctatgcgtaacatttccaaaatgccataactatgtaggagaaatggttatgtgtttgtaaaatgcactggctttctcaaaatcacagaaatcacagatttagaagcattcttaggagtcatctagtctaactgtgattctcatctacccaccaccagatatataaagcctagcaaataaaatcagaagtaatttcattaaacagaaccctttgataatcagacctaatatatttctcaaatacttcatttttaataatcaaggaatataaattgttattattaactgttgtgaatgtgaattatagattgaaacaaacttgctgagaaaactgatgttgttaagcaagtacttattgagggcttacactatgctaggcgcttcacacaaattatttgatcctagcgaaggtggtattacttaggcagataaaagcatttagagatattaagctatttgagatcccacagctattaaatggcagaaccaaaattcaaaactaggtctgtctgattctaaaacagaaacagaaatattacacaaaacatccagaatgatggtccaaatgtgcggttcatttttaaggtttgcaaccatcaaacaatttataaattagctgaatagacttttagaatcagacaaatccagtttgaaattgtatttctaccacctatggggcctaggtcaaagatctgaacctctgcttgcctctctaatctataaaatgggaataatagtctcaaagaatgcttgttaagactgtatgcaaagtgcttagtagtacagtatctgacaaacatttatagctttaaaaaaagaaagttttgtgtttttttttttactagtatcatactaatataagaaagtgccacattcatttttgtcagtgaaattcaagactagcatatcttagattcggctacacctgtggcatattgtgaacatcatgcataacatgcatgagtgtacatgtttatcatggtcaaacataggtaccatcaatagcaagaaagggcagtgagtaagtcattgcatctgtgtcccattgaaacctccagatcagaaagtgtggagatagaaatgatgctgcagaaatttctaatccagtccaatattgtgaatgcccaagaactaaatctgagatccaaacaaataaaatgtctcgaccaagatcacatcaggagtcagtcctagtcccaggacaagaataaagccttctatcccctagttcccaaggctgtaccctctattttcattttgctaacttagaatatacactggtttggcaattttctatttttatcaaagaatccttaaaatactttgagcattctatcctaagaaaataatcaaaatagggtggtatagggggagagtaggagggccatatgcatgacgatatactctggggcattttttttctataatatcccaaaattggaagtagccataaaaacgactcactttgttctctcctttacatctttgctcaagtctcacctttcttgtgagctccatgctaaccagcctatataaattaattcccttgttccaaatctcccagcccctttcctttgttttatttttcccatgacaccaccattttctaacatataacacaatttacttagtttttagtttattgatcagctcttcacaaggaggtcaatccaagagggcatggaattttgttttttgttaactgctatattcacactacccagagcaactccgggtaacctagtagggctcaatgtttgttcaatgaattcatggatgaatgatctccaaaatgaggagactgggctagggaattaggggataatattttattctacttagttaaagtggttataaaattagaaagcaagtgtaaaaatctatagaatatgttatgaagtaaataaaaaacaatattcatattcaaataaatacttagggggaactacattaaactatgcaacagaaaaaggattgaaagggaatgcaaaaagggagtgggttttatgctcttctttttccattttaaaatggattttgtttcatttgagaaccacagcaaggtagaaagaaagaaaaggaaaggaagagagaggggatgagaaagaattataaccatgaaagttctgtctccttggcttggatactgttgacctgtatgttccttgtctaaatccctggcatctttatccaaaatgaagataaaacatttcagcaaaggagcatattaaggctcaattatcagcccggtgcggtggctcacgcctgtaattccagcacttttggaggccaaggcaggcggatcacgaggtcaggagatcgagaccatcctggctaacacggtgaaccccgtctctactaaaaatacaaaaaattagcccggcgtggtggcgggcacctgtagtcctggctactccggaggcggaggcaggagaatggtgtgaacccggcaggaggagcttgcagtgagctgagatcgcgccactgcactccagcctcggcgacagagcgagactccgtctcaaaaaaaaggctcaattttcctcttatttccagaaacacgtgctttgcagaattggctcaggcattggcaagttgctacagctcaccatactgttttgctcaaattccccatccattccagtacttccagatcccctgacttcccttttactattcttctctacattcgtctgtcttgccactgtttcgtttttaagttctccttttgtcctgccttcatagctgtcatcctcctatgcccacctctgtcccagggtcactccttgttttgtcctcagtccccagtttgtgtatgggcacctccctgaacaaataaagccgtggtactgagagaactccaggccagaaaaatccagaacagccccgtcccctcgccctgcgtttttcatgcatctcgagcctcttgcctggaacatgtgttctccgtccacctttctatgatgtgcactaggccacccccctccatcctttctgcaaaggcagtgctaacgctttctttgctgcagcagtcctgcaccttacctattcccttcttgcttacaaagacaatcacaggtctttactcctcacagtgcaataggtttattactcttcattttccccctaatgctaaagaacaggtgttcatataatcccaatgatagctgcttactccccagaatcatgtaattttagaatagaaaggagtctcaaaagccatcaggtgaaatcccattacagatctatgatcagtacagtgctaggtgcatggtaggtgtttggaaaatatttccatccataaatattatataatccgtcattacgtaccactatatgataactattttgtgccattaatgtttctaaatcatttttgcttatcagttattcacatctgtttataaaatctatgaataaactggagatcattatgttaagtgaaataagccaggcacagaaagagaaacatcacatgttcttacttacttatgggatccaaaaatgaaaacaattcaacccacagagaaagggagtagaagggtggttaccggaggctggggtggaggggaggtggggatggctaatgggtaccaaaaaatagctagaatgaatgaataaggcctactatttgatagcacaactgggtggctatagtcaataataatttaattgtacatttaaaaataactaaaagagtataattggatggttcataacacaaacgataaatgcttgaggggatggacaccccattttccatgatgtggttattacacattacatgcctgtatcaaaccatctcatgtaccctgtaaatatatacacctgcaatgtacccacaaaaattaaaaataaaataaaacaaaatagaactatgaataatcacagagaaagactgtgccttagaaggcatgagataaaactgaaaagctagtttcaggctaacaggagcaatgatacaaaatggaaaagattggttactgaagtaaggacaagaaggaatgggctaaaatcatgacaaaaggctcttatataaataataacatcttttcctactaagaactcttagatcatgtcagggcttgccaaaggaagctgaaaaatgatggttcttgaggttagcagcatatctggtaggattcaggggcaattaaactagttttttgataaagtaaaatagaataaatatgttaaatagttccccctatttaatggaagaatggaatggaaatggttagatttccatgggaaattgaaaatgattggaaagagcaagctccttatctacctttaagttgctagctttcacagcaccccagaggcacaagacctgtcttcatggtactttttgcttaggcagttgattatttttaatgatttcttttttcttttttttgtgagacgaagtctcactctgtcactcaagctggagtgcagtggcgtgatctcggctcactgcaacctccacctcctgggttcaacctattctcatgtctcagcctcccgagtaggtgggattacaggcacccgccaccaggcccggctaatttttgtatttttagtagagatggagttttggggttttgccatattggtcaggttggcctcgaactcctgatctcaggtgatctacccgcctcagactctcaaagtgctgggattacaggcaagcgccaccgcgcccagccttttaatgataatttttatattaataattgtcatttttctttctttcaggcttgtaaattttatagttcccagtggcatgtggtaaactacaaatatgaacaatattctggagacattcgacagctaccccggtaagaacctgttatgagcacttattggtcttttccaaatatagatgacatcctctgttctagtcctgccattgttcatgaatacacgtacattaatcttctgtcaaggcacattttccaaaatgtataagtaagagtcaagataggacattttgttcaacatgtgtagtttgcatcatcacagagtttggattcagatataaatatactctgatttaattttttaatgtagttttgacgttcatttatcattgtattattattctgtgagctgttttttcaatagcaggcacaagaagattagaaaagtaccatatggccaaatagtttttctgacaatattctgtatagcattcatatttgttacttgtttcatgtattttcatgctgggatatcagaagtcatgaaaataaacaacttccacaaaagacatatatatatatatatatatacacacacacgcacacacacacacacacaaccaaaaggaaaataaacacctgattttttcctgactctcaggaacataagcctttggagaaagtaattttgttctgcttctgctcaaaagtcacctccacagaaaagctcacctgactacctgaacaaaaatagaaattaattcagtgtctgtttccccttctaaagtaaaaatccccaaagggcagggacttttccctgcagaatcccctgcaggcctgtaagaagaatgcctggcacatagtaggtgtgcagtactataattacttattggacgaacaaacagagtaaatggcaaattttaaaatataatattcctggatgggtttggagttgctcatatttaaagaacttccttgaactggttctacccaactcactggttcatcaagctaagattatgtaaataattcagaaaaacacttgaaacaatcaaaagttaagtttgtattaacactctcctcaagtgaagcactgatatgatacacattggatctaatttttaatagacacatggtacagaattgggaaccactttgctatatttcctgtggccccagaagcaccttttcaagacttgtatacttggaagcattgctctcaatttccgaatgcggaatttgaaagagggattatgaactagatttaagaaggtgacatttgatcttggatatgaatcggcagtagctgccaacacaggcatcttgggaaaggattctggagaagcagcaaggcaaagaccctgaagtggtgggaaccagtatggtcacttgagtcaggaaggctagagcttaaggatgaaaggggcgtaataagatgaaaccaaggaccttaggcaagggaccctgtgtgccctggaaaggagcttggattttactttcattgcaacaaaagcctttggaaatttcaaccaggggtgtggcatgatctggtttacctctttgaaagaactcttgggctactctatggagaatgggactgcaggggtggcaatcgaagaaaaagacaggaggaggccatttattttggggtttcattaccgtgaagagaaaaaaagtatgtcccttctaaactgcaaatcttttttcaaaacactgaacagtaacgtttaccagatctttgagcattctttttgacttgaatccctgctgatagacaagctcttgcaacttcatgttgggaaggtttaccacaccctaagctttcatgagtaattgttacattcagaatgtctgggtgttcatgacacagtttttgtaggcacaactgaaaagcaaagcatcttttaacatcaggacttcctctttctgaaaatagttctgagaagtggttacaactcggaagttgggagactgcatctcaagttgagaggatggagacagccgtatttagccatccttttaactaaatgtgttcccaccatctttaggtccattacactcttcagtggctgtatccccaaacactgttcatctttccttatattcatgatgctgtaaagaaagaaagcaaattagagatttcacattcacagtattcttcctctgttaaaacaatggagaaagcatctctagaaaaaaccaatcccggacattattgcttaattgcaattctcatagtttgcaagattaatctcatgagaagaaataaaaaaaattaactgaagtattgttgagaatttcccttactttaactaaagaaagtggaagttaataccaagaaagggaagaatcagactgccacaaagtaagaaactttatgtattcaaactgaaaatcagaagttcaaaaatataaccctttcagatataccccagaacaatgaagatgagcactgaacagcagaattattctttaaaatgattttacaaagctaagcattcccctctaaagactacatgtatttaggtcagtaatggaaacagacaatttacttgggtcttccgaggctaatagaagtaaatcattttcatacctcctggattagaagaattctcctatgtctgctaccaatttaaattgcttatttctttttatgagttgctgagactgcaaaatgaaaatttgcaattatagaaaagcaaaaaaaaaggtgaaatttattctttaaatttaaatgtgtattattgactcttaagattttcactttttttatttttaagcgagggtccataggaagatactgaagaaatagatgacttcaggctagaatggaaaatgtaagcctttacacactaggaatagaaatcagcactaacttggagatcccagaagaaaaaagcagcataaaaatatatgatgccactgatttcattaatccactgggtaaaatacagagatgtgtgacatattaaaattttttaccatggtcgatttgatagaaagaagatgtaaggaagaaaaattcataagagtataaattgtgactaaagatcaaataaagtgtgaccagcttagctgggctgaaatagaacagtttttgttttttttttaataaaagagcatttttttgagtgtctacagtgagccagaatgtgctgggtgtcatacatgcattatctcatttaatactcataaccctatggaataggaactgttatcctcattttatagcagaaactcggaaactgagagggaatttaccccaaaacttacagctgataactgatggggcactcaggcatcccacactgggtaatccaggtcatttggtcagagaaaagagaaatgaggctgcctatagttatcaccaatgtcggatgcaaacaccaaagggtaaggtctgggatgagccctttatcttggtatccccgaggctcttagagaccacgcaatggtcctgggggaagaattttaaagtcaatagccacaggtgctgatcttttcatgacctttaaaagagagaagtcattgcatagtagccccacagacatgtgactgagcttgaagattgctctttaaaggcaggaggctgtgccttgtggcttattaaaaaccggattgggaaataagaatcttcagtagccctcaagcctcagcaatgatccaagcactgtctgccttccctgcccaagggcattggacaggcctccctcccgcagccctccctcctgcactgtttccagcccctacagccttccttcctggatgctccacacttggcccctcctcagaacctgtactcttgcagctccctctgccaggggattttctcctaggtcatcacacaaccagctgcttctcctcctcaatttaaatgttacctctcgagagaggccatccttgaagagtctttctacacgtggcctttgccatttccacaaggatcactcatcgctcttctcctctttctcctcttcgatttttttcttttcttttcttttctttctttctttttttttttttttttttttttttgagacagggtctcacttcgtccccaggctggagtgcagtgacacaatctcagctcaccgcaacctccacctctcgggttcaaaggatcctcctgccttagcctcccaattaggtgggattacaggtgtaggccaccatgcctggctaatttttttgtgtttttagtggagacagggtttcactatgttggccaggctggtctttaactcctgacctcaagcgatccaccagcctcggcctcccaaagtgctgggattacagccgtgagctgctacacccagccttgattttcttaacaaccattttcactcagagaaattatcttatttctgcttaattcatgattgactctctcctcccctagaatgcaagcttcctcagttcaggaacttattttctgatatgtggttgacattattgcagctcttctgggagccaggtaatatctggaaactggaatgttgaatggcaaaggagaatggcccccaagaattaagacagttctcaataatgcactttgaatttgatcaagcaaactcagaattaagaaaaaccaccagtgaagtggcacgcttacattcactacaaccctagccccagatctgacttaaattgacagtctctggtctgcataatttttaaaagtgaagattaagatcagcatggatgtggctagggactactggggttgactgagttttgctattgacttcgttggtattctttgtctcatatcttctgagttttgctattgacttcattggtattctctgtctcatatcttctgagttatttttgaatcattaatacttaaagtggatgtttaaataaagttttattttattaaagaaagagtatggaaatgtcataagttgtaatatagcgttaaatatgacatttgggaaattcctaaaaacgtttccaatcatttgtctgaagctctcttctctcttttctaaatcatctattcttcaaaaatatcagggaaaaatcactgagaaatttttactcaacctttactttgagaatagtttatatgtatctgttgtacaattttttattatctttactataaaaaagaatcagttcagaagacatcacttttggtcactctatgtataatttcaacactttcaaatttttcacacatcactttaaaagttttctgcaaattttaaacctaggaaaaagttaaaagattggtgtacaatgaatcccactattcccatcacctagaatgtgtctttcatgttttgctgtatttgttttattacacaacctgtccatccatccacccatccatccatccatccatccatccatcatccatccttctagacatctatcaatttggtttattttttggtcattttaaagtggaatttaaaacattgacacactgcctctctagactcttcggaatgcacgcctttaaatacagctatagatgtctgcagttcattttttctcttttgatataaaatgtacatacaagaaaacatgcaaattgtaagtgaaccatttgataacttttgaccacagtacacgtgtgcaactcaaacctctgttgagataacagaacaatgttatcacccccaaagagttaactaccacccctccctggttaaccctcacctctccttttctctcccccaagagacaatcagtgctctgattttcataaccatggaatcataccatgtgtgttcctgtttctagcttttcttactcagcacaatgcttctgagtgatatccacgttgttgcacgtatcagtagcttcttttcctttctgagtaacattcctgtgtgtggatctactgtagtttgtttagacatcctccagtgacagacacttctgcggcattctgagctgagttggtcataagtcactaaatctatgggcttttttgtgaaatttatagtctatctcagtcattagttccacttctcaactgggagatttgtgaaaaaaactttcacaagcatttagccttttacattgaaattcaagagaaccttactttgtttcatcacatttttgtttttacatcgttactagtttgaaaggctttctctcctccttgtttataagtatcttgcggaaatttacattaatgcgacgcctggcctgtattgtgatccacagttattgagaacaaatacctacaaaattattcttttggaaggaaggataagccatgctggccaaagaggacagaataggaggttcagaaacaaataccattgcatcaaggtcaaatgaaactgatgggaaatgactagcacggggccaaatgttgacattccactttcaagtttgtctttgttgcctcttccttggttttcccgattcactcttttttcattcacttgggatgtttcctccgttctttctttactgctgtgccaccattttaagaatcctggaacactcatcttctgttctctgcagacagggtacctggagcaattgctctgaaatcaaccattggaaccttcctctgaatctcaggcaacatgtcacctctcacaggagtgggggagagggaagggttgtatttacaggctttatttttgccaatcaaattaaaaggtgagagagactgcttcttgttcagagcatgttagatggtattaaggagaaaaggaatatttttggtggggtagcaagaatttcccagtgatcctaaaagaactctgtcttctgctacttcctctgccatcccataaagttgaccctgaccaaaagaggcagaacaagttaacatcagtgcaggcagcagtgataggcttgactatctctaagactctacaagaagaaaggataacctcctttggaagagagaaatggcagcaatcttacttaatgtgcttattaaagattcacctttcctaaatgcaggcttctaataccatctcttgaaagtgattacaatgataaatttccatgttatgtctattttatcacaataaaaaacacttcttatcaggaatggagaacatggttctgatctcaggcttttcatagtttaacagtgaggccaatgttccttttgtgctctaactttccctgctgaaaatgaagggagggtaagcatattttgaagccctcacttaacacctatgtgagtgcacagaatagcaattttatgcatacttaagtctaaagagctctgatcattcaccttcctatctggagtaccatcaacataggaaataatttctgatgtgaataccaaatgcacttctgatctttcctttctcaatagtcagattcagaggttgcttttacacaatataaataatcttaaaacaaataccgttttattatctctgcatatttaatttttttaagattccacatataaatgagatcctacaatttttttctccacgtctggcttatttcatttagcatagtgtcctccaggtccatccatatcatggcaaatggcagaatccctactttttaaggctgaataatattccattttacacacacacacattaatatatacatacacacatatgtagtcacacacaaatatattcacacatacatattcacacacatacatacacacatatatattcacacatacaaaaacatatattcacacacatacatacacatatatattcacacacacatacacacatatattcacacacatacatacacatattcacaccacatatacatacacacatatatattcacacatatatacatgcacacacatatattcacataaatatatacacacatatattcacacacatatacatacaaacacatatatattcacacacgtatatacatacacacacagacaaacacacatatacattgaaacctcctaagtgtccattgacagaggaatgaataaagagaatgctatacacacacatgtattcacacacatatatacatacatgcatgtatattcacacacatatatacatacactcatatatattcatatatacatgcacacacatatatattcacacacatatacatacaatacatacagacacacacatatgtattcacacatgtatacacacgcacacgcacacacatatatggaaacgtcctaagtgtccattgacagaggaatagataagagaatgctagacacacacacacacacacacacacacacacacacaggcctatattaatatattaaacattctctttatccattcctctttcaatggacacttagaatgtttccatatattggctagtatgaataatgccacaatgatgatgggagtgcagatatctttataagctggcgactttatctccttcaaatatatacccagaggaggaattgctgggtcatatgctagttctatttttaatttacttagaaacctccatactgtttcccataatgcttgtagcaatctacattctcaccaacagttaccaggggtgagaggaaacagggagaagtcaatgaactgatgcaaagtagcacatgtgcaggatgaagtctagagagctaatgtacaacaagaggactaaagttagtgaaatcagattgcattagtgattttgcttaaatcagtagattttactgctcttattacaaaaaagtaactattgagatgatagttatgttaatttgcttcactataataccattttactatctacatgtatccctcccataccaccatgttgtaaacctcaagcatatccaataaaatttactttaaaaaagaaaaacatcccatgaaatttttatacatgggagtttatatagtaaagggggccaaacagctagacatcaagaaatgcccatactttggatggtattgtctggtttccattcaaccattagttatgagatagaatcaagccaaagaaaacttatttgtggtttattttaccatttataaaaccagatgcacactcttgtttctctgagctggtcggagatgttgcaacttgaataggcatttctaggataccatggaaatgcacaaagtaagtgtaattgctaccagtccctttggtgcacatttttgaggaggccatggttagggagcaacacagcctagtggccacagtacagactggttctcagggtcatggttcttcagggctggggctcttccagtgactactgtgtacccttgagtatgtcacatacagatgacacagaaatgacaatgaaaatatcactacttattaagtagtgattccacctacaaatgtgggggaaggaaaatagaaactccccaacctttcaaattgtcctgcttgcctacatctaactcaaaaagatatgtgtaagtttatgtaattagaaggccaaacgccagtggctcatgcctataattccagcactttgggagactgaggtgggaggatagtttgaggccaggagttcaagaccagcctgaccaacatcacaaaaccccatccccacaaaaaatacaaaaatggtggtacatgcctgtaatcccaggtactacttgggggggtgttgggggtgctgcatgcagcatgagaatcgcttcaacccgggaggtggaggttgcagtgagccgagatcatgccactgcactttagcctgagcgacagagtgagactgtctcaaatatatatatataattagtaactccatggtttaaaatagagatttatatactggagataagatatcatggcagaggaaagttaatactttcaaaggaaatgagacactcaaaagattacattattttacagaaatttgtaagaacaccagcaccatagttgttattgttacctggggagcaacttaaaatgaaagctgtctccaatgacaaatcagaatctttttttttttttaatatcagagcagaatacaaaccagagaagcttccttcacattcctttgagattgaccatgaagatgctgataaggatgaagtaagtaaatagttgaaagtgagatgtttaaaacatgaggataattagtttctgtcttgcactgaaagtttcgagttctgaccggtttgttgtaagctgtagtagctgttggtggtagggcttttagtcaaaatgagtcacgtttgttttgaaattgaacatgcttatttaagatgagtcaaagagaggaagaggagtctcttttttaaatgcagtgtctaggatctaggatccacaaaagatggctgtcatgctactatgcctttcctacaggataccacttcccactcgtcttccaaggggggtggaggagcgggaggaactggtgttttcaagtccggctggctctacaaggggaattttaacagcaccgtgaacaacaccgttactgttcgggtaaggagatatcaagactcatctttatctctgtcacccttcttaacactccctcctctggtcacagcacagaagagagccatttgcattgagtttatgtttcatataatattttatttatgaggaagtaggatgctcttctctagaaaaatgtcctagaaatatagcactcctgaaggaattagaataattctaatttctatgagtaatagcacattacaatttgaatatctccttatatcttttcctttatttagtcattcaaaaagcgctacttccagctgactcagttaccagataactcctacattatgaacttttacaaagatgagaaaatatccaaagaacccaaaggatgcatctttttggattcctgtacaggagtggtgcaggtgagtagacatcccttttcctccttgggatttttttttatttgaaaagtatatttaacaaatattcatggagtatctgatatgagccaagagctgctctagattctaagaattctgtgaaaaacaaggcagcctggatctctactttcacaaatcttactttccagagagaaagaaaaacaggaattaagcaaagacatgaataagcagaatggaatcagctggtaaatttttcaataaagaaaataaacagagaaacaaaagggagacagaagagtggtgaggttgaaaaggaatattaatactcaataagggagaagagcatttttgaagagagatcatttgatctacagaccaaagaatgagcagagggccaggcgcaggggctcacacctgtaatcccaacactttgggaggccaaggcgggtggatcacttgaggtcaggagttggagactagctaggccaacatggtgaaaccccatctctactaaaaatacaaaaattagccagatgcggtggcacaggcctgtaatcccagctactggggaggctaaggcaggagaatcacttgaacccaggaggcggaggttgcagtgagccgagatcgtgccactgcactccagactgggtgacagagagagactctgtctcaaaaaacaaacaaacaacaaaaaaagaataagcaaaggcagcaagttcaaaggccctgcggcaggggcaagtctcagatattcaaagacaagcagataattagcacccatgtttgctgccatgtagagaacccctgagataatgaaattcagtaaaataatatgcaaatgacatggtattaacatacgcacttcaaatatgttattttataattaagtaataatgatagagtaagttgacagtgtacatatgcagcatctttcttctaagaggtggctgtcttcaaagacaaggattccactgattccagagagtctaatttcagaagcagacatagtgcttttaacaaataatgttctctataagctcttggtcttcaaattattgtccttagtatgaaattcagcacgggccactgtggcaaagggaagcagaataattccatagaccccatttggacatttggctttcgaatcgctgcttcctactctgatgaaataactgaccttattcccttttatgtaatcatgggagcaatcaaaagtgttttagcaaccttccctcaaatttcacaatggcactggctcactgaggtccaggactctatttctggtcacaggccagtagagaagtactttctgttaccctcaaacctcagcattcacctagcttgttacgagctgaaattacatcacagaccactcctggaggcccttggatatgtggatgcaagtagagttctctccagtcatttagtcccggcctatttctggatggtttatctgttaaaatctggaattcttccaggaagtaataaagctgaactttaaaaggaaaaaattaactgtttctgagcactctgctgcaagtgaaagataattgcattttaacacagatgccagctttccatatggaaagggcaataatgaccttaatggagggtggaggctattttctactgttggtcacaaaggacaccttttggccttagaaacatgaagtaaaacgttagcagtaaagatcaataactgcattttatagacattgagcagaaaatgttaaatattatcctttccatttgtacttgaaagctttctctagcaaatgagtcatcattttttaagaagtaccattgtagtcttttgttatatattaagtttgcagaaacccaggttaatatgcaatatttttcttcttcaaagaatcatagaacttattgctctaatctgaccttcctatggaggaactgcttctccatcatctcttacttagattgtgtttcagtctctgcttaaacattgtcatggaaaaaaaggagtattgaagggaaaacacaagcttgggattcatgcaagtccgcattcaaatcctagttttaccatttactacccaaagactttgagtaagttacttgaccaatttgatctcaggttcctcatctgtaaaactagaacaatgtgctaatatgtgaaaagaactgggagatagtgtatttagcctttctcccctaattcttccattaatttcaaaggtcacaacctaggatatagacattccattatgggaaagtcttcctagaaaaccttgatttacgttccggatattttttcctaagtgtgttaatttatctatgtctttatttattcattaacctactgattcattcaacaaacccacttagtgcctatgacatgctagaaactacacccaggtgtggggaagtcaattctttattgaagtcagaatcagagaggggcatcgctacttgctcactatcacacgatatctcgagagcgatgatggaggtatgaatggcagagaccatggaatgctctgggaacatgaaacaatgatgaactctttcagctcaggctgtaagtctgtacagaaaaagctgggcctgtctataatattccccaaggtagatttggcatatgtatcttttaaagagttcacctctatccctgcatttatattcctcttcatcaagaagctttatccagtattctctacatcctttgtagaggcagggaccagtttcttgggatcactctggggagacaaaacctgggtcacttgtcactttgtgtgtgggtcccagttcttacatatttgcttatagttcttccagatgtgtaagtttttacatctggagagaatttgagtgaaatagtgccagtttaaccatagttctagtaagctctcaggcatgaaatgtgcctgaagatgaatcatgtacacacaaaagcacagagcaaatgaataactaggatgaatcagaccagttttatgaagaatcattgccaggttccgttgaatcaaacaaaaaagaggaacaacgtctctgcctcagaaagtactacttagcatccagcattcttagggagttcaagttcattataatctttagtgaatatgccatttcagtttgattcattcagacttaatccatatcatcgttttccttagaatactttggaattcttagacgtatattacaagggtggctcaagtagagagaaactccttcccagctttctcagagactttaggtaatgtttatgactgacaatttcctgaatcttggccaaaaaaaacacaaaacaaaacaaagcctaatcatggttttctattttttcataatatcatcaaagagtattagatattttttatgggcctatgctcccaatctggaaaagaacttggtttttgctgcttcaagttttttcttctgggactaagagatatttaggcctgtgttatcctatcttgttccttcagttcatgtattcattcattcattctcacattcattcatctatccatccattcattccaggttctgccactgtagaagagaatgaacagcccaagaatctcatctgttttaggtccctatctcagcaatgataataagctgatgtcactttagacaggcttacatgggtgtggacagtgtggtggacaaggctcatttccttgagtctgccaccatgtggatatgggttccaagacagtggcttcatgtgactaaccaaaggctagaaatgcagatacctcctgtaggtcaagcagccccctgcatgcatgaagagaggccaggtgtgagaaacagatgcagcttggactatgtagacgtggagaatgcctgcctacagaaagcaagtcatattgggagcaggggaaagaacattacaaggaaaacaaatctagaagccaaatatgacccgtaagcctcgcattagcaactcaagttctgaaaatctcacttccgagaacaataagaaccaaaattatacttgtggttttcttcatctaatatattatttgacagcacttgatggaacatgaactatgattgttccatttattaaaataaaattcagagaggtagagtgtctttcacaggtcacagagctaatgaattgcaaagtttaacttgaggcagaggaatgtccaaaattacagacagatgcccaaagaaatgatgtattatcatatgtaaagtaggcatacccacatacatacatttattctacctacataagctatgtgggcagaaaaaacactacaaagatatgttcatgtggagctttaagcagtgaattttagatatgggattcatttcagcaaatactagtatatattggaaaacttgcaatgtgcaaaccattgtgaaaagagcaaactctgaaaataggtgtggctcatgtcttcaaaaagcttccaggatgtgggaaggatgcacagaaaaaaaaacaaaacaaatatggtacatgcaaagaaaacaagtaacacacttcaagcaataagtcctgataacatatgcaagaatgaaattacatttatcactgcatgatgccatatcatattacacacctattatatacatatatgtgtatatatatgttacatatgttgtctttctgcttatttgcttactgacatttcattacactagaaggtaagttcaatgagggaaagcactttacttgaattttttcagttctgtgtgactgaaacataggaggtacccatttaattttcactgaatgaatgaacaaataaacctacagagagtggagaggatttcatggaagggagccatcgataccagaaacctggatttgatgttgtatgattcccttaagactcttcttttgttcctgcaaaattctatacaagatactagccacataataggtataattaaatatttgatttgggtagcttccctctttgatattcagtccaccattggcttgagtgattttcttggagtatctacagtttggaactttttcagatgaacattgtggaagcagaacagtttgccacaactcactaaacatatcatgacaataagacatattcacaggttcctactatttatgaagtcatgtaaatatactatggtaaggttgactgaacaaagtagttgcactggctgcaaaggacactgatatatgagaaatagaggaaaatttgggggagcaaaaacaagaatatgattacttcttgattaccattttaatgacttaacaatcatacttcaaaattattaaaacttcctattgaaatatcccattgattttcaatttttgccctttttgctattctatatgacattatctttgagattacagacagcaagatcgaaaaccactcagacatcttaatctttcccaacataagcttctctgggctgcaaatggttctatttctcttgaaatagaagaaggtaatttagttcttgagacatttcaaatcgaatatttattttaattataaatgtccctttttgagaaacaagattgtaatactttgctcaaatttttaagaatatttgtgattatattgttgaagccggcaatcatatttaattcatttgaagtactgaatgcagtttagacaatcaaatcaactcgtttatattttgtaatgtttcatttcaaaattttgttagtgttcggcatcttcattcgaaagcaggttgcaactcaatccacctttaatttggacccaatataagcattttaggttgctttttatctcccttttaacattatttgcagcatcaaattcatcactcaaattctttcatttgtttgttttcaagataacactgagatttgcttgcatttttctataatcaaatacttaaaaatgtccttgcaaaagttgtgcaccaaactctggacatttacagttcttttatgagtgtctatttctttcttttttaatttttttttttattttgagacagagactcgctctgtcacccaggctgggagtgcagtggtgcaatttcggctcactgcaacctctacctcctgggttcaagtaactttcctgcctcagcctcccaaatagctgggaatacaggcatgcaccaccatgcccagctaatttttgtatttttagtagagacagggtttcaccatgttgtccaggctggtcttaaactcctggcctcaagtgagctgcccgccttggcctcctaaagcgctgggattacaggagtgagacactacgcccagccctgagtgtctatttctattcctgttgtttttttgaaggaaattgtgctgtgatagaacacctgtctttccttttatacctgctctgcagccatcttgtctttgcccttagactgtccatcagtgaaggtcgcaggtgattttgtagcccttcttcgtcagaacatcccagagctgtgtgtgaggacacgtggaggacatctaccccagtcctcctggggagagtggggcgtctaggaatttgccttcggaaggaagctgcctagatgtttgctttgcacactgaagtttgaggccatgggctttctgagtaccctccactttgtttacactgcagtcaaaatgattttttcaaaatgcaactctgaccttttacttgtccacatacttctattctatgttctcatagaacccagtacctctttttcaaaacatttgtacaaaatttaaatatatttgttttctgatttcacatttgtctgattaattgcttaatgcctgtcattcctattctgcaagagcagggactggctatgtttttgtccaacacaaagtatgaacacaacagatatctctttgatagtcaattatatcgctgcacttagcactgaggatacaaatttaggttctgcccttctaagacttgtggactataaagagccaggcctgggactgccattataaggcaaagaaataaataatacttgatggtaatacaaaagtatggacaggagcaaagggctcatccttggaagtctagaaagtgatgtttgagctgtgaatttccacatgagaaccatagttagcattttagccaattctttctcctttggttcctgaactttactttttctcaagactatgtgttgccccactatgtgttcttgagcactgagagaaaccacaactcccaggccacagatgcccctttgttgtgccggggcaatgtcaagtaaggagaccagcatcagctgagcatcttctgtgtccctggctctgtgcaatgcataaggcagctcagtgggtgggattaggagcacagttgttagagtatatagggcttattttcccttctctaccatttgctatcaatataatcccaaacacattttaattaatctccccaaaactcagtttcactacatgtgaaatggaataatgtgattggtcccacagggttgttatgacatttaaattaaataatgaccataaagtacagagccagtatttagtaattgttgtgtttgcactagtaatcttgttgttgtgattgttgaaagaaacagctatctggggacagtctgtgagagtatcccaaagaaagagaacattgccggaggggtattagaaatttttgcttgtcaccaagaaatagcaatcctgttccccaaaagaattttataccttgttatttagccacaatcccacactattgatctcattttatggctcttctcttatttgtattctacttaatagagttgtcctaagtgttagggtttgctctattacaattatgagtaagctacaggttttagaacatattgataaaagctggacaccggtataggaattgcctggagtaaatcaaagatgaagtatcttcagtaatctttccaacaaccacccccttaaataacactagtttgtgtcactaggggaaagtttccactttgaatgtatgttccaatctcataccaggaatatataaaattgtaacaatttgttcttgggttcccccgctttaaatgtccttccctgaactttcaatagcccatttctcctttctacagatttcaaatcagagatcttctttggggaaaggcctgcttctgaccacccaatctaaagtacctactcatcacactggcttattttagttctctgcacaatggagaacctttgtttttcaattgtttgttcattccttcaattattcatccattcacctcttctctactagaatgtcaacttggaataggaacctattccaatagaataggaacctattccaatagaataggaacctattccaatagaataggaacctattatgttccattcataaaatatgactggttttgaacccaccactattgaatccttcaagtgtccgtactattacatgatatggtggttaggaaaactgacccagtcctcatggaggtagccttaagggagacatgtatttgtcaaaacaaacaaaaatggataagcagataatttcaaatcatggtaagtgctctggaggacaagaactttgtccctttgtcctagactggaaaattgaggaaagtttcaattgagatctgaagagtggatacaaatcatataagtacatgggggcacacaccatgctcactatgcttttgagcgcatgtgtggtggagggggccagcctgtctcaggccttccttgtggcagcaataagaacatgacaggaacacattcgggaactagaaaaaggctttgtgggttggtcacaaaatgcaaagtagagatgtcaagctagagaagaatctggaggttggtgaagccagagccaggaaaggaattgggatgtcactgcacatggatgtcgtttgaagccattggaatagatgagaaataaaggagagaaaggagtctgaggcatagccaggattctcactagaggtcatgagaagaaggaacagctggcagaggagatcgaaaaaaggcagccacactcagaatagagtgtgctcgtggcaactgaaggaaggtgagtttcagaaaggaggaagtggccattgtgttaattctgctgcaaggacaaggaagatacgaagaaagaaatagtccttaagatagtatggcaacatagggcctgttagtgaccttggtaagagctgcctctgggatgcgatagggtcagacgcccacctggaatgaatcacagaatataaggtgagaaagtcaaggcagaaactcaaagaaactcttacaaggagttaagaatatactcaagcacatgcccgtgatgaaatgttcaagctaacgtgtccatccaatcaacaaaaccctaaataagatatttcttagtacaaaaagctttgaaagaaatcaaacaaaatgatcagacccatctaaaattttgtcttgttctggaaaattttctttatgttatctatctgtatggaaagacttttggaacctcaagcccacataaatgatctctctctcgaaggcttattttttggtattctctttttctttctttctttttataccacagaataacagactaagaaaatatgcctttgaattgaaaatgaatgatctgacctattttgtgctggcagctgaaacagagtcagatatggatgaatggatccacaccctcaaccgcattctgcaaatcagtcctgaggggcccctccaagggaggaggagcacagagctcactgatctgggtctgggtgagagcatatgaagccgtcttccttcctttgtccagtgtgacctgtgtttttggttcactaaagctgctaggcattgtagttgctgtctggtctagctcatccatcctggggctgtttgttccaagaatcactaaatcactcctaaatctttactgcacagtaatggccaccacacataagtacaattcagagtcaactggcaacgatctgaggctttcccccagcaaatgatgttgggaatcatttgtcacagcatccaaaatgtgctcatgtccaatgggacattaccttatagggggcattttgtggtattttagcctttcattaaatttaattaatgaatcttatgctctgtaaaggcaaatatgaattccttccttttagtgaaaaagcatctttcatttctgctttttgatcatactgtgatcatcttatatgtgaaagtttcaaaaattatacatggtgatagaatttttataaaattaaattttttttctccccatcctaattccttcataagggtctacttcattttatgcaaagagaagggaacaagagagaggaaagaaaaggtgaaaaggttagaaaagcaagtctgtagctacatagaaggcaagttcaacaccagcaaagtcagtcactcctcccaaaacaaaactattttcagacattttgcatagcacatggtacattagaaaccaaagcatctttaagttcccctagtctaagtctcaggctgtagagtgaaagagccatggagtaatatggaaaaaaactattgctgattttgttgattttaacacaactactgtatgccatagtaggtgttttacacttaggatttccttaataataacaacgatagtattaatgtttacagtgtcttacagagtttaagtagctgaagcaagaaggtggattctaaattgatagcctgagagccagaattaccaaaaatacatacatatttaagaaaactttagtatgcattaatgaagtaagtcaagacaaccccaagtataaatgtagtgtaaaaatccaaagttcttgtggacacaagatggtatcatagcaagaatcccaaaatgatcatcagagggtctgatttccaggcccagatcactcaacaatgtggagttcaggagtcagaacacaatgaaagcttaggctcaccaacgtccctcttagctcttaagcctaacttagttttgcatgtcacaggctagaagaatgtgtgactcgtgagtaatatttaataacctgacttggtatatctttttaagattcgctggataattctgtaacttgtgaatgcacgccagaggaaacagattcttcagagaacaacctacacgcagactttgcaaaggtaataaagttggcattgtacttgcaaaaccaatttgaattatttgttagttattgctttcatggaaaagacgtaaatgctttcttttaagatttagaccaagaagctaatttggaacttcccgttaacctatgtgttttcattaacatacacatagggctcaaaaaggaaacatacttttacaagatttgccaagtgttaatgggtaatactaaaatggtgataatactaaggggctgcttcttggccatgtggatgtgtcaggggctgtatctggatatttagataccaaggactaacacaattttctctgtagtacctcacagaaacagaagatactgtaaaaacaactcgaaacatggagaggctaaatctgttctctctagatccagacatagatgtaagtcaaaattttttctaagcagatatgaacttgatccatacagttggggattataatttagaatttcttttttatgttggatgtttggtgactcattcaaaacttttttagaccttgaaacttcaaaaaaaagatctcttggaacctgagtctgtgatcaaaccatttgaagaaaaagctgccaagagaatcatgatcatctgtaaagccctcaactcaaatcttcagggatgtgttacggagaatgaaaatgatccgataacgaatgtaagtttctcctctgttacatcctataccattaagccaacattacaccaccctagtcaaaaatcttttctattcctgctaattccaggcactgatttctcactctctagtgtaccagggaatattattaacagccttttcccacattacacaagtgtacaagttctaaagtggaacactttataatatactgtatgaataaagcctaataaaatattaatatactatactttatcaatatactgccataaaattttccttttaacttaaagaaaaagcattaaaggactgtgtttggggattctatgaaatcagcacagtggtttagagtttcctatggcattgtgtgtatcctcttagtagtactcaagatggctttttttttttttttttttttttttgagatggtcttgctctgttgcccaggctggagtgcagttgcgcagtctcggctcactgcagcctcagctcagtgcagccgcagcttccagggctcaagcgatccttccacctaagccttccaagtaatggactacaggcacgcaccaccatggccgcctagctaatttttttgtatttcttatacagatgaggttttgccatgatggccagactggtttagaactcctaggctcaagctacctgcctgcctcaacctctcaaagtgctgggattacaggcatgagctaccacacctggccagagatggcttttacagggacatttttattttactatttctatgtttattttcatgtgtattagagaaaaatcaaagctaacaaaccctgtgacttcccagccattattgctgaggacaagactaaacagtgtatcaagtaaagtaatattagatggatgttaaataaatactagtaggatgggacatgtaaatatcagaaatgacaaaggagcttcactgatatttgtgtgagttctcttgaaaacttcgtcttagtactttagcaggcagtcccactagattgttaatgtatgtgtgggaagggaactttttatgagcataaacgttattaaatgttgaattattttttaaaatcactcataattctatatcaatcttgattatgttaatatcctaatcaatataaggcacagttaatattttggcatatcttctttcattcttttttaatgcgttctgttcaaatttctaatccatcatccctcaattgtcatctttcacctcaaagaggaaaactgatttccagatccttgataggagtcacattggctttcgaaggcagaaaccccattaagttttcactgtaaactgggtccacacagtctcatgccttcatccatttatgatccagggaaactagccttgctagttgtgacagtgagtggatggcagaaagaattaaccctttcagaagactttacttgatacctactgacctgtgtctttagcacctcagtgatttgctttgagcctcctaccccaggtgtagagcaggataaggtccatgctgtggacctctgatttaatgaggagactcaaatgagatgtgccgttctgggatcagattgcctggctctccaactcacaagttgtgccactctgggcaactggcctactgtcagtcttcactcctttaaatggagataataacaatgcctatttcaagtgattgttgtggttacacatggtaccatatcaaaggtactcagacattgcttggtacaaagtaagcattcgttaaatacttaactgtcatctaaatatgtgagaaattgcattgaaatttatcaaaactgcatgcaagttattgatatttgtattgatatatgtgagattcttgttgacaggtaagctaaaatggaaatgtgtcaccaataagaatcttgtcaaaaaatgaagctgttttatattctataactttgactgtgtactaggtgtgagtagaaatgaaagtagttgaagtcaggtttattcattctccaaatatacttattccaagtgtctactgtgagccaaacttgtcctaagaactgggaaaacaggaagtaactagataagcaaggtccctagtgtcttgaagattagattctttttgaaaacggcagaaagtaaacaagaaaactcacaatttaagtgcacattatgcaaagttctttaaaagaaataaatatggagagatgtgttccagaggaattcaggaaagggttactttagacaggatggtcatggaaggccctctcggcagaggtgattttgaacagagacctaaaggttgggaaggataaaaaggcaggtcaggggagaacattctaggcagaagaaagagaagtacaaatgcaccaagacaggtaagctttagcaagttctaggaactgaaaagagttagggaggtgaagggtataccaagatgatgtagaagaaacagagataagatgatgtagggccttaagccatagtaaagagtttgaatttatcctaagtgtgattggaagctattcaatggtttaaagcactttaaaaacaagagttgtccaagaagaagaattaggaggctactaccaccgtttattgcatggcttgaacaagggctggcaagggagaaggagagaaatgggtggattggactggtgttttgtaaattgggctgataagctttcctaatgtattggatatactggataatggaaaaagaaatctcaagggtgagtactggtttttgttttggacggttttacacattgtgatgccatttactaaaatggtaacacgggagggagatttgcacaatacaggtcaaaaataccattatgaacatgtttcacttgttggtactattagatatccaaagagagatgtcttagggacagattcaaatgcaagtttggcggccaggcacggtggctcacacctgtaatcccagcactttgggaggccaaggcaggcagatcacctgaggtcaggagttcaagaccagcctgtccaacatggcaaaaccttgtctctacaaaaaatacaaaaattagctgtacacagtggcacacgcctgtagtcccagctacttaggaggctgaggcagaagaatcgcctgaacccaggaggtggaggttgcagtaagccgagatcatgccactgcactccagcctgggtgacacagtgagactccgtctcaaaaaaaaaaaaaaaaaaaaaaaaaaaatggagtggccatgaatggaaatacaaatttggaagtctagttcagacaatgatgttggttggggggagaggggcgggatctaaaaatatctatgaccatagagaaggggccaggaaccaaataaaatatctgaagaatgaatagagaagtgaccaaagaagactaaacagggatggctgttgggataaagataaaccaaggaatactgtatcatgaaaccaagagcaaatgggtagctatgggattggtgccaagaagctgaggaacatgaagtgaaagaggagtccatctggtagacatggcaaagtggaggatgttgatgactatggcaagagcagctcccatggaatgcaaagtgttaggagtaatctgatcatgctttcaggcaggattttaaaataaaaacaaaacaaaaatctagaaacttagtccttgaaaccatttggaaatacctgtattagtctgttctcatgctgctaagaaagacatacccaagactgtaatttataaaggaaggaggtttaattgactcacagttcagcatgactggtgaggcctcaagaaacttacaatcatcatggaaggggaatcaaacatgtccttcttcacatggcggcagcaaagggaaatgccaagcaaaagggggaaaagccccttataaaaccatcagatattatgagaactcactcactatcatgagaacagcatgagggtaactgcccccataattcaattacttcccactgggtccctcctatgacatgtgaggattatgagaactacaatttaagatgagatttgggtggtgacacagccaaatcatatcattacctcaaatggtaatgtcacttagtcaccttgttaaataaaaatagatgctttttttgacccagaacatatttaaatgtaatttaaaatgcaatttagaaactgaaaatcaaagatagtgggcttttctttctactgccaggggcatatgactccttccacgtgaattcctttctttgtactaagacccatattcagaagccaaatgtttgtatttgggccaatctccccaggcaagagaacacagccaagtacagagaaccaagttagtgtgtcctttggtatctgtcaggccaaagggttaagttgatttggagtgttttgtacgtcagtgttgtttttcattttacagttgatacatatgttgaaaaactaggaaattactttagaaaaataatttcattgtgcctataagcaataacacaaaaaataatgtcagcctcaccttcacagcagtttgttatttaataccattgttttttaaaaatcagtgtttatttattcactgacactctttcattaatgaatctatttttaaactcattgttcttaattcaatgagcatgttttaaattaattgaaatatttctccaagctgcttaggagccaactactgcatttaatgaatgagattctgaagactccctgaaataacatcctcatgatgagaaaacaatgtttgacagcatgtaattttttagtcagtaaattgaaaaccaaattcaagttgatggttttgtagtataaaatatttctttgaaaatagaaattgactccaaaaatctgaactaataaagctacatcacagtagaactacatttaaaattttatctttgcgagtttttttcagaagagtacagaattctaaacacaagaaacctatgaattaatttgttaggctttgcagatgctttgttaaatcctcactggaaagccagtgatttgacatttattttgaaaaggtggattggaagaaagaaatgaatcaccacatgagctttaatttttgatgggttatcaaagtaggtatttatttccattcacaaagtagaaatgaaaatcaaaatgcaacaattcaggaaaaaagatgggttttgctttgaccttcaatgtgttttgagttcccactttagttgtttttctgtaatttttgcatttttcaactcttggcagactactactaccacaaaacaagagtttttctgtattaatttaaattggtatactataaacttttactttgtaattgctttatattttaaaaaataatttattgaatttatcttatatgcaaaaacttttttctaacagtaagggagctggcaagtattgctaatattaagaaattggacttgtcccccccgtataaactagtcacattactacatttcaaaagataggagatactgttaagcatttaacaaaacccacagtgtgagtgagtctgtgtagtaataaactggatcacaatagggtgtttcactataatctgtttgcccctagaatactggtagagattggcatcaactcaaacttaagtagcattttaaaacagtaaaaatgctagtttttataggcgtattccaactttaatcacataaatgtgtaactacatatatgtgcatgtatgcaatatatgtatatatgtacatatatgtatgtaattacatatgcatatattaatttggtctttgtctctgttgtatgtgacatttttctagttgaccattctttccttcttgaatctttctttgcttctgtgatactctggcaacatttaaaattttttcatttgttttgtaaaatttttccctacttcccaatccattttataagttgttttccctactcccatctccatcctttgcatgttgatactttccagaatcctgttctgattttcttctatttcatggattcaacaggaccccacacacaaaaaaaacctctcaggcccagctcttcagcccagtttccttgacttggctcaaaacacacatccaactgccactgggatgtcccgcagatgactttctatatcccatttggaattcatctttgtatctttatcccctatatcagccaatggtatgaccatccacttcatttcctttatcctcaaacctgggaattttctgtattcatgcccctgtgaaacattttctccaatcaaccaagacaaacacatgcaaagaatatccaagctctttggtcatacttccttaatgtttctcaaatgcctctcccacaaacgcttcctaccaatttttcattttcctccactctgatcccactctaatgttcttttcctgtgctctttgatgtcttatgtctttgcacatgtcacacaccctacctagaaatcccttctaaccaactctgtacctaattcctacttctttaaaacttgaccaagaaatgtccccttcttctcatcttccatatctttcccattttcacatcttccacttcctagcctgggggcaagaggttaagaggaaagccacatagaggcatggatttgggtgagcacccaagaattgatggggagagaaagccatgaagagggacagaagcagcctgtcgtgggtgtgttgtgatacaggtgcagggcagcccagaggaggcaactagaaaagatggctgatatggttgggagactggttactttgaaccaataagtaactggttgaacaagtaagtaaacagattcatggtaatgagatcccgcattctcactgttggaggacctacttaccaatattaaaaatggaaaggctagaatgaacccttgagtgtttgtatcggaagcagaggtataaacatgaactaactggtttttaataagtattcatacacagatagagataaataaattttgtgtgtgtgtgtgtgtgtgtgtgtgtgtgtgtatttcttagctctgtatgatcggagggcagagaagcaatgatatccctgtgacagtgagcacaacaagcacccagatcgtggtttgtaaatgtcaccctcactgtaaggaaccagggctccttggagaaatatctggagcatgagtagtataggataagcctggaacatcctatttgataaagaagtactcaaaaaatgatggagacttgccaaaaatatacccagaagttaccttgaatgagtgcctctagccaaatctgggacaatttcagcatcacactaacactaattatcgtaagagcaaaacccattgagtaaaacagtaatccatgagtctatacttgtattaataaattaattaattaatatcaaaataagagagaagggaaagctcatccgtatgatggaatactagctaatacgtgtagaaagaatgatggaactgaaaaatcaccattggtcgccatcatggtggtagttgactgcaatggaagttatcaatggagatgaagactagggtgggttgtgtttggtgagtagcaagacctgggggtaatctcagaacatatttccacaaatacaaatcaattgccaaagggaaaatggtgacctttataatggagaaaaccagcagataaggctaacatcacagttgctgaaggagttgacactgtgtgctctagacacaatgaagtatgaaaatcaagcatcagtctgagattttactgccataaaagcatgacctgaatcctgtcacgaggacacatacaacagacccagattgaatttatgtcagaatatatgtcctgtactctttaaaaggccaaaaacctgaaagagagaaaaagactgaggaacagttttgactgaattaaattgaagggaaatagcagaaaaatacaatgagtagtcctagatgggattctggaccagaaagaaaaacagaggcattattgagtcaactggcagcatcgaaaggggcatgtgagttgcacagtttgggccaatatcactttcctgacttggatggctgcacggtgattaggcaggtaagtgtcctcatttcgggaaaacactcgctggagtatttaggagaggaataatatgggaaacttgctctcaaagcattcagactggttataataggtgactgttagagagagagagagtgtgtgtgtatgtgtgtaagagagagagagagagtgtgtgtgtgtgtgtgagagagagagagagagagagaaacaggaggttaacagttgaatctgggcaagggggataattaaggtggttttatgcaccttttacacaacctttctctctattcaaaattatttcaatataagagaaaaaatagttaatatctgttttaaaaattcaactaagatatcaactcctcttaggaaacttcctgccctctctgccaacagactccctcacaacctgatgctcacctacctacttgccacagtgttttgtgttttaatatgtatctgcgacactaatgtattaggagtgccttagaacagtggcaaacacgtaataaatgctcaataactgttagctattattatgattctatcaagctgtgataaaaaacagagatgtggttggcctagtgaagttcaaccacagtgcagtctcgaaacttctaggatttcattacagattttcaagggccttggagacttaggtggcatgtattttctaagactgtaagggaaataactggaaggatttgtaaggcccaaccatgcatgtaaatgcaacataagaagagagttcttggcagggaaactaaagaaccaatgagatacagtactgggatctaaggcacttgctggaggacaggattccgggtcactgagtcaaggggagcttgcctgctgcatgtattttatctactgctttgttaaatgatgtactaacgaggctgtctcatggataatgattttatatcaaaaacatctgttctttctttttcatgcagattgagcctttttttgtgagtgtggcactttatgacctcagagacagcaggaagatttctgctgattttcatgtggatctaaaccatgctgctgtcagacagatgctcttgggggcttctgtggctttggaaaatggcaacatcgacaccatcactccaagacaatcagaagaacctcacatcaagggacttccagaggaatggctaaaatttccaaagcaggtggcactttgtttacttgtgatgagatggaaaatgcttgtaccattattcttaccaatagatcatataagatgagcaatttcctgaataaaaattcccttaaagctgtccttttttaaaaaaatggaattttgtaaatgtctacaatgtggtttcttccatgcttattagctgctttctttgtacacaggctgtattttctgtaagcaatccacattctgaaattgttttggtggccaaaatcgaaaaagtcttgatgggaaacattgcaagtggtgccgaaccttatattaagaacccagactccaacaaggtaatgtataatcttataaataacttcacttccttttttttttttaatagagtctctccctgtcacccaggctggagtgcagtggcacaatcgcagctcactgcaacctctgtctcctgggttcaagtgattctcttgcctcagcctccccagtagctgggattagaggtgcatgccaccacgcccagctaattttttgtattttatagtagagatggggtttcaccatgttgaccaggctggtctcgaactcctgacttcaagtgatcggcctgccttggactcccaaagtgctgggattacaggcatgagccaccatgcccagccaacttcatttgcttttaagacagaaagccacactttcttgctgaattatcaaatttgtatgtcttgaaatactcacttattggtgaaatgaatatccaccagaaatttttttaagcttatctttttgctttactttcttttgacccagtaatttctgacctctgagaatctaatggtagaaataaattcaaatgtggataaagctttcaccccaaggatcagagtattaataataatgaaaccttaggaatattctgagtaaaagcaagtgaatgagacatcagcaatgctgatgatgaacaaagtgagataaataattgtaaatcaaattataataccacttaagtgaaaaagaggaaagagaatgctgtgctttgaatggtggaactacaggtaatatgtttctactttcttcttttctattagattttctttaataatcaaatattactgtttaatagaaaatgaatattaaggccgggcgcagtggctcacgcctgtaatcccagcactttgggaggttgaggcaggcgatcacgaggtcaagagatggagaccatcctggctaacatggtgaaaccccgtctctactaaaaatacaaaaaattagccaggcgtggtggcgggcgcctgtagtcccagctactcgggaggctgaggcaggagaatggcgtgaacccgggaggcggagcttgcagtgagccaagatcctgccactgcactccagcctgggcgggcgacagagcgagactccgtctaaaaaaaaaagaaaagaaaagaaatattaaaagtctatattttccatgccaaagaaatatactgaggaaataacttacaagaattgaatcttagcatgtatgacaatttaggaaggagtttaacatatttatgagagtcccataattcagtgtttggcaaactatggtgtgcaggccaaatccagcctaccttctgttttgataaataaagttttattgaaacacagtcacattcatttatggattgtctatggccatttccctgctacagaaacagagttgaaaacttgtgacagagactatatggcccatgaaacccattgtgtttactatatgactctttacagaaccagtctcctgccctctgccataacaaataaaaggggatatagaatggactgtaaatgtaaatgtactaatactttccattcaagattttaaaatcttttaagtcaaaaaaaggaaaaaagttgatattccaagacatggattattttctacatttgaaatttccaaactaagaagaaagaaagaaaaacattatacaatagtttgaacacataggacaccatttggctctttataaggtaataggggctagtaagacacagttacgctgagtttcagtataaaataatatgaaaaagtatttagtattattttatatgtacagtttataaagtgctattctaaacaatatttgtatttattttttctttagtatgcacaaaagatactaaaatccaacagacaattctgcagcaaattgggaaaataccgtatgccttttgcttgggcagtaaggtatgttgacagttgcagccaacagactagaaatacatttaatggtggcattggaagcttcagttttgaacgtttttgtgttgcctattatttttaatgtgtctacacctagaaaatcctaatatggtcatcttcataaacatcttgagcttctctgagacatacatttcacaagacagtttagcaatacagtttataatagagggccgtgacacatgtaccctgcatgcatgaccagatatgctatgggttcttggtagatatcaaatcaatgtcataaattgtttattatgtatatttgacttaacaaacctttgacattatgtcagtcctgagagtctggtgtgcctaaaattcagatagatgcactgtaatttcttatgcagctgtttgttttcatttatgcgtagagctcaggtctatatatggacgtccaaatgaaaccatcaaaccaatcatttaaactcattttgattttgatactgtttagcccagccaaatttatcagtaccagttgcctctgaaagaaagtctgagttctgtggacatagatggacacatcattcacttggatgcatgacctcttcatgaagaaccataattgcttttcagaactgtttaatcatcaattatgattgtcctcatcaatctctttacatctttattagtgtaagaatttcttaagtgaggaagagcctggcatagactcataaggctaaaaggtcatcaatgtacacactgaatgaactaagaaaggttagagctaccagccgggcatggtagctcacgcctgtaatcccagcactttgggaggccaagacaggcggatcccgaggtcaggagttcgagaccagcttggccaacatggtgaagctctgtctctactaaaaatacaaaaattagccaggtgtggtggcaaataagacagcccatcaagtattcatttgaactttgctgacattatctcaatgtatccaactttagcatccagaaggaagagagaacctgttaattatgccatttttaagtctcacagttcccagtgatgtatattcagagtaaactcaccaatatttgtcataattttgaggttgttatttaaagttggagatgagtaggtgtaggaaggagaaatgtggaagtttgggcagcagtaaatcaagatagattcatgcagtctccaggaattcgtttgccctaaggcagcgtcatagcaagggagggagagtccaggcctgggagtctaataaacgttgcagatcaggccactacttactgtgacttggaacaagtttcttctccatgtctctgggtccccagctataaattgaagctgacaatacctgtgttatgagcagtatgtgcaatctcaagtgcacaagcatttggcgtaaaatagatcatgaatagtactttatcctcccttttctatctctttctataggaacaactaatgccaggacattctgcatgaaaaagatggtatttagatttgcagaaccctttataatgaatttgtttttatttctcataagctttaagacaaaggttaactaattataattcactgattaaacatttttggtattgttaagcattctcagttccctccagaaaacctactggggcaagtagaggcaagatgtctgttgtgaaatattccagtataacaaaattacaatagtgcacacatttttcactttaaggatccaacattgctctgaggttttagaaacaggcattttagaaccagacagagctgagctcaaaatatcctaactctggccaggcatggtggggcatgcctataatcccaatactttaggaggccaaggtctcctggaggttcacttaaggtcaggaattctagaccagcctgggcaacatagtgagacccaatctctaaaaacaacttttaaaaaattaaccaagggtggtagcatacacctgtagtcctagctactcaggaggctgagatgggagtatcagaatcatcagagatgagcccagaagctggaagttgcaatgaactatgatagcaccactgcactccagcctgggcaacagagtgagaccctgtctctaaaaaaaagaaaaaaaaaacgctctatcctttattagccaagtgagcttgggcaagttacttataacctgactttatctatttttttaatctacaaaagaggaaaataagaatatctaatttactgttataaggattaaggagcacagatatgtacccaataaaagattgttatttttagaaattattttttctaatattattattactaaaagtcacttgcagagatcatatctatctcaccaagtccccttttctgataaatttggggcagtgaagaacaatataaaggagagaagtcaaagaattacccattattgaaagaacctgagaagttaggagaagtgacaatcctgctttgaagttgtctagttaaatatgctggaagaaagacagatgaagtctctagggaggctgacagtattactgactattgaaattattccttggataggaaagctaatgaaaccacaagcttagaccatattaatgcccaattagtggtctggttgtaggttaggaaacaccaccaacctgtgtatatacatatgtgatttacttccacataaatttctcacaactgagaaaaatagttagcagcacaattctaaagataccatgtcagaccacttggattacctaaccacaaaaaagtataaaagatccagccaaagattttaatttctctttcacaatgtggaaactgcttcaaataaatgtgcacagcatcagaggaaggccggttgttgcccatgtctttaccagcttcctgacatacttcaatacctaattgataccctgattctgaggctactgctccttcctgttacgctttctagattgcagtttgtttcgcagtgtagatttcagtgtgccctaagacatgttggcccttacaatcaactgtcattagaagagtagaactgacaatttagattatgaccatatttttacccacatttaatcatcccacccactgcagtatgcacagatgctcatcactgtgaacaacatttttttctgaaattaatttggtattcttatatttggcaccagctgcagtaccattttacagtgaaaaggttatccttgggggaggaatagagaacacatacagatgactacacagggtattttatactcattgactcgggagaaaattgacccttccaaatgtgtcaggttgtgaatggatctctttccatgcatatcagccccagaatcctaggtgccagcatccttgccaggactcttttgtgatttccttgactacctcatttgatattctaagtggaccagcactcaacactgaatttttttaattaagcaaaattaaaataaacatttcattctcgtatctctacaattatggaaggtgcacagtgcagctgtcatttaagattcccatactgacaacgtctttaacaaatggtcatccaacttctgtttgactctttccagggacaaaaacccaagtacatcccacagtgcttccttctgtctgtctctttagaggtctaattattaaataatctatttttcaaaataatcttcagctatctgaaaaccacttttatgtgttttcttccatagccacacacacacaaaaaatatgtctgcttcattctgcacatcatggttattcatgctgtttgtgaatgaatctatcggggacacctaaggttcttttcctttgggcaagaaaacgaaaagcttacacaaagggttttcgaatggctgggccatatttcatgattcctacaatcataccccaaagatcatggtgctgagatcctcacaatatactgatcattgctcaactgtagcagttggaactaggcacagcgttccagccatcacaaaaccatctatgtaaatgaatcagttcttttttctcctgccagatatatatatatacacatttttttgagacggagtctcgctctgtcaccaggctgaagtgcagtggcacaatctcggctcactgcaaccttcgccccccaggttcaagcgattctcctgcctcagcctaactagttgggattacaggtgcatgccaccatgcccggctaatttttgtatttttagtagagacggggtttcaccatgttaaccaggctggtctgagtctcctgacctcgtgatccccccacctcagccttccaaagtgccgggattacaggcgtgagccaccgcgcccagccaccagttatatatttattgagcaaccacatgttgtatggcactgtgagcaaaacttctcccatggtgctgtactcttcattctctttatgaaaagtgtccaatgtaagtgagcaatttccatgacagagttgtggataagggcaaatcgagttccacaattcacatctatcaataaatggaagtcactaattaaaaagctattgttcaagctcagtttaacttcctttcatattgggaattgtatcatgttagtttcaacatgtgatgcactgaaacaaacgccctttataatatttaaataaaaataatattcatgtttaatatttttattctgtctccccaacgttatttgcctttttaccttccctcattcactacttaacagagaaaaaatgaggaggcaagttgaaggagtctaaaaatatcattctgataaaatcttggcctattttcttttggtgttctatttaacactaaagctatttaatctgatatccatttaaatggccatttcagcctgtgcaatgaattcttcagttaacttaaagagtgataaaacattacattaaaagaagtaagaattcaatatttctctaacactgaagtaaaaaaaaaaaattctatttttttttgaccacacattgtgtaatgagatatgaggaatttcatgtaaaactgacatctaagcatggtacctatgtgaagcaagtattgcctgacattactatattatttggacaaaagctatttatgtgtttcaactaagcctaacttttcttggttccaatgaaacagaccaaggaaggaaataagtggctcagattcatagtgttctctttctttaaaacaacagtctgactcaggtgccttccgtattatctttgtctctgtcctaaaagttaggacatgggcacatttagctccatgaaaatgtgtcaagagtatggccttccacactcacatatacaaccttctccctgttccaccactcgtaaatcctagtagtgccacccaaattgaagtgactctgtcctgcccaggtttaaggtgtcttggaaacataatttaaaagagtaacttgtgttcctattcttctccacttccctgatactccaaggttttgatacaagttattaaatgtgagacatcataaaaaatatagttgtaatatggaatgttatcacttcggatacagagttaaaaataataaattaaagataacaaaaataaactgtataaatgaagcatttgtaaaagtttttggtctttttattttataagttcttagagtttctctgattataaatgagaagtttaattaatatagtcacgttaaaaacacaactttataaacaatatccaactaccaacctgaataaatattttcttttagatcagtatttaaggacaaccagggaaatgtggacagagactcaagattttcaccattgtttagacaagaaagtagcaagatttcaactgaggacctagttaaactagtatcagattatagaaggtatgttttttttatactctcgaaattaacataaatcagccatgttgattttttatcacttcataaatacctgaggatctcattctcgaacacccaaacctccagaaagcagatatttttcaggtgacttcacatatgcccaaatagcaccacaaaagtaaaaattgctagaattatatggaaggactgtgaaatgttaaactatgtcagttatttactgctgtgtaacaaaccacctcaaaacttaatggtttaaaataacaacactgctatagtaattgtactcctgagtccacaatttgagcacatctgagtgagaagagcttatctcttccacacatggcatgggctgagagagatcagctggggtcagaggatccacttcagagactcccctttaaagtaatcaaacatcctggccaaaatccataccataggcttcctaaggcccggcctttcctctttactttttgccagtatgctgaagcatgaaaggctgtaatgctgagcagaggagaataggcagaaggttctggggtgatctgttataaacataaaaaaaaaactcttacaaaacccatgttatcagtgaatagcaaggaaaattattactgtctaatttaagggggcaccctagaatacacaatgcaacgctgacattaaattattcatgtcagcctcacactttatggcctttattctcagtgatgtgctgacaaatgtttcacaagcaactctttaaggaaacaacggacttctactgatggccagtgtctatggtgtaaactctcctaccattgctgattccaacctatcaatgaggcttcactgaacatagggttaggaagagatgtgcaccctaatagagcatttccaccatacacttagagatgtacagataatcttaccatgtagtaaaataatcagaaagtggtgaattttgaatacttattacctttgtgtttaatataatttctttaatggtaagtttatgtaacttaatttttattaacggctgtgtttagctgtcaagcaaaattcctaaaaattgaacattcagctctcacaagctgagaagagctgactctgacccatcactgtaattatcccacctttcaaagtagatttcctgagaaggataacacttgcgactgttaccagcagcttccactttactctaaaggaagattggcgagaggttttaatagagagagagtgggagggaaatgcaaggacttgagccggggagtgcatgtgagtgggagacaggtggggaaggggtgtccgcatacactataggagtgggagagagcagaagaaacagggctcagggaagggtccctgtcctccttgtttgttggtgaagaggaagaatatggaccatccacttagcgattgtagcaaagaccaagcttgctctcaaaacttcttaaaattcattatgagagtgtgttacttaagccagtttaaatactattagcttttgttaataaaaactctataatttactcttgtacttttttgatttttgtgttatctgaagtagaaggaaataaatttaaaatttttcagaaaatctgtcacttgacccctccctgatttgtatttttatttgcaatatcacatgtattttagtttgcaaaattaaactagctaaataaaatcattcacaagattatttgggagtctgctgtttacccttaacaaagctcagaattatagatgactgctttttccttgaaaattggaataatactctgtgtgtgtgtgtgtgtgtgtgtgtgtgtgtgtgtgtgtgtgtgtccttgctcatgcactcttacagggccgacagaataagcaaaatgcagaccattcctggaagcctggatattgctgttgacaacgttcccttggagcatccaagtatgatgatgatgtcatggtttggttgcagagttttgaatattgaatatttagtgggtttgttttggttggttggttggttggttggttggttggttggttggttggctagttggttggttacaaggttttgggttttttttttcccaaaagttgaaatatatggaattcatgatgctacagaaatgtggagcttctttttgcttcactaagacagatgatgagttttgtagggcaagaactatattcagggtaacctaacacttacttacctggtatgcaccatgcacctaacaaggtattaaattatgtcatttaatcctcaaaaccccggagggtttcagaggaggaaagtcagatttggatagattaacaaaccaataatccataatgggacaatatattctcccattgagggagttcctctcactcaaaatagaggctagttctgccatattgtgctgccagagggttactctgaacactgcgtagccactcaagtggccatgcaatgattataactgaaatgttgtcagactctgttattatacagagaacatatatttttttcagaatatggtcaaaagtattgtcattaaaatctcaattttagaaggagttttttaaactttatttataaaagagtttcagaatttaatttttaagtggtaaaattggtttgtttggttatttctgattctaccctttagtgactttttcagcaatgtgaaaaaaaaaaaagaataaaggcctcctataatgaactctaaacagggaaaggactattgccatgggatatttggattgccactgcagtattaagttttccatccttgtaactttctacaagtcattttaatatgaaatgtaatgagcattctaacttaagccatggttcaaaatcatttttatattgattggtgtgaaaaagcagaggataaaccaagtcatttcctctacctgatatggaaatgaaacacgacaaatgaggcactcaatattctctttggaagaatggtagaatcttagagaaatttgaacatataataaaaatatcataattggtttttgaaaaaagaaaacagtaatctgattctcaagcattcgtagctaatcattttgctttttagaacacagtcagattccaggtggggtaaagggaggtagaaggccttggtctttcagtaccacaacttcaggcttcaaactgtttggtgacagaagttttgatttataaattcctaatcactatttcttaagctgttcctccaagggtaggttttaaaaggtggtagaaactgaagagaaaaataaataaaccgtatctactgatgaagagaggggcttcaggcccatgctgtgaaatccattctgtagagagatatttagagagatattgctattaatctatctggtactatcagtaatagatctattggacaaagcttttttcagtcatgtatcagaatatgcattatttttatagtgttatagcaaagattggtggattatttcttataatatctggctactatgttcagaggttcattagttaaaatttatttttatggaaagcttaatacaaaaagaaaatagttataaatccgtctaaaagatttactgtttttttctgagacatcagttttaatattaaatacgtagcttgttaatctgccatgcccacctcctacaaatttttcatgctagcgtaagctaatatcaattggtgtacaagccaggagtttctatcttgagtgggttcattttaaaacatgttaactattgttcactttaaaagaaccatattaaatgacaaactcttattttctgattttttaagattgtgtaacatcgtcctttatccctgtcaagcctttcaacatgatggctcaaacagaacccacagtggaggtggaagaatttgtttacgattcaacaaagtattgtcggccttacagagtatataaaaatcaaatttatatttaccccaaacacctcaagtatgatagccagaaatgcttcaacaaggtatgatataagttccagagatatcatcttttcttttcaccgtatttagaccatataagatagttcctgaatgtgcaaatacaaattactatggggcaacactctgtcatagaaaaccgtttggagaagatgtttagtaagaggcactgatgagttttatcttagaagtgtttaaggatgcagtttcgtagcatattaataatcttttctaaatcagtcttaaataattttgttcgactattttttttagtttcttaagatattctaaaaatagcatgcctgccccctttcaatatgagctttttacttcccttttaagtacactctccagatccttctgttatttcaaaagattatggataatgtcacaagaaaatgttgggtattttacattttttggattaattagaagctacttattttaggcacttgggttttttatgttatttgataggaaattacaatttccattttttctctccgtaatttcaggcacggaatataactgtgtgcattgaattcaaaaattcagatgaagaaagtgccaagcccctgaaggtgagccaagtcagcaaagggacccagcataaagtgggaaggcaggtgcagggattctttccaccattgcagggctttttatgtgagtgtggttgaaagagcagtaatttaatacatttgttttagatctgaaacatacctgatttaacagtcctcattaactagatctattagaaattcctctctcatagctcttttagcttttcacgacttgggaaaaaaggaaaccattctcatgtgaaataaatgccaagactcccctgtggaaaatgttgcctttttcaaagattagcctgcctctcgattcggcgtgcttgatttaaaacagaacaccccagccggccctcgtatggtctacgcagaactgccgcatactggcccaatagctaatgtgggggacccgtgggatgctcacattatggaaggtgcacgtggccaagtgcctgaggaactggaaaaatggctctgggaagtcagtcccggttgctgatcacatgatttagtaagatccataaaactatgaggtttgtaggaactgtggtgtttcactctacaaagctgcaacgggatggcattttttagagttcatatttgatatatagtatgtggtttttattttagggatttcaaacaacataaagtaacccataaaaaatgagggggaaattatttgtagtgggcctgctgccaatcttaccagcttcggcaaatcaaaggaatgaggtagtagaggacaaaactaatttctaactaacccccaccattctctgtggtagtctcttaaagcactctgcctggtacaaattgagtcctctaatttgtagcattattcagaagaacaataatcaatttgagtgattgaattaatcaagcaattaattcaggtaaatataaaaaagagtctttttttttttttttaaaaaaaaaaagaaggtcttgagccactgtcagcatccactggcacccaactccaaaatagtgttagcatcaggagagaaaaattcaagtgaaatataattgtcaggcaaacagaggcaatgatcagatggcaagcacgtttggcctgtagagcagtgtttttgtgaggaaaattctagaaaagaataacaatcacatgtgcgtcccttgcttcactgcattctaaaataccacacagagatacagcaaagctaactgtcagactccagaagaggggtcctgagctttggacaaagggggcttataagttataaggaagtgccatatcacagccctggcctgatttggggctggacagaatagtagcatgctgtggtggagatggtaaccagccctatcctggaagctggcgtatcaggagctggggtccatccaagccttgtggttgcacaagaccttaactctagaccagagctggttccatggggcctgtatcactccattctcacactgctataaagatactacccgagactgggtaatttataaagaaaagagatttaatagactcacagtttctgcatggctgaggaggcctcagcaaacttacagtcatggtggaagggaaagaggcatgtcttacatggtggcaggtgagagagagagagcatgtgtgagtgcaggaaaaactgccatttataaaactatcagattgcttgagaattcattcactgtcatgagaacagcatgggggaagcggccccaggatccagtcacttcctctccttggcatgtcgggattataattcaagatgagattcgggtggggagaaaagcctgaccatatcaaggcctgttcaggaagccattctaaaggaatcagtcttaaacaagttagcccttattccatgtaaatcaagagtcagattggtccaggtgatacccataggctaggggaggtccgcaaacactgaccgttgtcccaggtcattgtctgagtcattgttattttcctggggttggtaactgaagagttatggccttttattttcactcagggataatttcagaccctcataattgttcaattcataacttcttcaacagtgtatttgggatcccagccccagccggtgaataggctcttgacactgtcatgagaaggatttcaaggatgactcagaaaatagtgaaagtacagagatttactgcaaagcaaaaagaacacactcaggaaagaagagtgtgggtgtactcaagagagatagtcatctgcaaaaaggtttagggcttctacctttatgggtttctttatattcatgaagatttctaaagaaactttagaactgcccaggtactggggggagtgtgatttagtatgtcaatgagcatataatgaggtcctaggagaaacctaggtcaaatccagcaccatgctgggtacagttggtcttaaccagcttggcccgcatctcattttttagggtcttattggccactgacttttgcagctatttcaacagtatcctttttgctaggcatgtgaaacctctgcctggaattttctgttctcctgtggccaccctgtattattcctgtcccacaggtatttggccctggcgtattaactatatgatgaatgaaagccatcaaattatcttcagcagctttcattgtataataaatgcagggtagtaggccaaagaagttcaaggttaattagatgccagcttagcctggcaagttatcacaaagtttgccattgtcccagggttggtactgaagagttatggacttttttttcacccagggataatttcagacactcataattgttcaactcataacttttcaaacagtgtatttatggaaaacctggagggcccctcttcacctcagccgcctacacagcagttctgcaccactctcagaatccggatttctcagatgaggtaagagctagccctccactgcccccagcggttcctaagaaaggtgggtaaatgttcagataaccgtgcagtgaaaaacactctctctagacctcatcagactaaggacatgccttggcaggtatgtacttaccaatatttctaaactatattaattggcagttgttccaggagtacgttgcaaattcatgtatttcaggacaggagtgaccttttaaaaaaaatggaatgctggccgggtatagtggctcacgcctgtaatcccagcactttgggaggccaaggcaggcggatcacaaggtcaggagatcaagaccatcctggccaacatggtgaaaccccgtctctactaaaaatacaaaaattagctgggcgtggtggcacgtgcctgtaatcccagctactcgggaggctgaggcaggagactcgcttgaaccagggagtcggagattgtggtaagctgagatcatgccactcactgcactccatcctggcaacagagcaagactccatctcaactaaaaaaattaaaatttaaatttaaaaaaaagatgcttttagtgctgggatatatcttgtcttcttttctttttcagtgaataattttttttcttttatttcactgactagtgaagagattgtgttaaatagctttaccaatgaatggcagcatttcatgtcataaggaagagaacagagaactagagcctgagccaattccatggcttataacatgcctgaacttaagggagcttggatcccgtcatctctaaacatgacagggaacaagccttgccctggcagacttccaagactcctgctgtgtgccaagcctcaagctaaattccatgcacacatcatctcccttaatccccacagtaattccaagaagttggcactattattacctccctatttgatggatgagaaaactgtggctcagagaagtcaagtaactttaccaagggcacataataagtgagagaaatcaaaccagaccatgtgactccacagcctgaagcttcaccattctgctctaacacatagaaagtcattgggctcatggtcaattactatatacatgttagcttacgttacaaacaactttagacaaagaagtttcagtgaaaaaatttaatttctaaccataaagtgaaggtctgactagtgcagcctgctgatgggatgcctgagattcacaatatcacagcttttgtagacgttttctatggctgctttcacacattatcaccatttagcagcttaaaacagtatgcaattgttatcttgctgttttggtggtacgaagtctgaaatgactcacagggctaaaatcgagcttgcagcagggtgacgaaccttcaggaggttctagggaaggttccagttcatctccttttccagcttccagaggctgcccacatttcttggcttttgagccttcccaacaatcccatcactctgacctcggcttctgtatcatttctcttatgactctgccttcctcttataaggacttttgtgatgacactgtgctcatttggaaaatccaggataatctccccatttcatggtccttaacttaatcacatctgctaagtcctacttaccaggtaaggtggcatattggcaggattagaacattcaggacatctagtgggtgctgtctttctgtctcccacactgtgcacattaatcatttaaaaaccaattaaaggaacatcagtgaaactacctgcctgacattctttcactcttccatatgcgtttagtgctctttaatttttcccccacaaattcaggacagaaagtgaaaaacagttaagcaaaaaccatgaccacattacacaatatttactgctattggttggccaaagggtcaactggttgacaaagcccatctggaagatgcattttctgtagatatatgatttttaaaaaaattaatattcttactgttgttaactgttttaatctttctcattctcatgtgtttcctggaagcctcatgaaagccatgagctttttcacatgagaatatggacagttctgggaactactcagttgctgagattgagctgcctgcagcttaccggagttccaatgcaaagtgatcatcccaagatgtgggttcttgtcctgaaagatcctcttttactgaccacaccacctgcacagtaactcagagccccctaacatgtgcagccctgcttcctaacactgtgccatgctacttcacaaggctactggggaaaatgaaatgatggtgtacgtggcagggctttgaaaactcaaaagcacaataaaatgtaaacagttagttgaaaacaattctttccagaaatagggagtatgcccttcattcagtatattgtttacctagatccatttttattttatttgcattcagaagcattatttgtatagctacggcatggtcagttcccaaaatgtctcattagttctcacagtaacacagatatgtttgttagttttaaaaaaagagatcaattccatgccgaagctgcatcatttactataccatattactcaacaatgtgcatatgaattgtctggggatcctgtgaaagggcagattgcaattgagtgtgtctaggttaatgtctgagactccagcctaggcaacaaagtaagacatctgtctctacaacaagaacaacaacaaaaatcaaaaagttagccagaggtcatggccagccacagtggctcatgcctgtaatcccagcacttcgggaggccgagacgggtggatcacaaggtcaagagattgagaccatcctggccaacatggtgaaaccctatctctacaaaaaatacaaaaattatctaggtgtggtggcgtgctcctgtagtcccagctactcgggaggctgaggcaggagaatcacttgaacccaggaagcggaggttgcagtgagctatcgtgccactgcactgtagcctggtgacagagcaagactccatctcaaaaaaaaaaaaaaaaaagccagaggtcaaggctgcagtgagctgtgttcgtaccactgcactctagtctgggcaacaaatgcaagaccctgtctccaaaatgaaaaaaaaacttctgcatttctaatgaactgccaagtgatgcttatgcaactggtccccagccgcactttgggaggcacggacttactgtttattcaattcgtgtcccttaatgacagttccttgatgtgtgtcttatctatattctgcagttacatttgtgtgtgtgtttatgcatatgtatgtgcatgtatttagtccataccctagtagcatgaattatctaatgagaaacactaagtattctaaattatcatcatccatcacaataaaaaagtaaaaatatcaacatgtgaatacatcactgctagcagaaacaatatttattgagcattaaatgagtgcatccagcactattaaacatggacctagatttcagttaaagaatttttaggcctggtttggtggctcatgcctgtaatcccagcactttgggaggccaaggcgggcggatcacttgaggtcaggagtttgagaccagcctggccaacatggtgaaaccccgtctctactaaaaatacaaaaattagcttggcatgatagtgtgtgcctgtaatcccagctactggggagactaaggcaggagaattgcttgaacccaggaggcagaggttgcagtgagcctagatcgtgccattgcactccagcgtaggtgacagagtaagacgcagtctcaaaaaaaaaaaagattgtttaaaaagctatgctttgtcttgctctgatattgagcaaatgattttaatctcagtccaactatggtttctttcgttgcaggtgaaaattgagctaccaacacaactccatgagaaacaccatattttgttttctttttatcacgtcacctgtgacatcaatgcaaaagctaatgccaaaaagaaggaggctctggaaacgtcaggtactgccaggaagaaatctgaggcagagtcacatgtcttctgtttgaattggtttggagagtgttttcaaagccctgatttattgaattatttttcatgaaatttagtgttcgtaaataataaatagcattattgtgacttcttaccatggaggtttgtactcagaatttttgttggttattcttttgcacagttggatatgcttggcttcctctgatgaaacacgatcagatagcttctcaagagtacaacatcccaatagcaacaagtctgcctcctaattatttaagctttcaagattctgcaagtggaaaggtattgaataatgtgtaatttaagattttaaaaaagcacaccagcttaatggcataagattatcttctttctctgctacttaagatcatagtggacatgtcccttgtagctatgaatcaagtgtacctatgccacatctcttgtttagcttatggccactggaaatgatatgttaaaaatgatcccgatgtcatattggtctcatctaccaatagtgctaaatgtatttgcatcttttattttccacctgtagctgatataagattaatggatcagaacagcacattaacataaactaaacaatctatttattttctttctctcgaattgtcccagtgacagtaaacaaactttattttgcagcatggtgggagtgacattaaatgggttgatggtggcaaaccacttttcaaagtgtcgacatttgttgtatcaacagtaaatactcaggtgagtatgttgacctgaaatactagcatcttctctaactcacagcatcatgaggtaattcccctatttacaggatgagactaatcatttcatgaagtgtcagaaaggcaggtgtttgaatactacaaaggaagaatgttaagggcataatttgatgcctccctcaagacagatagaatgtcctaatcccttaagcccagacaccataaaacttcagaccaaaataccagaagtgtgtttaataggatcacactccccttggagtatggtttgcttccactgaccacactcatgtgttaaaaatgttaaatgttaaaaataaaggccaggcccggtggctcactcctgtaatcccagcactttgggaggccgaggcgggcagattacctgaggtcgggggttcaagaccagcctgaccaacatggagaaaccccatctctactaaaaatacaaaattagtcaggcatggtgacgcatgcctgtaatcccagccacttgggaggctgaggcaggagaatctcttgaactcgggaggcagaggttgcgttgagctgagatcgtgccattgcactccagcctgggcaacaaaagcgaaactgcatctcaaaaataataataaaaaaataaagacagacttcagatctttacctgaaaaccaagtccaatccccaatgccttcccagggctcacctaattggaaggccatgaggttggcagaactgcatttgagagccaccccacctaatttctggctccattaccctgggcaagtcactttacctctgatatccttatttcctcatcaagaaatgatatcaacagagtctctgctacctaaggttgtagcaaatgtgatccaaaggagaaatatttcaaaatgtgatcaaaatgagaaatatttcatgaagtgcgaaagtctatacacgtataattattaccattgttaaattaccacaaactcattccttccgtggcaaggcagcttattttaccacaatgtgagttttctggcaacagatataaactatacattattataagtacataaaatatgtatttctcctttcttaagtttaatgtgtatctgcttttcattttttgcttcatgctgctttatctgtaagccatacttgatccataagaaaaatgaaataatccaggcatcgtatatacattggaccaaaatttctctcggcaacctctgaggcttcaagtccaattgacttcttatccctagccctgcacccacaatgatttaaacccatcttttctctgatgccatcagccctggtcaagttccacaaaacactcaatctccaccaaaccctatatttttgtatatctcagcagctcctcagtttctctttctcatgcttccagctgctttctccaaatagctgaggtctctgactcaccacaacacaccctctctctacctcgactctcactacccatgcactggcagcatttacctcagttttcaaacacccaaggccctccagccaaacaatatccacctagttcccgcaagacccagtgatccctttgacactcagcccctcctcagtggagaagggaagctctcccactctccctccctggctattatgaaccatatcacaggggtggacactccccgcaatatggggagtaattgcactcccctttccccgccacccccacccgcaccgtggctattacaaaccatattgcagggggtggataccccccttccccttgttggtctggttggttcctacccatccttcagatcttagctcagttgtcacttcctctaagaagccttccctgttccctgacccaacagacaaagctgggccatcttgtcactcatccagatggcacctgctttgtgtttgaagtgctcatcaaatgtgattacataggtgtgtgtggaagtagtggtgtcgtgctggcctccccgccttaatggaaggtacacagaggaaggggttgggccttccttgccctctgctctgtcctccctcagtgcctgctaagaccctggtatgcagtcagctttccataaataatgagcaaatagacgaatcaatgaattgatacttaaagggaaaacagttgtctctagtcaaaaaagagctacacttagaaaagagaaaatagggcacacacacacacgcgcacacacacagtggcctgagggaaatgaggaaaacccaagctacaaatgcctttctggaatcatagaaagccagggaaacattcagagtgtgtcctcacacaagttctttatctcactgcctgactgtgtagctcccaccctcagggcagaacttagagaattttccaggtaccaccttctggaagtaaatttcaagtgttatagtcagttctatcctaagataatgagttgtggactttctaatctggggctaattcaggcattctaagcctaaaaatatgccctgtagatattaaagagtacgcattgtcatgtgtgtcaaggatggtatagaagaaattggtagaagtctatggaagaagcaggagtgggaagataaatgaagaaaatttttctaaacacaaaaagcacaaccaagggaagtaattctccagccattgtcatgtggttgaatagaacaacaaaacctcttagaatgaaatagaagagagagtgggctttgtagttcatgcagagccttcactaggccagaaatgtccacatcaaagctttgttcctctgactccttaataaagcatttgcacttcgaggcatcaatcctacagaaatgcttacctcacatcacagtggtttgtgtttgtaacacggtttacgtgtcatcagaaataaatactttttttttgctgttgtaggatccacatgtgaatgcatttttccaagagtgccaaaaaagagagaaagatatgtctcagtcacctacctcaaatttcatccgctcttgtaaggtaacatgacatgcaagcagtttcagtgatctccagggtaaaaatgtgcaaaagagacttttacattttccaccgatgggcaaactgggagatgattattactcaagattttttaataccttatcaattcagagagtaaatgattttatttcataatttctgaatagtttctgtttcttgacttaaaagacaagcaaaaatcagttttttccaaaataaaaataattgaaaatcagaatcaatttattctaaattaattattaaatcacgagtccttgcaacattaccatcatgcctatattccatactaattgcaataaagaataaagccagataaaggtgggctacagtgttcatactcaagttctgaaaaaaataccagcagaatatactttatttttttctaacgtattcattttttaattaacaaagaaaaattatatacctttattgtatacagtatgatgtttggaaatatgtatacattatgtaacagcttcattgagttaattactgtatttattatatcacatacttataatttttaaggttataacacttaatatccactctcttagagatttttaagaatataacacatttttattaactatagtgaccatgttgtgcaatattcctcctatctatctagctgaaattttgtatcctttgatcaacatctcccagcactcccctccctagcccctggtaaccaccattccactctctacttctatgaattcaacttttttagatcccacatataaatgagatcatgcggtatttgtctttctgtgcctggctcatttcacttagcataatatactccgggttcctccatgttgttgcaaatgacctaatttccttcctttttaaggctgtatagtattccattatgtttatgtaccacattttctttacccatttcatcggttgatggacacttggattgattctgtatcttggctgcagtgaatagtgctgcagtaaagatgggaatagacatcttcagcatactgatctcatttcctttggatatacatccagtagtgggattgctagattatatggtagtgctatttttaattttttgaggaaccttcatattgttttccatagtggctcttctgatttacattcttaccagcaatgtgcaagtgttccttctcctccacaccctctccaataattattatctttcaccttttttgacaacagccattttaacagatatgaggtgatgtcccactgtggttttaatttgcatttctccaatgattaatgacgttgaacattttttatatatctgttggccatttgtacaccctcttttgagaaatgtctatttgggtcccttgcccattttttcattgggttatttgttttcttactattgagttgtttgagttccttatatattttggatattaaccctttctaagatgtatggtttgcaaatattttcctccattcaatggagtaaagttgtctctttactccattgagtgtttccttggctgtgctgaaaccttttagtttgatatgccatttgtctgttttcactttgctgcctgagctttgagggtcatatccaaaaaatcattgcccagtctaatgtcacgaagtttttctccttatgttttcttctcatagatttatagtttcaggtcttgaatgtaggacatgcttcaaatttaattggtatcctttttttctgccaatttactacagaacttattgaatgtggaaaagattcatgcaatcatgagttttctgcctataattttgaatcagctcttcaaagttctggtacagaatgaggaagatgaaataactacaactgtcaccaggtatccataacacaaccttaagaggagagactttataatgtgtagttacataaactcttaattataactaaacagtcatctactgttgtgtgtttacatttcatttgaacacatctcaaatttaagcattttccactcttgactccttaccttctaatctcttattattagtagtaaagtgttagacctctttttctttgatttttaaattaaactttttcttttgagatcacggtagattcatgtgcaattgtaaaacataattcagagtttcccatgtgccctttacctggttttccccactggcaacatcttccatacaggtgtagaatcatacagtaggtaaatgtttgtaattggctttttcatgtaacataattctctggagattcatccagatcattgcatctatcagtagttcactccttttcattgcagagtagtattccacgatgtggatgcaccacatatgtttaattattcacctgttgaaggacatttggagtgtctctagtttagggctgttatgaataaaagtgctatgaacggctgggcccggtggctcacgcctgtcatcccagcactttgggaggccgaggccggtggatcacaaggacaggagatcgagaccatcctgcctaacatgtaacagtagagttggtgaaaccccaactctactaaaaaaaaaaaaaaaaaaattacaaaaaattagccgggcgtggtggtgggtgcctgtagtcccagctactcgggaggctgaggcaggagaatggcatgaacccaggaggcggagcttgcagtgagctgagattgcaccactgcactccagcctgggtgaaagagcaagactccgtctcaaaaaaaaagaagtgctatgaacattcatgtagaggttttgtgtaaacataagtcttcgtttctcttaagtaaatgcccaaagtgtaattgctggggggcagggtggttgcatgtttgatatttaagaaagtgcctattctccagagtggctgtataattttgcattcccacaagaaccttttttttaagtattaaatgctttaactgttctcactttaaatttggctatactgaattcttccaacatctctaatctggccaatgccttcacaaatcacaatttcttctttatagagatagtgctttgaattaattattaaattatatatttgtgctgttcatttttttaaaaaatttagtcatagcattctggaaaaaaatgttacttttggcattgaaatgtttccagtatctttctaactcacaggcatattactgacctctttctgaatgagggtttgtagcctagtttttaaagcagagcctgaaattctggacaatttaaatatctctaatggcttcacaaccatccagttctggacctgcatcaaaagtccccagctgtgccttcaactcatgctcttttcagcatgtgaatgtgtctctgtgttggcaagactcctagatattgcagctgatagatctgttgaaattctgagatattcctaagcactatagccatggagcagctggtagtgttaatgtgaaaaaagatccacctgtacatcattgctgctagaaaccccaacccagctaagggaaaaacaaagcaaaacaaaacaactgcatcttaacctaattactttttccaaaagcatatatagtgcctataggttggaaggcaagccctcttcaaatgaaatatgattattaatttgaaattaaaagtctaaaattttaattaggcactaaaaataatcccttttgcaaaaagataatgtcaaaaacgcacagaccataattagcacattcaacttggacaaaaagtctccattgtgatattacaacactacttacatctttgtgtttcaaagtttcaaagttggaaatggctaatcgatggaaatggctcattgatgctatagatattaaatgcccagtattggatatggggctgaggagggcaaggaaggagtcagagattggttcattcattcacccagtaattattaaatacccaatttacaaagcactgtaatgacaaactaaagcggggtttttctgccctctccagaaaggccactgaacagctttgcttttgcagggttctgaccgacattgtggccaagtgccatgaggagcagctggatcattctgtccagtcatatattaaggtatgaaatgcctcttggaaattgctcatatccccttgtgctgtgtgacttgtctcatttcctgtctgcagtaagtgggaagttttctccctttaactgagtggcgcccaccacagtaatatcaggaatttgccttagctacttagaattccatctctttgcattaatgggctaggtgaatttttaaatgtataaataatgtgtacctgtgcacataaataattaaatggggagagagaggaaagaaaaagatagaggagaaaactaaagtgctgtccttttgaagtcaacattacaagtacatgagattcctgtgttaatttaaggaagactttcctgttggtttgttgaatgctctgtgtttcctctgtaatgctttcttagctctttctattgtttcctcaggcattatttcattttcccagttactgtatatttgtacctgcttctggtatgttaagtcctttatcttctggcatgaaccacttgcccattccatcagtgtgcactgcttcttccagtgtcctacgtcaagtgttcactcagagacgcttctattctcatttccagttggcctgtggattaatgccagtgaacttgtgatgatgtttgcactttcatagttcccacctaaatgtcatcctcttgaatgaaaagaaagaacccatccagaaatacagaagagtatcttaaattactttataatacatagaggacctaaatctcttattttttttcctatgcatagattaaatctttttgagacatagctttttcatcaaaaaactgtattctcttaatatgtatgcacagacagatactcatatattcaagatgtctagaaacttgttaaaaaaaaaatcggccaagcgtggtggctcacgcctgtaatccaagcactttgggaggccgaggcgggcggatcacgaggtcaggagattgagaccatcctggctaacacagtgaaaccctgtctctactaaaaatacaaaaaattagccaggcgtggtggtgggcgcctgtagtcccagctacttgggaggctgaggctgcagaatggcgtgaacccgggaggcagagcttgcagtgagccaagattgtgccactgcactccagcctgggcaacagagcaagactccatctcaaaaaaaaaaaaaaaattccacactcccataaaaggaagtaaccagaaattgcattctggagtgaacccctctgagataccatctgtaaggaaatttttttcattacagtttttatatccatatgttttctatctgccagaaatgttagttgtcttcccaaatgccaaagcatgagtatgtgccctttttaaacataggctatatgccaaaaatagttatttcacaataatttctctattgtataattttacccaataagatccacatctcaactgcaaaaagccagttccacctacacaagcctttttagtttgctccctaagatagggtcatagcttagttttatagagtatcgatgaatttaccattcaacagaatcacctggagaactttcaccctctcaatgcttcattacccgaatgtttcatttcaatccttaaagggactgagaaagagaaaaaaagttactgatccatcttacacacaggcatctccatttcaacacatattattttcctcatgtcagtgggatcattgaaaattacattaagaaccctccggtgttgtgactatttttgtgattaccaaggctagctctttgtgaatacctcaaatctcagactttctaccggtgacgctcctggagagatgcattagaaatgcatcctggcgtgacctttatttttaaccagggtatctgaaatacccaacaagaccatctcactttataatacaggagattatctacttagcttgctttaagtgattcaaatccaaaaatacacctatgtggaattttaggctgataacaattttataataaattttaacatatctaaaacaaatacctcctaataaatgtaatcaactcgcattttactcgggaaagaacactaagctggcaagtaagagactagattctagtcaattctagacttaagcagtcagcctctctgaacctcagttttctcctgtgacatgagatgaaatgaccaaaggaacattcagttctatcatcctgtgattggactcttgttacagtgcgtgcttgaatgtcctccaaagatgtgatattcaatacaatttgtatttatttagaagttatctaaacaccatttcaagttcagtggtgctaaatgctgctaactcacttcgtctacaatatgcaaaatgcacacatacaccgtgtctttttcaaagatgcgtgtctaaagccagtctaattaaatgccatggttaacagtgatttgtagcactgatgggttacagtcaaaattttaaaataagaatatttcagtgccagtttaaatgcccttcaggctaaataactgtgcatggcatgagctcattgatgatgacgttactcacatctgaggtataacccatgagagggaaaaattgtattactcttgattttatctagtttcatgcatccattaacttcatctttctcctttgagatgagcttggagaagtcaaatcccaccatgacaagttaggtgccaatgtgctacaaagtttaaagaaacagttacagatccaaaagctaatgtgcctctacattaagccattccttctctttcctgccttcactctcaattacggtgaaatccgaattgtgaaaattatgaagaaatgtccttccacgaggcaaacccaattcataagtgaaatattataattcagtaataagcattttatatttgaactttatgtatgtgcataaattgatactgatattcttaagagatgaagaaatactgaaaactagccattatgtgccctcagtggtgcatgccaaaaccaattttttgaggaaaaaaaataagtatgcagcatttgttatcttactgatggccaatgttcatgaacgccttgatagtgtgtctaagcatgggatcatagaccctgggcttgtggggagctcacgtactggcatctggaaggcactggcttccccacttggctatttgagtgggtgctctaccctttcaggatgaagaattgctaccatgccacctgttaccagtggaggaaggagaaggggaatgtgtcctaagtaggtgggtcaaagccctccatgtttccttgaacgtgctaaatggctctctggctctttctcttgatttctacaaagagtttcaaggagagcttaggtgagcaaggccctacttctgcaaagccctaaataggaacaggtgtgtactgctcttatcattgggcctgcatttatctcatggcaaaatctggcatgagcagataatttagagacataagttattcacatgacatagtttttgaagcttcatttttcaaagtatttaactttattcactttttggattttcttcagttcgtgttcaagaccagggcatgcaaggagaggactgtacatgaggaactggctaaaaatgtgactggtcttttgaaatcaaatgactcaacaacagtaaagcatgtcctaaaggtaagaatttaaagatggtcctttaactgtgagtactaggcatgggtcacgcttactcctggaaaatgataggagtcatggattttcatagactttttctcttgcagtttccagcataaggttcatattgaaacttagcatataaagatactaagcaaaagagatctatatcgagacaacatagaaaaaagtagagtgggccaggtgcagtggctcacctctgtaatcccagcattttaggaggctgagatgggcagatcacctgaagtcaggagttcaagaccagcctggccaacatggtgaaaccccatctctactaaaaatacaaaaacaaaattagccaggagtggtgacagatgcctgtaatcccagctactcaggaggcagaggcaggggaatcgcttgaacccgggaggcagaggttgcagtgagccgagatcatgccattgcactccagcctgggcaacaagaccagagagagagagagagagagatacatagatagatattgtatgttagaaaagaagatgcattagaaaaattgtagaacaggtaagaattgggcattgtgagtgctgaaggtgcaggggagatttgaagttttaaatagaatggtcaggatatctgatggaggaggtaattcttgagcaaaaaaaaaaaaaatttgaaggcgaagagggtgctggccatggggatgctcagagggaaagacctgtgtgaagtcatcaggcagcagcatggctggtgtgtctgcaggagacagggaggacactgtggcaggagacagggaggacactgtggctggagccaagtgagcagaaagaaaaaaaaaagatggacgatgaagtcatggaagccactggaggcttgggagttagcataggccaggcgttcccactcagagcagaactgggagttgtgtcgttggagggttttgcacagaggagtaatgttttaaaccaagctgaccttggtttaaaaggatccctctgactgctgtgttgagaatcgactacagtgggataaaaatggagaccacaaccacttgaggggctatcagagaagcaggatcctctggggagagtcactgctcagttaaaatatggagtgaagggaatgctcggagaagaattgcatcttcaagagattgtgctaacgatggaccatgtgctctggaaggtggggtgggtgggtttcaggagattggaagcagtggaatgtgcagatatataagggaatatgtggagagggcagtagaggagttgaggcttcatctgtcatcagacgtgaacaggcaaaagctcaatttcattagtgctggtggtttcaaggaaaatagtggaggcaggccagagtgctaagggatggagaggggtaggagtctgttgaattaagagacaaatgttggaacacttgacacgatggctcaaaatattttggacaagattagggaaagaggattgcagcagtgtgcctgggattcattcatattcctaacaacatgtttcacttctaatagccattagaatgctattggagtgctagaatagtattggtagccatttccatttcttcttactaagaagtgaccacttcattaagccatagctgcctttgtagaatatcaatcccttctcttttttatctgagtcagtcttctggaattaggactgtcttgtcaaaagtttatcgcagcattgtttgtatgacttaaaacaggatataatccaaatgcccattgacagtagagcagataagtacatggtgattatatatgtcatgtggtgaccatatgtgatccccccagctacgtgcttcaacataaacgaaccacagaacagaatttgttgaatgaaaaaggcaatctcagaagaatacatagaggatagttccattcttatgaagttcagtggccagatgaactaaatatcccttcattgtataagtattcgtagcaaaattgtgaagtaaagcaaaggaatgattagcacaaaatttaaaactgttatctgtggtggaaggagtaggaagcagagaggatgcaaggggtgcgttcttgaaactatacatatacaatatgactttttgtagctgagataagtgtcacccttaggcccaagaaagaagggtgcccatcctgggatgagctttgttcttctcatactgcacctgtcctcacaggccaaggtttaagaggagctaagagaacaagcccaccaggagcccctacctccccttctagacctgtaaggaaccccaagaccctcttgctcaaggtcctataggtggatttccaggcctgcttcaatctctgtcccaagccctccaggacctccagaggacaggtcttgatgcctgagtgcaaccctagaccccattaaggagctatttgcggcagggaggagggccaggttgtggacagcactcagatgtgcaggctggacagtttccaaaagagctcaggcgtacaaggccctacctctgcaaagccctaagtaggaacaggtgtgtactgctcttatcattgggcctgcatttatttcatgacaaaatctggcatgagcagataattttgagattgagttatttaggtgacataagttttgaagctttgttttttaaagtatttaacacatgcgcaccaggcccctcaaggggcaggacggagccttgggcgagaagaaaaggggcaggccaggccctgtgccccccaggacctcacaccctggggcagcattccaaggtgttatgaagttttgtttctcgaggtaggaggatcaaacatattttatttaacacattttcagcttgacttccaacttctagatatctagacatatgaccttccattttcacccttacctctaacctttgaaatttgaggggtgagcttggtacaataaaaagtttgtttaggtcaggcttggtggctctcaactgtaatcccaggactttgggaggctgaggcgggaggatcacctaagcccaggagttcaagaccagcctgggcaccatggtaaaaccctgtctctacgaaaaaacacaaaaagttagctgggcatggtgaccacatctgtagtcgcagctgtccgggagactgaggtgggagaatcacctgagccggagagttcaagactgcagtgagctgtgattgcaccactgcactccagcctggcaacagagtgagactgtctcaaaaaataaataaataaataaataaataaataaaagtttgtttagttttgtttaactaggtgaaacaactagaacatcccttgaataaatattttgtaaaacaactgcttagtcagtcatgccaaataaacttgtaacttgttttagtttaaacattttttgagaggattgagataaaaatcatcccactataatagagaatattttactgctctaattcatttagtttcaaagaatacattttaacataacaatgttatagtattacatattgcaaagaaaaaattatcattattttgccataggataataaatgtctcgttgccttttttttcccaacagcattcctggttcttctttgcaattatcctaaaatcgatggcacagcacttgattgacacaaataaaatccaggtaagaacataagtaatataatattataatatttttacaatattatccaacaattacactaatgattatgctgtcatgagttccatttttatttgctttataaaccttagcagtttacaataattactttataagtagaagaaatgattgtgtacaccaaccggcacaggcccttcagaagcagatgccaagacaatattggaagtgcaaaagatgtattggagggaaataactataaaggataaaaggaacaggaaaaagaaatgggaaagtctgatacctgtaaatgaaaagggggaaggaaggaggattggctaggaagagtctcacagtgacaaggttttagctgggctgatgggaagtctgagagcaaagagttgtcattagaggaaccctgcactgggaaggccatcggcctccaggacctttgcaagctaagtcgttgactgggagcagcctggggggagggtagccttggcatgaatgctggagcatattgcaagatacagcaactctttatattcttcccactagattctgtcttgaaggaacatttgagcgatgtgcattcctggctgccacagtccaagtttgcatgacatattgtacaagttcatgaatctgcttccctgcagttcccatgggcctcccctcctgaaaggaagcttagaagagggaccctgatggaattaattacagccccttccatggcttttcaggagcctatgtattactcatcatctcccatcccaactctccattctagatccctctcactctaactagcagctccgaaggtcttggtgactcacctggtgatatgacccaaaccctcattctagagtggtctcagcctctggtcatcatactctactcacaccagagttggtacctatggccattcacagttacaatggagtgaggaagaccaagaagcagccaggtagatcacctgagttccacacacatttctctgagcccccattgtgggtaaggccaagggaagacctctggcattgcccctgccccacgtggagggtaaatcataacaatgctgcatgaggtggggttggtggtgtacagttatattattttgatttactcttttggtggggaagaagcagtgtcagaagctcccacctggcctcccccactaggatacctccacagaccaagcacccgtgcaagcttactccaaatgccagttttattaatacaaattatacatttgggaccagttacatgactattggggggatctttgaacccagtggatctactgttaacagaactttagtcaggactccacctttaatccctgtaagtccccactctatcagggcagacatggtgatgcttttcatttctggatatcaatgtcaactcagattctgtgtgcaacagtccttgaactatatgcccttcttctcagtgtacagtagcctgagtaaatggctatagggccctttggagaagaattgatagactcattacagtatgtatctactgcattgttgcagtgggggctttcctttagggaccccatcacctcttcagtcaatgtgtaccagatctgaattgtgactcaggtccaggaacagacaaaggaaccatgactattcattggaatgaacatccccatcttccagttgcccattcttgccttctttgttaatatgatgtaccaccattgttggttgctctctgttttgtccctaggagttccagtcatcattaaccagctctacaactccctgagagtcggtccctcttggcttccccaccagtcttgtcatttgtcatgatactcacagccccctggctcctggagattaagcacagcacatggcctctgttgttttggtgatccctgatccccatggctgctcatgagccaagactgtgactgctcctcctgccaacagatgggaaacacccctgaccttcttaatgatattggtccccagcaccttcttagtggccatggtgcatgctgtcttctgggcctgcctggggaacttgatacactggtggatcttccagtctcaattaatgtccattcctgtatatccacctccctccacctctttattttttcctctatcctctgccaggacaaccagacatttcgactttgcttaaagtaggccatctctagattctcagagcaaccctagcagtgagttgctcatcccgtgagtccttatttaatcccatgttctgaaaaagcacacccatgtcaatgcattctaagttacctgcccttactttctggcccacatcctcaatgtacaattgcagaggttctgccctacctcctggtggtacatgatagctaatttttatagcctctttgggtatattctctttcctgctttattaggcccagcaagcccccagctgggttaagctaggatttaacctccaggtattgccctgatcaccagaaggagaggcgggacaactcctcaagggtttgcctgatttctagcagggagaggcctttgcaatatcatcttgcatgggaggagtgctgacacttaatagggaggaattaaacttctgctagcactaaggcttcagggaagtgtgcagagccacttcctcagagtcatccatccagaggtcctcatccatgcttctaggccccaggtctatgtaaccatggccttgatcttagtatgacagaaatggcttgctggacctttaatcatctgtggagttccataactcttaactcgcaaatcctatttttgcttttctgctatttctgctctccacttctggagatgagagcctcctacctgggagggagagaaaatctaacacaaaggtaaaaatggttcgtatctctctgttgttaagctctactggggtcaggaaacctcactgttgcaattcctgctctgtcactaacttgttagctgacgaaaacgacgcttaacatctcagtgcctgttttctcatctgtaagaagagtggattggactaaaattctcttctagttcctaccagtatgcatctgcttgtatagacaggtcacaaaacacacctgtgagcagcctaagaataaatgaactgataatagccagcatgattgtgtccagcagtttatcttccccgattgaggtttgctttccgtgacccctttcagtggtaaccctcacaccctagttttctttcaggagccctgcaccttccactctaaccatctctaatcatcacagtgggaaaagacctgatatcatcttttttctttactttttttttttttttttgagacggagtttcgctctgtcgcccacactggagtgcagtggcacgatctcggctcactgcaagctccacctcctgggttgaagtggttctcctgcctcagcctcccaagcagcttggattacaggtgcatgccaccacacccagctaatttttgcatttttagtagagacggggtttcaccatgttggccagactggtctccaactcctgaccttaggtgatccacccacctcagcctcccaaagtgctggaattacaggcatgagccaccacgcatggcccatttttttttccccttgatacacggtctcactcctgttgcccaggctggagtgcagtggcacaatcatagctcactgcagcctcaacttccccaacttaggtgattctctcacctcagcatccctagtagctgggactacaggcatggccaccaagcccagctaatttcatatagatgattgatagatgatagatagatagatagatagatagatagatagatagatagataattatatatatttagtaaagatggggtttcgtcatgttgcccaggctggtctcgaactcttgggctcaagtgatctgcccatctcagcctcccaaagtactgggattacaggcgtgagccattgtacccagccctgatattatcatttgacaccaaagcattcacagtaaacttttcccaagctatttgtattttcttttttttttctttttaaattgtgaagtgaatggttttctccactattaaaggaatttccatcatccaaggagtaagtgtggaagatctgaggaagtcaggggagatatctggtttagtcctctaaaaggtgcaatgttgttgggcacttggccagcgtgagttccagtttcctgggaatggctgggtgtagttgctcatgcctgtaatcccagcactttgggaggctgaggtgggcagatcacctgaggtcaggagttcaagactagcctggccaaaatggcaaaaccccatctctattaaaaatacaaaagttagctggatgtggtggcacacacctgtaatcccagctactcaggaggctgaggcacgagaattgcttaaacccgggaggtggagtttgcagtgagctgagattgcaccactgcactccagcctgggccacagagactctgtctcaaacaaaacaaaacacaaacaaactaaaacaatttcctgggaaccactgaatgttttctcaacattattctctagtagcaaaaggatcattgaaccagctaaaccttttgtttcccatcatcctccttgtttctaacaaaactcccaaaagcctacagttctgcccatgcatcccaggcctgttccccttgacctcgccatgctgtagctcagattcatcatggtccagctctgcagcttgggaagtgtgccaccatctcactcccttcatctcctgagacaaaaaattcacaatctccagtgcaggaattcttccacctcgagtctttaggatatacttcgggaaaacagttttaaaagtactcatatatttattaggcagacatctttgggttcagagtgagagtaggccacaggagactttgagaggaaggtgtaaagaggaaggaacaaatggaatattaaagcccaaggcattcatgcatatgcatgtggggaaaatgtacgtatgatatgcttaaggaattttagaggactaacaaaacgaaaattgaaaattaaaagtgtgctttgattctttaaaaggtgactgttgctttttgtaggtgaattgtttacctttattacccaagttttatggaagagaatttaaaaatgctgtgtgtgatcaaatcagttaagttcattagttgttaatttatttgatttcaacaataaattttaaatatatagagagtaaccatgaaattttcaaaaatatccatgcagtgatgtcctggtaaagtggcttaaaaatagaagccagtctggccaggcggggtggctcaagcctgtaatcccagcactttgggaagctgaggctggtggatcatgaggtcaggagtttaagaccagcctggccaagatggtgaaaccccatctctactaaaaaatacaaaaattagccaggtgtggtggcaggtgcctgtaatcccagctactcaggaggctgaagcagagaattgcttgaacccaggaggcggaggttgcagtgatctgagatcgtaccactgcactccagcctggacaacagagcgaaactccatctcaaaaaaaaaaaaaaaaaaatagaagccagcctaaaccagctccaacatcccgttaaattccattaaatatctgtttcatacaactcctgtaacttcagccttcatgatttttatccttgcagcatggaagtctgggtgctcacaatttagaaatacacagttcagtgtaactctaaattccatgattctatctatagtgaaaatgtgtctgggtctaatttttaaagccagctggtaaagatgaatgaatcttatcagaagtaaggctgggcacgggggctcacacttgtaatcctagcagtttgggaggccaaggcaagcagatcacttgaggtcaggagttcaagaccaacctggccaacatgacgaaaccctgtcactactaaaaattagctgggtatggactacaggagggcgcctgtagtcctagccacttgggaggctgaggtgggacaattacttaaactgaggaggtagaggttgcagtgagctgagatcacaccattgcactccaatctgggtgacacagaaagaccctgtctccaaaaaaaaaaaaaaaaaaaaaaaagcagagtctgagatggaagaactcggctgcctcaaatgttcccctcatatgcaggagtccaaacaggagggatggatatctggacctgaaatggtcttttgagatccatagagctttattcagtggatgtaatgtcatctcacagccaagcccttctttatcttgacttgtgaggtcccactggtgtctcttaactgtggcatatactgggaccagggagttaaaactagctgggactcaccaaatgtcagaggacatttcaaaccaatatctgtattcattcagttattcatttattaatttcttagactagtttattgggggcattcctagttgtaaaaaaatcaaaataatttatttttaaatgaaatagagaactacatgtccaaaatatctagaataatgttcattaaccattaatagtagctattccctgagagggaaggagggaaagtaagatatgagaggccacagagaaggttcacattttactttgtacattgctacattgtttcaatagtttgcaattaatatttgttatgattgacttttattataaagtgaaaattttattgaccaaaattgaaggaaacactaaatattaatgatggaaatcatgaccttgaaagtaaaaggcttctattttattactgctttcaagttttcaaaaggattctttttctttaatgacctataaaataaagtaaatatttcagttgatacttcctcggcttaatatttcacatgccacattagaaagatataatccgttctttccttagcttccccggcctcagagatttcctgaatcttaccaaaatgaattggacaatcttgtcatggtcctatccgaccatgtgatttggaaatacaaggatgcacttgaagaaacaagaagggcaaaccacagcgttgccagatttctcaaggtacagttatatgagatcgcagttctattcaaggccccatgttggtggatgcaagatagtctaaactttcatcagttcacatcttcatgtatgatgaaaaatcaaaactagcactgtcagatgaaaactttcatttatacatctttattgcttgaaatactttttaattttttttttcaatttgaagtcttattgaataaagactaaggttagaaggccgggcgcgatggcttatgcttgtaatcccagcactttgggaggccaaggcgggcagatcatgaggtcaagagatagagaccatcctggccaacatggtgaaaccccgtgtctactaaaaatacaaaaattagctgggcgtggtggtgcgtgcctgtagtcctagctatttgggaggctgaggcaggagaatcacttgaacctgggaggcggaggttgcagtgagccgagatcacaccactgcactctagcctggtgacagagagagactgtctcaaaaaaaaaaaagacaggaagaaagaaaaaaaaaactaaggttagagaaaagtatccatttgagtgcagtcaaatcatagtatttctaaatatattttaagagaaaaaatgaaatttttaaaaaggaagctgcactacagtaatattattctcttggacatttctgcctttgaaagtgatgttataatggctttagctctgacagtgataccaaatagccactttgggaaacgcttcaggaatttagcatttttgtttattatctccaggctcttttttttctttatttctttttgagacaggatctcactctgtcaacccaagctggagcacactggcatgatcacaactcactgtagcctcaacctccctgggctcaggcgatcctcccacctcagcctcctgagtaggacacagacacaaacctggctaatttttgtattttttgtagagacggggttttgccacgtagcccaggctggtttcaaactcctgagctcaagagattggcctccctaagtgctgggatgacaggtgtgagccaccaaggttgacccacgctgttttttacattatggaaagatcacactgatcccatgaaagaaaaattatcaagtaaagtattgagtagctacttactaaactggatatgtatggaaattagttatatttcattgggttacaaccatttatattgagctgagaggaaagaaatgcaaagtcgaagaaaaaactaagatacataattacagtataccatttaacagataatgcaagcaattagaaagataatagttttctgtgcctccttctttagtctaactcttgactactataacctttatgaagtcatttgacttgtttcttaatggtagtcaccagaacatatgggtgagtgtgagaatgtataaataaatgctaataatatacagttaaaagcctatagaagtggaaaatgggcccaacttgtcactggtgagctttaatccagcctaatttcttttttttaatgtgttaaaaactatttcaaattatacactgtatgtgttcttatcctgaatttatttttttcttcaaggttttgtctctgatttttacttttttcttgcttccagaaagagacaagaatgataagtgttaaaggggaaaagtttaaaggggggaaaagttactgtagttttctaccacattttaagacctatgggaataaagtttattgctatgctaatagtttactaggaaacttagaaagaattatgtatagttcagtttgcaaataaaatatattgaaagaaacatctgaaatattcttccctaaactgcaaaaaatgacgaataagcaagtctctaaaaaagggaaaagacctcatagttaccctccttattactaatttgaagttttaatggcatttatttgacacataatattaaaaaaaattggaacacttattagatgaatcatttgagctaggagagaaaaaaaagaaaggaaaagaaagtgatttttgaaaatgtaaaactgaacgtagtcatttggtgcaattccaataaatttgagttttcagatgctcaacacagcccactcctagtgctgatgtcataaatctcttatatttccagcaaacaatagttatttgctcaattggggcttcaaatgactgctacctctttttgttattgaagtctacattagcaaatactgtgaattagtcaacattggaatttaacaattaaaatattattgtaactccatgggttgctcaaaattggtctccaagaatcaagaagaacctctgggaaccagtgtgtgggcatataaaaatgttctacattaaaaggtagcctcccttaccccacattatgggaaagtaatattttttcagcaattatgccaaaaagcttgtacatttctcaactattctctcagtgaagtaaataggattcaaatgattgcagcttttgtcatttttctttttgccacccacctgggtcacagctctacttatctgaacatacctatttagacactctttttatgaagcacaataccaagatggtagcaaaggctgattcattctgatttttattttgctgattggatagccgtatcttttagcccattcgcctgactaaccactgctttgtttcaatgagctgttgaaaaccatttggaaatcacctaatattagagagagacttggtttaaacatctgtggtatttctctctaaatatcagataaggatggataagcaagtctctaaaaagtgaaaacccttcatatctactctacttggcttaaatagcttgtgcttttggaataaatgaatgttttccatagagctcttggtccactctccatagcaagattttatgtgtagtcctgtctgtgagtaaaattgaggagagactccaagaaatgcaaaaccattttaatggatcatcctggacactttcgacaagaaagaagcactccacaccagctgtggaattttcccaagcagcatgtttactcacacccacgtgggtgaatagaatgagactcacacaccaagtaatgagctgcagatccactatgggaggcacctgctctagtgcctccccagatcctgcgttgggaactatggtcccttcctcctgctccacactttgcctgtgcagtctttggccgtggtagcttggttactggttacatgaccatccgtcttttggagagagagcaagtgctcctccaagcctacttactgtttaagactctccttgatacagtaaagagaatttgaccacagaataagaaaggtagtaagcagctcgctgatagaaatcttacgatctccttccttcagccttcaaatgcaagcttcctcagctgataaggagaggagctactctgtcaaaaggggccagtgagatttaaaaggctttcctgactcgtctctaccactcctcattatgacccagtgtgtacaggagaagatttacaaccccataagtgtgaaatggaattattaaaagaaaataataaaatgtaactaagtggttaaaaaagtagacaaccgaaagctaaagctttctgtataaaaaagaaggggctataatatttcattgcaaagctccagtgacattttataaaatcaatatagatttataactttctgattgatatttttgttttattcatttatgctttcattctgtttttcctttcaatttttcttgttttcttctgaatttttaaatgtacctattctctgttagtatattgccctgtttcattttcatttttaatataaattgtagttattttagttgccatatgtggatgactgcttaaacatctttagaagattttttaaatacctaattatacaacacatttagtttagtgttattttacttcaatatatttaatcatattttctaaaatctttaatgattcttcaagtaaaagtgtttaaatttagaattttatctattttagcgctgctttacatttatggaccgagggtatgtgtttaagatggtcaacaattacatcagcatgttctcctccggtgaccttaaggtaagaaccacgtacaggagtgattgttttctaaactatggcattgtaaataaataaagtagtctctgtggatacctgcttaagtccattctctgtatcagaaagtgatttctatgccaaggagaggcagccttttaatgtttcatctgctgagtgtgcctaccaagtccttccttaatggggacaaaggagagtggaatgaaagtgtttacatttcatttctatttcctgtgggtggtgaagagaatggctctttgcagctacaattcctacagtccagtttgccctagactggcttggtttcagcactgaaagtcctacttccctggaaacctttaagtcctgggcaaaatgggacagttgaataccctacccaaataggggtatacgctggggagatgtaaagagaactctagagcagtggttcctagaccagagaggtagcatcacttgggaactgaactgctgctaatggagcccagaaatttgttttaacaggacctctaggtgattgttttgcactctcaggtttgagaaccactgagctatggttatggcatatgctggagggaactaagactggaaatgggccagatgatgaaagctggatcagttaactgttctttgggttgaaagcaacagaaactgactccaatttgagcaaaagggaattgattggaaagataattgggagtaaatagcattgatgaagcagctgcagaagcaggctttgaaaagagcaggggctggcagggcgcggtggctcacgcctgtaatcccagcactttgggaggccgaggtgggcggatcacgaggtcaggaaatcgagaccatcctggctaacacggtgaaaccctgtctctactaaaaatacaaaaaaattagccgggcgtggttgcgggcacctgtagctccagctactcaggatgctgaggcaggagaatggggtgaacccgggagtcgagcttgcagtgagccgagatcgcgccactgcattccaacctgggcgacggagcaagactccgtctcaaaaaaaaaaaaaaaaaaggcaggggccaggccttttcaagcacaaggaatacagtcatgcgtcacttaacgacagagacacatactgagaaaagcattgttaggcaatttcgtcactgtgtgactatcatagagtgtacttacacaaacccagctagtatatatcctactccattacatagctctgttctcattgtatggaaccaccattgtatatatggtctgtctttcaccaaaacgttacgtggggcctgacagtaattgcaaatgaagaaccatttggccgaggtgctgctgcatctgcttaaatgaatcaactgaagccattttctccccccaacactgcttcagattcaccttccatagaggaagtgtgtgagcaacctgctttgggtcacatgcttgcctcttaaggagagaagacagggcatatgaattaataattctctgttaacctttacccactgtgaaggaggccagtcctcaaggggaaattatctaggtatttgaaaagaacaatggatttagaccagccaaaaataaatcatgagattcttacagcctttcacgtcatgcttagttgcttaaacattatttttgggagatggggtgcagtggagattttgaccagaggagttacatgattttatgtcatctggttttgaaaatccaattctctctctcaattttttttgaaagtatattcttcatttgtgctcctgtcatgcatgaaatttgcagaatatccatttaattgcagcagacctaaattatgtattttcaaagaccaaacagaatgttctcaatgtaaaatagttaacatataatttaataatgctcctgttcactttgatgtacaaaggtttaagtcaaatattatcctttttgaaatggcagtattttaaattattaactaaagttgccacaagatataattctaaaatatctgagtaaatgggatatattttattttgtgagctgagattagtgaatataatgatgatcatcgaacttagtcttaaaacatggttacttagcatgcatgagagtaaaaatagagcagtcaggaacatgcttatttttcctactgatgtggctgttcttgactcctgtgttactttgaccgtgcctggactccatttctctccatctaactcaaacattattgcaaagacagacctatttgcaagggcagggaggaaagacgaattaattaatgtactatgagaacatgtggcatacagggtttcactctaattttacgtgatacacaccattgtcttccttagctctggatggtaggagctcattgtagaagtctgtttcattatctgagtgtagtttttgagagaattctgtgcatgtgttacagcaggaatttttttcagaataaatgtgtcatgattcatgctaaaagaagctaaaaaatatgactcagtaggatcttatctcatagaagctacatgtaggttacaaatgggattatttcctgaagaggccttgaccagtctccaaaagtagggagcttaactgcagttcggaggggacaaaatcctttcaacttaattacctagtggtccgacaagtgtatggtaactactttttctttttagggataagattcaagtgcagattttgtttgtttgtttttattcagtttcttggtctgtaagtcatagtcatttagtttgcctctctttcagaccttgtgccagtataaatttgattttcttcaagaagtatgtcaacatgaacactttatccctttgtgtctgcccataagatcagcaaacattccaggtaataaaattcccagaattttcctcagttcctgcaaagtgaatgcttttgtttgttcgttttaccttttgtttattattattttcctgtttcttcagtcataattttgtttgaagctgtcacatgggtatcagacccaggtaatcagaattaaattaaaatgcaaaagaagttgttggcatgtggtgatgaatatggcttcatattcctcaatttttgtctgtttccctttttattaaagagaaggccaacaaaattataaacccgatgattgttaatcaaataatttgaacctagaggcactttacgggctccaaaagacagctttcctttcattttgagacataaaattatagggaggaaaagtactatatatataatttataaatattatatatataaatatatatgtattatggtagagagtattacccatgtagacatcaaaaactaatcaaatatcaagatgcaaataaaataataaaattatttaggagcatgaaatactttattaccaaccaatgagtaaactatttatgaggtacagtttttttcttgcgggggagggggttgttttgtttttgaggtagagtctcactctgtcacccaggctgggagtacagtggcatgatcttggctcgctgcaacctctgcctcccaggtttgagggattctcccacctcagcctgagtagctgggactacaggtgtgtgccaccacacctggctaattttggtatttttagtagagaagaggtttcaccatgttggccaggctggtctccaactcctgacctcaggtgatccgcctacgtcggcctctgaaagtgctgggattacaggtgtgagccgccacacccagctgagaggcatatttgctttgatattcatgaacacaaacactaagattggtaaagagcctcattatacttccttaacctattagcttacactagtattctggagggaaaattacattatcaagcctataaaagttttgccattttaatcttaaatataatctatataatattattccaattttttctaatttatgaagcatatttcatagaaaatagggtagaaatggcatattagataataacactttaaggtgtttacgttgttctgaatgtatttttgttttataaattactgccaagttattattggttagccaggctgattgagatattcaagaggaccaaatctttatttggtcatttttatttcagttgcttactgtcttagtccattgtcacactgctataaagaactacctaagactaggtaatttatgaaaaaaagaggttgaattgactcacagtgccatatggctggggagccctcaggaaacttacaatcaaggcagaaggtgaaggggaagtaaggaccttcttcacatggcggcaggagagagaaagggagagagcaggaagtgccacactttaaaaccatcggctctcaagagaactcacttactgtcatgagaacagcacgggggaaactgtccccatgatcaaatcacctcccaccaggtacctcccctaacgtgtgtggattacaattcaagatgaaatttgggtggggacacagagtcaaactatattacttactattagtcagtagctcagagaaaagcctgacagtctctttgtagatctgatactataaataatgaacataaaaatatgtttcatagcaggcaaaattctgatagaaaaatagatgctcaagtagaaagctaacaattagaataattctgctcatgaccctcttttttaagaaaacaaataggctgagggtggtggctcatgcctgtaatcccagcactttgggaggtcaaggcaggcagatcacctgaggtcaggagtttgagaccagcctagccaacatggcaaaaccccatctctactaaaaatacaaaaatcagccaggtgcagtggcgggcacctgtaatcccagctacttgggagactgaggcaggaaaatcgcttgaatccaggaggcagaggttgcagtcagccaagattgtgctactgcactccagcctgagcgacagagccagattctgtttcaaaaaaaaaggaaacaaataacctaagacattctccttgaaaactggcaatactgaagactcacatttttaaataatatagtttaattgttcagtataaactacacataatgaatacatatgtatctgagtatgtatatgtatatatctgaactttttatttatattaaattcagatcctttgacaccttcagaatcgactcaagagttacatgcatcaggtaagtgatattaccttacctaagcatcagtaaccacctgtaatccaataatattgacaactataaatttccagtttctgggtgctaataaatattcacatatttaatatcatatgataaaaatattcaaaaagttgactgaattgtttgcttgtcacagatagtttaatgattgcctaatttcaattctttcgtattttattctccagaggttggcaatattttttaatttcccaaagcatctgaaatttccttaatttgtatcataaatgaaattcccagatatatataataacatgcttgttcaatgtaactgactttatatgatgtatgtcttttgctaaaccacagcctggtttgatcaatcttgttaagacagaggatattagtataagtttatttttatctgaaatgggttagtaacttaaaatggtctaggcaaaccttttctgtagtcatagatggaaatttaaaagttgtgttctattcctggatcctcaatattactatgtcagtgagaaatgtatttagcctgaagccctgtgattttagtctcctgaacttctgcattcctgaatttccacattcagtagcttctttatggactaaaaaagtcagtatgtttaatttgctattggtcatttatgagctggaatattctaatagttaattatattaatcatacctcccttacgggttgtcctgcagatcaaatgggataatgcacataaagtgcttagcctagtgctagcagacagcaggttgtatacacgggtgctagtactactgttttcccccagccttattgaggtaaaattgacaaaaattgggcgcggtggatcatgcctgtaatctcaacactttgggaggccgaggcaggcagatcacttgaggccaggagttcgacatcaccctggccaacatggtgaaaccccatctctactaaaaatagaaaaatcagctgggcatggtggcacatgtctgtaacctcagcttctcagaaggctgaggcacaataatcgcttgaaccctggaggcagaggttacagtgagccaagatcgtgccactgcactccagcctggacaacacagtgagactctgtctcaaaaaataataaaaattttgtatatttaaggtggaaaacatgttttgatatatgtatgcgttgtgaaatgattactacaatcaagctaacacctcatatagttctattttttaagtctgtgcgatgagaacaattaaggcctactcacttaatagatttcaaatgtacattccaatcaatagaaaaagagggaatcctccctaactcattttatgaggccagcatcatcctgataccaaagcctagcagagacacaaccaaaagagagaattttagaccaatatccttgatgaacattgatgcaaaaatcctcaataaaatactggcaaaccgaatccagcagcacatcaaaaagcttatccaccatgatcaagtgggcttcatccctgggatgcaaggctggttcaacatacgcaaatcaataagtgtaatccagcatataaacagaaccaaagacaaaaaccacatgattatctcaagagatgcagaaaaggcctttgacaaaattcaacaatgcttcatgctaaaaactctcaataaattaggtattgatgggacgtatctcaaaataataagagctaactatgacaaacccacagccaatatcatactgaatgggcaaaaactggaagcattccctttgaaaactggcacaagacagggatgccctccctcaccactcctattcaacatagtgctggaagttctggccagggcaattaggcaggagaaggaaataaagggtattcaattaggaaaagaggaagtcaaattgtccctgtttgcagttgacatgattgtgtatctagaaaacctcattgtctcagcccaaaatctcctcaatctgataagcaacttcaacaaagtctcaggatacaaaatcaatgtacaaaaatcacaagcattcttatacaccaagaacagacaaacagagagccaaatcatgagtgaactaccattcacaattacttcaaagagaataaaatacctaggaatcaaacttacaagggatgtgaaggatatcttcaaggagaactacaaaccactgctcagtgaaataaaagaggatacaaacaaatggaagaacattccatgctcatgggtaggaagaatcaatattgtgaaaatggccatactgcccaaggtaatttatagattcaatgccatccccatcaagctaccaatgactttcttcacagaattggaaaaaactactttaaagttcatatgcaaccaaaaaagagcccacattgccaagtcaatcctaagccaaaagaacaaagccggaggcatcacgctacctgacttcaaactatactacaaggctacagtaaccaaaacagcatggtactggtaccaaaacagagatatagatcaatggaacagaacagagccctcagaaataatgccgcatatctacaaccatctgatctttgacaaacctgagaaaaacaagcaatggggaaaggattccctatttaataaatggtgctgggaaaactggctagccatatatagaaagctgaaactggatcccttccttacaccttatacaaaaatcaattcaagatggattaaagacttacatgttagacctgaaaccataaaaaccctagaagaaaacctaggcattaccattcaggacataggcatgggcaaggacttcatgtctaaaacaccaaaagcaatggcaacaaaagccaaaattgacaaatgggatctaattaaactaaagagcttctgcacagcaaaagaaactaccatcagagtcaacaggcaacctacaaaatgggagaaaattttcacaacctactcatttgacaaagggctaatatccagaatctacaatgaactcaaacaaatttacaagaaaaaaacaaacaaccccatcaaaaagtgggcaaagcatatgaacagacacttctcaaaagaagacatttatgcagccaaaaaacacacgaaaaaatgctcatcgtcactggccatcagagaaatgcagatcaaaaccacaatgagatatcatctcacaccagctagaatggcgatcattaaaaagtcaggaaacaacaggtgctggagaggatgtggagaaacaggaacacttttacactgttggtgggagtgtaaactagttcaaccattgtggaagtcagtgtggcgattcctcagggatctcgaactagaaataccatttgacccagccatcccattactgggtatatacccaaaggattataaatcatgctgctgtaaagacacatgcacacgtatgtttattgcggcactattcacaatagcaaagacttggagccaacccaaatgtccaacaatgatagactggattaagaaaatgtggcacatatacaccatggaatacaatgcagccataaaaaatgatgagttcacgtcctttgtagggacatggatgaaactggaaaccatcattctcagcaaactatcgcaaggacaaaaaaccaaacactgcatgttctcactcataggtggaaattgaacaatgagaacacatggacacaggaaggggaacatcacactctggggactgttgtggggtggggggaggggggagggatagcattaggagataaacctaatgctaaatgacgagttaatgggtgcagcacaccaacatggcacatgtatacatatgtaacaaacctgcacattgtgcacatgtaccctaaaacttaaagtataataataataaaatttaaaaaaagaaaaaaatagatttcaaatatacaatattgtattattaacgattcttactatgctacgtatttgacctccacaatttattcatcttataactgaaagtttgtaccctttgactaaaatccacctcccatttctcccattccccagcccatggcagccatctttctactctgtgcttctatgaggttaacttctttaatttttttgcagaaacttagaggggtacaagtgtaattttgttacatgcatagattgcatagtggtgaagttaaggcttttaggatatccatcatccaaataatgtacatcgtacctatcaagtattctcttattgtccaccagagtttgatttctttagattccacatattaactgagatcatgcagtatttgtccttctgtgtttggcttatttcacttagcataatgactcttaggttcacctgtattgtcacaaatggtaggatttcttttttttttttttttttttgaggctgaataatactccatcgtatgtatataccatttttaatccattcatctatagatggtcacctaggtttccatagcttagctattgtgaataatgctgcaatgtatctcttcaacataatgatctgaattcttttggatgtatacccagaagttggattgctagatcatatggtagctctatttttacttttttgaggaccttctatactgtttcctataatgaccgtattccaccaacagtgtacaaggattcccttttctttacaccaatacttgttctcatttgactttctgataatagccatcctaaaaactatgaggtaatagtgcattgtggttttgatttgcatttccctgatgatccgtgatattgaacactttttctatatcttttggccatttgtatgtcttctttcaaaaaatgtctattcagatcctttgcccatttttaaaacttggcgggttgtttttgtttgtttgtttgttgctattatgttgtatgagttccttgtagagtttggatatcagccccctgtcaggtatatggtttgcaagcattttctcccaatctgtagtttgctttttcattttgttgattgcttcctttgctgtccagaaacttttaaatttgatataatcctacttgtttatttttgcttttattgactgtgtttttggggtgatattcataaaatcattgtgaatgccactgtcaaagagctttctccctatgttttcttgtacgtgcaagtactactattaatggttacattttaaaaaccctttggacaatttgaataaatccattattactggaaatttttaacattcttttctctgtaattcaggctcaaaatttggcagggccttttctctataattcaggctcaaaatttggcagtgtcttttctctataattcaggctcaaaatttggcagtgtcttttccctataattcaggctcaaaatttggcagtgccatttctctctccttgctccctcaaatacttcagtcaacttttcctagtgagttactcttgtcactcagtttctgctaccccagcccagatatcacgttgtcacttgccccctccctcccccattgctacaatgtcctgtattgtatccctcaccccacatctccccacagtctaattcatttacaccctgccacaccatattaataagtcagtaaagcatgagccttatcagggcactgatctcaaagctatcggtgtgttaacattccttacagaattaaatacaaatggagagggacctagatggcagctaaggaaattgtactgttctccatcatctagccccagcctctcaagcctaattctctcaccattcctcttttagccactgtgcttattgactcccacatactcgtgctcccctccatacctgctcccttccacacctgcgctttcagaattctgtgccatcgaaaatccaatcgcttctcccagcctcctgtcctttctccattgcctctgtctgttcccacaaagatctgcacctccaaacttcaagtatcctcaaagactcatcttgatggattcctacttataacatatcctgattcctccaagcagaaaatgtgtttttccccctctcaaatcctgtaatcctgtaaatatgctgttattatggaattcaaaagttgatgttgtgtgttagtttgtacctgtatttgtgtttgtctacacagaatagtccccttactgaatgctccttgaggatacaacacacctcatttctgtagcaagactgtattcctgaatccctcctagtggtggaagaagttgatggtagttgtttggtatatctgtctcaattataaagtgatcatttgattttcaataacatgagttattttccttcctcacaaagatatgcctgaatattcagtcacaaatgaattttgtcgcaaacacttcttaatcggaattctgctccgagaagttggctttgccctgcaggaagaccaagatgtcagacacttagctttagctgtcctaaaaaatctaatggctaagcattcatttgatgatcgatacagagagccagtaagtgatcttcctttctcccttccctaaacaccatttaatggctcactgcattaaatgcatatgaaaccgacaagcctattgatttttacatgaatcatttcttttggctaccttttctcctagagaaagcaggcccagatagcaagtttatacatgcccctgtacggcatgctcctggacaatatgccaaggatttatctgaaggacctgtatccttttactgtcaatacatctaatcaggtacgtttgcacaatatgtcacatttctatgttaataaagaatttgtctttttttaattattttttgccctggataaccatttcttctcatctgtgaacatactaggcattgaacaacactttctgctatgtactcacatcaatgtgtcatttgttccagataggtccctttagcctccacctgatccacccttcagcattttgctttcatttctctctgttctctgtatcagcttccaattctttccagcttttacaggttcctctgttgcaattatgaccccttcctcagtggacaccttctcctaccactttctacattccctacatccccccctggtgtcagaataaatagccaagtgccttatttgtagtcacaacccaggagtgactataatccttcctccactgaggcaccacagtgactacgcacaatccattaaagatccgttgcctatgttcaaatctcagatgaaataacccactgctgaatccagtatctaaggaaggtattaccatctaggagttaggagctatgcctatggattttttttttacctttttcaaatcccagcagtatcagtgactatctgggtgactggaaataagttagccaacctccttaagactccatttccttcattataaaatgggataaaatacctaaatcacagtgtctttatgaggattaaattgtgtactagaaaacatttattttagagcctggcaagcaataaatatttaaaacatagttttaggccaggtatggtgactcacatctctaatcccatcaactttgggagcccaagatgggaggatcccttgaggccaagagttcaagaccaacctgggcaacatagcaagaccccacctgtacaaataagaaatttaaaaaattagctgggcatggtggcacatacctgtagtcccagctactcaggaggttaagggcaggaggatcgcttgagccaggaggttgaggctgcagtgaactataatcatgccattgcactgtagtctgggtaacagtaagacgctgcctgttagataatgaaatagaataattaaaataaaataaaatgtagttgctaataatagtaatgtacataagataactcatggtaataattatatctataatgtgatccatgaatatatcaataaccaatccagccatgtagtctgtatatctgtatctaaaagattgtttctacaacattgtaaaaaagtcacataaatcaaattataactacgagtatggttttggctgtatttgttttcactgcctactttagcagaaaacctgtaaggggatataaaagaacaaattaaatatcacttaattggaagtgtaacgaagaaggcatatgtgggttaacaatgttgaaatgccatgattcccattaatctttactatactttgaatacaggggtctagagatgatctaagcaccaatggaggatttcaaagccagacagctatcaaacatgcaaactctgtggatacatcattttctaaagatgttttaaattccatagcaggtacttgagatcttctgagaacacttatttttaacactcatccacctttacattgtatatcattgtgctttttactcagtccgtaatttattatgcataatctacgtggcaaagtatactacatttatacaaccaaagagtctttttacatatttctttgaattccatccagtgacttcctcttctacttagtgttcagtattacttggcttaaggagcagcctacttggatgttatcaaattactttattctggaaaccgtctttaagttttcattgcagacagccttttaagatataatggcttttcaacttcaagtattatttttaagaactgttttggaaatgtcatttcagtttctcataaacagtcaaaagttgaaagccccttcccaaaagtatctttatgaacttttactaaagcatttttaaaacaagagctggctttaatgccaatcccagacgctgttatgttggtctttgacaacactgctgctacctcagtatcaacatctttttggttcatcatgtgaaccttttgtgtgtgtgtgcccatacatctcattcccatacgtgtgctgtggcttgtgtttacagcattttcatcaatagctatttctacagtaaaccatgctgactccagagcatctttagcaagtcttgactccaatccaagtaccaatgagaagagcagtgagaagacggacaactgtgaaaaggtatgacttccctctcaaacctactgatcattacaaggcagaggtcactcactctcactcaatcctgattggttcttgaattcccagatcccaagacccttgtctttgattggctcaactcttcgatttgacaagttagatcaagcagaaaccaggagtctcctgatgtgttttcttcacattatgaaaacgatttcgtacggtaaagagaattctttaatttttttgaaaaaaggaaaaagaaaaccttcagattctcatactacctggtgtttccttttagagactctgattgcctactggcagagagctcccagcccagaggtgtccgacttcttcagcatcttggagtaagttttagagttgatgacttaacacttttttctggaaatttctaaatagtccactataccatgtttcatttcaagaacccatatagtaagttatcaataatatatgaactatttaaagaaaatttaatatttttctttcaatatacttagatgaacagtttgtataataaaagaatatgaataattaaaatgtggtttttttctcctttctagcgtttgtcttcaaaatttcagatacctaggaaaacgcaacataataaggtactaattttaaattccaataggttaatctggtcttttaaaaagcatatgacatgtattaatgtgtcaggttagagttacaaatatatattagaaatcttaaaatgcaaataaggattgttaggttgacgtcacattagacacagtaagtttgaagattgcctcatacgcattgtagatctaggaatagttcatgttgtctagggagaaaagcacaaaaacacaaatttttgaaagaaaaccacatttcatgtatcttcagaatgaatttatcattatatagatataacttggaagatacctatttcagaaaacatttccagtaaactaaaaaaaaaaaaaaacaagtaatctggaataacttcgtactgtcatcattttctcatgagacaacaacgtttgaagcaccttcactaaatcccaatttctgatttccgaaagaaaacagggttttatttttgattaattcacagcatgtgaaatatttcattgtgcagtaatcgttttgtcagttgccattcatttttatatgtaaattacaaacactgagctatgattaaaacttccattttcattgcagaaaaattgctgctgcatttaaatttgtgcagtccacccagaacaatggaactctcaaaggatccaatccttcctgccagacatcaggtctcttgtcacaatggtaatgtcacatttgcttggtatttaaaattatatatagctgtgtgtgtgtgtctgtatatgcacatgtcaggggtagacacacacacacacacacacacacacacacacatatttctatttatatattcaaaccaagtgcagatttcaagtaactatatgtctacctaaagaaacttcttagatactttactgtctgccctactagctggtagagaccaaagagataaggagtacaccatatatgtgtgcacttagagcacaatcccttgcatagactgaacattaatgagtattttcatttaatgaaacctgagacataggcccaataaatgcctcttttaatgctagctaatcttccagtgacaaacggaaatgtggaatcatgtctccctaggcttttcagtaattataattttttgcaatgttcttgaagctgaaattgttttttaaagggtcaaaggcaatgaggaagcatggatagtcccataacctcactttagatttcctagtcattagactggtttgactagcagataggacctggagtcatccttcaccggcctaaccaatgggaaacatttgccctgaaattctacctcggagctcctctgggtcttgtaaatgagaattctttgctaaaattatctccactttgatttattcttcccagaggtatcatcataatatatattatgaatattttagaaagggttttagaaagaaatataagagtcgtacatagcgaataaatcatagaataaattgtgcctccctccatgccctttgaaattgcccccttgtgagaaagtaaatgaaaaaaaatgtaatggacattttttgcaaaaaataatagaggacagtaaagaattagtttccatgtttaataataatagtgagccacctgaggtcactgaagttttgtagatgtgtggtgggttagatttcaggctgctcctgagacatctggatgggtcctggccatttctgtccctcgcctcctagaaaccagggcttttcctccacaagttcagactgtactacactcaaaacctagaaataagccaatccaaatgcctaaagcctagagccaaggaatcacgcactccttctagcttcaggaatgacccaggctcccctggctattgaaagccaaagtctcatctccttggcctccacccatccaggttttctgatttagccagaaccaaaacagccttgaaaagtgggagaaagagaagaccactgcctcatttttaggtaaaggcctaaaggaggaattaggagatacttcagggtatttccaaatgctgctttctttccataagtgttgttataaatagtttttatgacagcacatatcccaagaattatcaacctatttccttggccaaatgataaagtcagcagtaggaaatattcctatttccacagtaacactggctcatttttcccagctggaaatgctatggggtgttgaatgagtcattgcaggccattgtcattgccctggaagcacagaggcacagaggtcctttaactacctacctcccacaaccatcacatgtcagccccctgtggacatgacatcagtgaaatgacaaatcaacaggaatttccagatacaaatacctcggaaagcaagagttgttttagaacctgattttacacttatctcttcaaaaataatttgatgcatctgagctgtacaatattgtactttttaatgtccaccactgtgccttcctgatcagccagtagccaacttaacattcacagaatcccattatttcataaataataatgatatgcttgaatagatttcactcaatgacctgttattctacagattacccttgtgaacactattttggcttaaataaaatttctccaaaagtactttaaaaagtctctctcatcatgtcacctataattaatatttgtaataaaaagttgctttccaaactagtttttaatatttgactcaatctagaacatttgagaatgaacaagtgttatttggctataacatccccaaataactctaaccacttttctttttttgttttcaggatgcactccacttccagtcatgaaggccataagcagcacagatcacaaactttacctataattcgaggcaaaaatgcactttctaaccccaaactcttacagatgttagacaataccatgaccagtaagtaaactgaaataataggaacaagatggttaccagtttttctctaggtatgtgtaggacatgaaatgcactaaaaccacagtttttaaggtttgctgtacctctgggaatatttcttaagggaaagactcaccagggagtggttaaaaaaaaatgtagtgccctatggtgaagaaaggggagaggcaaaaccctcaatatcatatgtttagcatagctcccttggaaacaagttactttcagcattgtgcaggttatgggggctgctgtcaaacagatgattactgcttcctctgtggggaggggataaagttgcccatgtcccagaagcagcaagggtgacctcttgaacttagagatgcacacactccagcttgtgaatgagggtaaaatggaggccagcgttttgtaagcatgtaacttgaggactaaactctgaccttttctcttctcttgcccaaattcttcaggggcctggaaagtcacaccagtctcatcagaggggttttagttaaccctatataacatggcttactttccaacctgactctggcataacatcacatgacagataaggaaagaaatcaaaatattttatccccaaatatgttttttttttttttttttttgccatgtcttgaaacagccctgcagagttgtctcttgtggggaaaattttgcattctgtaaagaatcccctttccctcttcaggaccttttcttgatccaggagagaatcaactgagagtctggcacctttttcagtctgataagaaacatttacaatctcttctctctgaagtctgccatctggaggcttcatctacataataagaatgttggtctccacaattgcctttcttaacccagacatttcctttctattgattccaggtctctagataaactctttctaccaatcgccaatcagaaaatctttgaatacacctataacctggaagtgcccctctcccccactttcagttgtcctgcctttccagaccaaaccaacgtacatcttacacgtattgattgatgtcttatgtgcccctaaagcatataaaacctagctgtagcccaaacaccttgggcacatgttctcagggtttcctgagggctgtgtcacaggccattgtcactcatatttggctcacaataaatctcttcaaatattttacagaatttgactcttttcattgacagattgttagcaattatgggcacatggcccacagttacttgtttgaaagtatatgccttaaccgataaagacactttgtgactttccgaggggacataaagactgtccactgagactgtacatttggtctattagcccagaagtttagaacttgagacagcctgattatgaaagaaatatgaccctgtctttggccaaattaacggaaaagaactcagaaacaatggaaaccccgcaactgatatatggaaagggcacacacactaaagactctagtacttttaattcagtcaatgaagaaactgaacaaacaaaaacactttgatttaataaattattaatcaaaatgccagtaaactttgaatatattgtaatgaaaggaaatcctttatagggtacaaagcattgtcttagacttttacgcatgttttattttgtattttataggcaactccaatgaaatagacatcgtgcatcatgtagacactgaggccaatatagctacggaggtttgcctcactattctggacctgttatccctcttcacacagactcatcaggtgaatatgatgataacattttctgcaaaaaatgatgaaatatgaggtagaaaaaccatgtgaagtcaaaaacatggttttttttaattatttatgaaatcaattaaccttatataaatcaacctaagtgtgagtggaaaacatgttaaagatgagattttgattttatcacaggttgactaatgtttgtttgatatgtacacgtgtgcatttcactattgtcaaatagtctttcttcctcatttatcttgcttcactctcaggcaagctgggctgagtgatagtgtgactctgtactttttcagtagaagaggaagagataaatgggcctatatattaaatttacaactagatctaaagaaaactaataatgttgagcatctttttgtgtgcttatttgacattcagatatctttgatgaaatgattatcactacttagaatggctaaagttaaaaagactgaccatccaaagttttggcaagggtgtggagaaactagaactcctatttattgacagtgggaatgcgaaatggtaaaaacatgttggagaacagtatggcagtctctgaaaaagttaatcatacatctgtcctgtgaccagccattccaatactgtaataggtatttgcccaggagaagtgaaaacatatctccacataaaactttatacacaaatatgcatgacagctttattttaatagcaaaaaaagaaactacaaacaactcaagtatacatcaacaggtgaatagatttaaaaatctgtggtatatccatacaatagactactactcagcagttaaaagaaataaactactgatacatgctgtaacatgggtgaaacccaagaaaccaaatttaaaaagagtatataccgtattactcagtgtatattattccatttatatgaaattttagaaaatgcaaactataggaacaaaaagcagatcagtggttgcctagggatgtggaggaaggatgggaggaaggaattacaaaaaaaagtatttaaaaacttttgagagtgatagatacgttcattatcttgattgtggtgatggtttcatgggtgtatgacagtgttaaacttattaaattatacatatcacagttcaatttattgtatgtcaattatacttcaataaaactattaaaaacatttgcagctctaccaaatgagcttaaacacctaggctagtacattacggattgagccggggcaggtgtggtggctcatgcctgtaattccagcactttgggaggccaaggagggaggatcacttgagcccaggagttcaagaccaacctgggcaatatagtgaagcttcatctttacaaaaaaatttaaaaaattagtcaactatggtggcacatgcctgtagtcccagctattcggaaggctgaggtgggaggatcactggagccctggaagtggaggctgccgtgagctatgatggtgccacgacactcctgcttaggtgacagagtgagaccttgtctcaaaaaaaaaaaaaaagattgagccaggaaaacttggattctttgaataaagtctacacagaacagcataattatgccaagaaagccctatttcagatgaaatgtcagcatggtggtagagaaagtaatgactatattgattcttattgggccatgaaaatgtcactcaaatctcacaaattttaaggattttactagtgccttcaagaacctgtgacctctctcccatttctccccggccccacccaactcgccattgcatcagctacttttctttctcaaccttgaactcataagctcctttccaaatcaaggcccttttactagctgtttctcccccacaggacagtcctcccagatctctccagggcaggcccctttgagctcacatgccaattttccattagagaggtctttgctgactaccctatggaagtaatcctacccccaaagcaactactttcaatcacatcatcctagtctatttccatttgtcatgtttttttcaatcactgctatgtaagtttcacagtaaacatgaactgtgtctccttgttcaatcctttatttctagcactcaaaatagtgccttaccacatgacaggttcacaataaatattttttgatagaatgaaaattttctttcacttatcctgaataacatctgcattgaatttccagagacaactccaacaatgtgactgtcaaaattcattgatgaaaagggtctttgatacctacatgctctttttccaagtcaatcagtcagccacagcgctgaagcatgtgtttgcctccttgagactgtttgtatgcaaggtaaggatctccaggtttcaatgaagtttaggtaggatgacagtaaacccatagaatagtaaacctataggaatccttgcgtttctcagtagggagggaagaaggattgttttcttcaatttgggttttattagacattgattcctggtctcaaaatgagtgcacagccttgacaatctgtctgctcaaataccagaagatattagcatctggtgacaattagcatctggtcaccaattctttgagttatctgtgtttgcggcaccaagttaggtaaaatgcaccccttgaacttaaaggggtgcatatcaagttaaagattccacattaaagtggatacagccaccgcctttgaggacgcttgtaaataacacctgtgatcttaacaatgtcaggtgaattgaggtcatttcaaagctctcactgttattttggattgtcatcagttactgatacaaaggatacttatacaatgtagagaataattctatctaggaaaaaagacaaatgctaacataggccttaacaaattctatcctcctcacttgcaaatgaaaaaaaaaaaatagaccaagttaaaaaaaaaaaggagagggattttgttttagggaattttaaaatatgagaatgaacagagcaaaatgaaggcatgttgctcccttcacccgttcttccatttctgcagtttccttcagcgttctttcaagggcctgctgacctctgtggatcattctgttacgaagtcctaaaatgctgtaaccacaggtcacggtcaactcagacagaagcctcagcccttctgtactttttcatgaggaagaattttgaatttaacaagcagaagtcaattgtccggtcccacttacaagtaagtgctgccaattttcattaatgctgttgttaaaaccactgatctgtttcagcagtgcttaaagcctactgtcctcagggcaagccgtcactaactcctccactagcgtcctccttaaagacgcccacagcattcagttctgtttaatagtaggggcacagctgggcagaaatcagcagagccctatctccacttgtactttcctttcttctgccaggaaatagaatcatatggagtaaacaactcaggaaaccatggctagctccaacaggtcaaaccccgccaaattccaaacgtaattttttttcttctaggcatcccaagattccaagattcctgcagcctctcttaggtatttaagattataggaaacaccctagatttaataatacgttctggagctttaatacataaacacttcttttattggacctacagggagaaactaataatacatttacccagcccagtggatttctttaagaagactatttctggtcttgtttttgagagttcattttttttcttttctagctcatcaaagctgtgagccagttaatagccgatgctgggattggaggctctcggtttcaacattcgcttgcaattaccaataatttcgccaatggagataagcaaatgaaagtaagaaatgctttgtgggcttttactgcagaatttttttaaatctgaagtggattctttttgtgagatatcaaaatcataaaaatagattgggtacagtggttcacgcctgtattcccaacactttgagaagccaaggcaggaggatcgcttgaggccaggagtttgagttgaggctgcagtgagctatgatggcaccattgcactccagcatgggtaacagagcaagaccttgtctctaaaataataataataataataataataattgtttattttgtttattgagactttgagctttgagcactcctcaaagtaaactatcaagtttattgtttgaatcgttaagcagctcttacactttaagcatgtgatctgttaagaggcattcccaatatgtgtggttgaatggcctagaacaagaggatttaccataaatatccagaaatacaatgacactcctaactctatttgggggaaaattcatcttatcttttgtttagcactttctgaagacttctcctgtagtcattatactgaaaagtccaagtctagagccaggcttcagtcatggctggacccagggattaaaataattttcagacccatccctctactgcctcgatcttgcctctctcactgtctgtcagctcagctttcctctttgtttacttcatttccagacaggctatccccctgggcatgttctcagaaattctgaggaccttggtagtatcttatgagtagaaaatcaccttgtttgatagttccaattaaagtcccacaactgaatctctttgatccaagcttaaataatatgcttatccctaaaccaatcactgtagcttggaggatcaaaaaatagaattggccaggccagtgttatatgccatccatggtctctaggagtaaagtcagacctgttcaaatcacatgagctagagtcaggaaggggaatatatctcaaagacaatcaggacgtttcaccagaagaaggtgttcttgaagacaaaagaatagaggctcctgaaatgtttatcttcaaatgtgtgtatccacagtcacaaaacatagaatgcacatatatagaatgcactcatttataactatatatagaatgctccaaactgtgatgcgtagccataattaatagcataacttaaagtcagttaacctatagattctaaacagataatgacccaggctctctcttttccaaagaacagcaatttcccagcagaggtgaaggacctgactaagcgtataaggactgttttgatggccacagctcagatgaaggagcacgagaaggaccccgagatgctggtggatctccagtacagcctggcaaactcctacgcaagcactcctgaactacgcaggacctggctggaaagtatggccaagattcatgccagaaacggagatttatctgaggtgattagccaaggcttggtcatttaccatcagtattgtcctctttatcaggaaaattggattttcatttacagcatggactagaaaaggatgccatgtttttcaactaatctagaaatgactcagttatatatcatatacaatacatttccatatagcattcaaggatacctaacgctaagtaaatgatatcaaataaaggccagagtcagtgggggcaactgcaggtgtagaaattgtaatgcaacgctgaatgctaaaaacctgaggctaaggaggggtgtggtaagggtgtctgggaattgagtcgttaaattaatgttctgtgttttaaaacttcttctctgcaactagagttgaatggggaagcttgccaccatagtgagttaactcaggcagggggaatcagtcctcatttacagctagtttgaactggccatggaaaaatgaatgatccttagcaccatgtgaggagagtccactgcacgaggattataagtcaacacttaactttttatgtcagtttcaatactgggtggatcataagcagcaattcatagcacccaaggtcttcttagtaccaaatgggaagttctacgctattctggaactatgtccctttggggaagagattaatttgtctaggatagtcctaaactctgaagctcttctaaacacatgtggtaatcagggactctggaatggaaaccagaaggctggcttggcagcaatttagtgaggacaagaatgagaagcccttgggctgctctgaaaatgatgaaatttctccataaaacctcaaaaggaaaaagctgaagtcatttggaatctttagcaagtcgagttttaatatgtgttcagcaacgttcagggcttcataagagacagattaaaatataacatcagccatataatctagtttgtggggagcacgggtgttacattgtgtcacactagtcaatcaagtactcgtgaggtgaccattttaaaggcaacacaaattcagaggggctattccaggaggttaaaaaaaaacttatttagaaggcagatatttttatttccactttatatctaaatactagagttatagttttaattttaaaaggagacttatgatttatttttaatctaggcttagactttaagggaggaagagaattctatgggaaaattctttgggccagctccttcacccatctccaaactaaccaagaacaaacaaacaaaaacccaaatattcattttattcttgatggtgaatttttttggaaatacaattgatccttgctttcaatttggtgattacaaaggatccttctaacatattctgatatggaatactgactcgccttggaagattagccctaattatattaaactccatcccctgagcctctttattttctttctcattacaggctgccatgtgttacatccatattgctgctctcattgcagagtatctgaaaagaaagggtaagatgaccacatgagggaggcaaaaagcctagatatcaacacattgaagcctaatagaaataatgtattaattttacattttattaatctgttatgtttaagtaataatcgctttcacagatacttctaattatgctgtactttaaacattttaagtctatcatgccattgacttatttattctatgtacagcaaaggctaactggatggtcaacttcttagttcaaaacgagaatgcatcattggctaacgatttgtagtctctaaagcttgtattaacataaacatgtagcaatgtcctaacctcatcttgcactaccataggttactggaaagtggaaaagatttgcacagcatccctgctctcggaggatacccacccctgtgatagcaactcattactaacaactcccagtggaggaagtgagtgacctaactgctcatttatcccaatgcagaggaaatccacttgctgctcaaattctacttcagtgaaaccttcttaaatatattcttagaagcaaaaactgtctcagatctacccaacttactctgcaaaaaacttaaactcctgccattcagaaatcccatccaaaatttataaaatttaaataactgaaaagttgtcagcaaatagaactgtatgttctccaacattcaagtttatgagttacagccatatttagctaccaatctgcatgccagtctgccatagggatgtttattctgaaattggtaaattgtttgaaattgcaagaggaatctattttaatttttaaatgtaataaaactgtttattccaaataaaagatagggccaggcgcggtggctcacgcctgtaatcccagcacttgggaggccaaggtgagcagatcacttgaagtcagaagtccgagaccagcctggccaacatggtgaagcctggtctctactaaaaatacaaaatttagctgggcatggtggcaggcacctgttatcccagctacttgggagactgaagcaggagaatcacttgaacccaggaggcggaggttgcagtgagccaagatagcaccactgtacaccagcctgggcaacagagtgagactccgtctccaaaaaaataaaaagaaaaatgaagatatatacatatatatattctatatatgtaggactttataatcagcatgttccatttcatttttaaaaagtataaactgacaatttataacatatggcttatggtacagatttcctttagaaatattccatcattaatgtctgattttttgaaattataataatgactaaagagttactctttgcacaaaaaagtgagtgatatagtttacacattaaatctacattcaattgcaaaaatttgtttgaatccaaattttatgaactgtagtctctttgataacactggtttaactttccaaatgcagtggaaaactccgtgtacaaacaacatttttagatgttgaaatacatttttagatgttgaaaatcaaaagacttaaacgaaatgtaaatggactttacttgctatatttcagaaacataattcatcccttattcatttaaatatttgtatgttttctaaaaggtctcactggattttgcatataagacatttgaactggccaggtgccatgactcacgcctgtaatcccagcactttgggagaccaaggcaggtggatcacaaggtcaggagttcaagaccagcctggccaagatgatgaaaccccgtctctactaaaaatacaaaaaaaaaaaaaaaattagccgggcgtggtggcaggtgcctataaatcccagctactcaggaggctgaggcagagaattgcttgaacccaggaggtggaggttgcagcgagctgagatcacgccactgcactctagcctggacaacagagcaagactccatctcaaaaaaaaaaaaaagacttttgaaccaaatgaccaaagcaaactgagagacagtgaggtcacttgtttaaggaccttggagaagaagccagatgtggcaccctatggcacccatggctcatgtccacccaaaaattcaggaatcttcttgcttagtgtcacacttcctatgtagcctgatatttatatgcatgtcatcaaacacatcattgccttatttaacatgcccttcctcctcatctattgcttatcataaccagatgccgtaacgttccataaagactttcaaattctaagaacaaaattgaagaaaaccagtaaaggcaggtgttagtttgagaacttgtggaaacttagataccaaaaagttgtgtgaatctttaatattcaaaatgctttaaatgcccaatgttagacctaaggtgatatgagaatataatgtatgtccatcaagaaaaggatatatttgttgagtaaactttaaaattaggaaggtgatcatctatgatacattaacatatatctgatgatacattagctgatgatatatgctatgatatattagcatattctaattagcatatatcatcagcatatatgggaatgtcattggcatgtatttgaagcccttaatatacttttctattttgatatttttgagtcaaaggagtaaattatcccttccctacaatgttcacaattgtatgaatataggtgaagataggcgaccccagaaagtacagctgcttcagttgtactaataagtaatcatcatcctgcaagaagtatgttgtgacttctcctacaattaactatcatatagtttaatatatgtttaatattattataaaaagtagaaaaataaaatttatttagaagcaaggattagattgcaataattattatatttataatttctagcatgtttggggagtgatcatttagttacataaccaatgagctgattattaaaaacaaaaacatgccacaaaagtattagctataacttaaaaagcacttgctacatagaaggcaccacactaagccctgtaccagcaatgtctcagttagttgccagttacaaatctgtgagttaggtgctattatcacctcctgtttatgggtgagaaaaacaagagaagctaaacaatctgccccaaatgtcatggttagcttgtgttggagccaaagtgcaggggctggtctgtcactccggctagtgctcctagtcactcacattccccacaattcagatctatctctcctctgggaatgttacccattatcaactgttttcacatgtatctgtagagacagaccttttaaaatcttggtgcctaagatactaagaaaatttgaaaaggtttctacataatgtaaaagagtgaaatatagcaagtattggccaggcgcagtggctcacgcctgtaatcccaacacttcaggaggctgaggcgggcagatcacctgaggtcagtagtttaagaccagcctagccaacatggtgaaaccccgtctctactaaaaatacaaaaattagctgggcgtggtggcgggcacctgtaatgccagctactcaggaggctgaggcaggagaatcgcttgaacccgggaggcggaggttgcagtgagccgagatggcaccattgcactccagcctgggcaacaagagtgaaactccgtctcaaaaaaaaaaaaagcaagtattgggcattgtcttgtctttttgggggccactgtgggagagatagggtctcactccgtcacccaggctggagtacaatggcatggtgatagctcactccagccccaaactcctaggctcaagcaatcctcctgtctcagcctcctaagtagctgggattacaggcacccacacacccacctacaagcattgtctttataatgtgctgagtgtactgggtattttctcaaatattaatgttttgaatcctttcaacatcctttgagagagatattaatgtccccagtttaacaagagagggacacagtctccgagattaaaccagaagattggaaccgcaacatctacccacgaatcttatgttctatccataatcccatgctatttctttataaaaaatgccacctgaaaatgatacaaaaattataaaaaggggaatattgtttgcctggcagagcgcatttatcaatagtcataatctaaccatcttgttgattgtgtgagctttgtaatactaccacttggtaacatcatgaagaaaggcattatctaatctaagcaaaatttgtctcaaataataatgttttattctgcttggtcctcccaaggcatgttctctatgggatggccagcttttttgagcattacaccaaacattaaggaagaaggagcgatgaaagaggattctggaatgcaagatacaccatacaatgaggttagaccaaaattatctcatgtacagtaacgaaggaaagagatgcattggcttgtgacattaagctaaataagggggaaacaagcttacagctattttataatataacttaattagacaaaatgaaatgcaggctaaaattaagccaagattagtagataccagatttcagcgaaaatttaaactaagtcttacttctctaagatggactcaaatgtatattatcagctcttctatcagataaaatcttggctttttggtaaaggtgataagggatgctaaattttgcgaactgatcatagctttctttctaaaagcattagcaagtttatttacaaatgcaggtggacgtaaaagttcactagtttctttagaaaaccttctgttatggaaaataaccagagttatttttcattaattaaaaaaagaaactttctactgagaattacttagcaatagttctggtgaagaaaatagaactcctctcattaagtaaaatattttataagctgatttttaggtcagtattacataaatggaaaaaattatacagaaagtaaattttcagatgaattttaatacaattttacaaatggttctacaccaatttagcatatattgcaaataaacgaagtaaatataattacatatttatgttaactactttaaataatgtttaagaaccttttcttaaaacaaattgttgaaaacattccaataatatcatacatttgctttaaagcttatataactttattcagttgaaaatttattaaaccactagtatatgaaaggaattgaggtaagggctgggaaaaaaaataaggcataattcctgctctcaaagaatttaggatcttgagaaagacagagttcctacagggtggggaatggccaggcaaaaacagatgcccagtggccaaatctaggtatcatatacagttgcaatcagaaggggaacttttttttttacatggaagtgttgaaatggtgatgaatggaatgtaaataaaagctcttcatttttttttgtgctgagtcttgataggacttgaaggtgtgaaataaggttcttataggtgcatctataacacagataaaagtatggaggtcagagggtattctaataatggagtggtatatggtatggccaaggtgcaaagtcagtgacagagcattgaaagaaggggtcactgagagggaggttggtgcctgattgtggagcttcttgaaggccatgctagagtttggacagcagtttacatactggagttcccacaaaggtttaaggcactggagatctcatgatcagatttatgttttacaaagaaagattacaggagagcagcaattggagagggaaaacagactcgctcaaaactatagcaggggtcagggagtacgaagtcagtagcagtgggaatgggaagaaggagacagatctgaaggcatttcacagatttaaattagcacttttggggcacgaattaggtaacggcagtgcgggataggcaagaatccaagatgacaccacgatcccctgctgggttttaaatgccagtaacagagggaaaagtttgacaatgcaacagcttggaaaccaagtttcaggcatgagccacaaccctaatcatgtaaaatcttattttgattgggggaattgcagaatatcctggtggagcagctatacatgtgtgtggagtttctctggaagtctgagcgatatgaactcattgctgatgtcaacaagcccatcattgctgtctttgagaaacaacgagacttcaaagtatgtattccaaccccctagaagttaattaaaatatcctatgttgaattggaaaattacttacagttttcaaaattaaaaactcccttatttgtatgacagcatcatcttcatgaaactctttcacttatggtttcagaaattgtcagatctctactacgacattcatcggtcatatctgaaagtggcagaggtggtgaattcggagaagcggctgtttggtcgctactatcgtgtggcattttatgggcaggtaagttcaccagaaataacacggcccataaattctgctgagcagttgaatgttgtctttcattctttatgagacatctgtgtgtaccagtgaatggagaggtgtgggtgtgtctgactatacttgagtgtttctctggatgtgatggtctatatgtttatccataggaatgtacaaagttgggaaacaagtgagcaaagaaatccatgggttgagttaacagtgatttctaacttcttgaagaaagagggcatttatttttcaacactctcttctttccagctcaccctaaaatatctaattataagtttacgccatatattaaagtgaaattaaattgaatatgttttaagaaataacattcctaatattctaggaaataagagaattcctaggggctccaccatatcaaacctttgattttactatcacacaatttcttttctcctattttcgaactaccactgtttctagacaaaataccagatggttattttgtttcctatattgcaagtcaatgtaatttcaaagttgtttttcccagtttgctgcataagcaatgaagaagatggaaaatattacttagccacagtgttggcctgaaagtgaacatactatatattaattatgaatgtctctgagcaacattttcaatgggctaaacccaggcaccattcattttcttttcaggaaggcttataacgctattatatttcagcagacgtattttagactgttgcttgtgtggatagacatcccatgcttttattttcggaatggcagtggctctcagacctcacacttcctctgcccccagcccatcatctcgctcagtagcccaggctggagtgcagtgcagtggcgtgatctcggctcactgcaacctccgcctcctgggtcccggttcaagcaattctcctgcctcagcctcccgagtagctgggattacaggcaggtgccaccatgcccagctaatttttgtattttttagtagagacagggtttcattatgttggccaggctggtcttgaactcctgacctcatgatccacccaccttagtcttccaaaatgctgggattacaggcgtgagccaccacacccggcctcagcttcttgttcttaaggttgcagctgaaggagtcaactccagcatgttcattctaggtcaatccccattgaagtcgtttgaaaaatacatattttcctctgctcaccaaaggcagcttaaaaactaacctctgggctgggcgccatggctcacgcctgtaatccagtactttgagaggctgaggcgggcggatcacgaggtcaggagatcgagaccatcctggctaacatggtgaaaccccatctctactaaaaatacaaaaaattagccgggtgtggtggcaggcgtctgtagtcccagctactcaggagactgaggcaggagaatggcgtgaacccaggaggcagagcttgcagtgagccgagatcgcgccactgcactctagactgggtgacagagtgagactccatcaaagaaagaaaaagctaacctttgaattaataaaggcagatactttctacctggaaaagataagtatcaccaagtagccatttattataaacaaattaatccagccgggatttttctcaggacacaggaatatcaggatagtggagacagagaaacgaatggtctgaaaaatggggatctgcataaacaatctataccaaaaaaaaaagcaaatttagacatttttggggtccatggaaaagaatctgaactatctgaagtgagaacacacattgggagagagagaagtgtgagaaccttcagaagaggaagagagagaagagaaaatggcattttggagccattttggaagccatgaagaaaatatacaatttgtgacattggtgagacagcaagaaaaatggcagaaaatgctatgagtcgggaaggggatgtgggagcagaagaattgaaagggaaaaacagagtttcaagggagatggccacaggctaactgagcagcacagaagtagcacaaaagatgtgcttctgggtcaccaagacatgactctataaagcctcaggcattccttccaatgaaaaagtaaaaaaccccgttaataacctgatcatgaaaacaggattgcctaccagatggtttctgcaaccaatatatgagatatgggctctaaagcaggtagaagtgaatcacgctgcttttcaaatagtttttaatgcagatgtttactcttttcttcttttggtcttgattgttccaggctgtggtaagttctcactcactctcgctctccatttgcatgctctaacacccctcacacttccctctgtatggttttactgaaccttaacctttttgtgcaaatcaccatttggtacaaagggagagataatcctgctttcattcatttttggagtcatcctgcatttctttaactaagttgtgtttatgccagttatctgaattacaaaaatgtatcctttgtttttcatacatgctttctgcctaaaggtagatgtagtctgaaagccttacatacacaaacacacacagagataagtatgggtaccacgtatcttaaatatatgtagcatagacttggtattgtagatcgtctacttatttcaggccactatgagttgcagcttattaaggagaccagaatggtcagaattttggaagttggagtgatggttattggtaagcacctcccaagatattgaaaaaactgtgttttttctgaaggagtgtcttagagtgatgggggtctatggtggtgagctctaagcattctcagaggtgatgggactaattccaaacataaaagatgaaccagggaataaatctttacccaatatgtctgggtaagtctccagagatggagaaaggagcaaggtaagaaatttggagaacaagccatgtccaaaataacctgccagtacccagagctctatgacaaaggattttcttcatattattttgagtcatatgaaattgcctatattcaaccacttttttatgtacaaaaatggcaactttatatggttcaacctaattattgtcagttaagctggaaagagaaagcatttaatatctacacattgtccatattcagccctacttgtctgaccagtacatacttttttgtaattctttaaattccttcccacattcataccataccagcattttctatgttcatttataaatttgggattatgggcccttaactcacctactaaaagaatacttgaaaacccctgtactaaatagactgagggggggcagtggggaagtattggggggagcccttgcaaatgacctaactttattcttctttcagactcctcagtaaagtgtgctgattttacacctgattttttttttaatgctgcagtactctcacttgtctttataaaaaaattccaaggctgggcgcggtggctcacacctgtaatcccagcactttgggaggccgaggtgggcagatcacaaggtcaggagatgaagaccatcctggctaacacagtgaaaccctgtctctactaaaaatacaaaaaattagtaggacgtggtggcgagcgcctgtaatcccagctactcgggaggctgaagcaggagaatggcgtgaaccctggaggtggagcttgcagtgagccaagatcgtgccactgcactccagcctgggagacagagtgagactctgcctcaagaaaaaaaaaaaaaaaattccagtctgagcttaaaaggcaaagtgttttgttaaattctctgactgagaacctgcctaagcacgacactccataagttcaaactcagccacctttgaacaaggagaaccaatggaggtcatcctgataagcagcaaattagagcctcattcatcattgctcagatgagattcaaatgcctgtctcaagacaccacatggagagtgagaactatgggattcaacaggagcagacagcacatatcacttcacattccatgataaataaataccaagtagacttgagcattcccccgaacgtgtacagaatgaaggttccgaagatttaagataaaatcttgactacttgattagcataatctccatggtcagaaatgatttcttattcataatggtgctttatgtccctgtaaaacttaccttttaatatccaagttgacgtgtcttgcaatgatgttaaaaagattatggaaatatgatatgcaataggctctttgcctgcacaaaggcctttgggtacaattttttagtgtcccacgcagaccactgctctcattttatagttttggctggggtatttaatactaattgtgtctgtaatgagccagacactagaaaacaagtttaaaactgatcgttcatagcaggaactttaaaaaaatgcaagtcttgcacaacatgaattgtctaatgcaacacccggcatcagcatcaatatggaaatttgacatatagcagcctatacaaagtgtcctccaaagtgtccctgaggtattgatttccatagtaatgaaacagcagcagtgagcaaacatcgactataatcaatgaagtccttaggccctggtatttaacatgaaagcaagtgaatacccattacataacttaaaatatcagatgcccctggaattaattaagtaaaagacctggaagaattttattctatccaccaaaggccatagattccataatttgcagtcatgcctatatgggtgtacttgcatctcaggatcttaataaaaaaggagtttgggggaggagggaaggtgcaggcgtagtatggaaaaccatcatctccactttgggacatgatatagctctccacctataggaaagtcgctgatctaggccacatatctatactgtataattaaatgtcataattgagttcagatttatatgctaagagaagctacatgaatgcagagaaattcattcatgtagcttctcttctcttagcatttagcctagtattgacattttctggcctgtcttttgtatactagattcctcctcaaatacattcttctctttgtgaactttgaatgagtctaataaaataccaggggccctaatatttgacaacacagtgatgatccagggacattgcaagattctgaagtacctgcaaaagcatctgaggaggagtcaatgcttttagttgtcagtttattgaagtacatttttaccataatgtattgccttaaagtttcataatccatgcagtccttgtttaactagtgtgtgttctttcttgaccagagcagaagaaggtgtttactgcattgcaaaatgacattttaaaaatcaaactagcaagggaagtgcagagatcacatttcccattgccttgaaatgcagtcagcttataaccttggggctaaagcaaaagagaaactgaccctggttttcataactctgtgtccctgtttgtaaatcatttatatcatagacagagctgaaattgaagccttccttcagatagtgtctgtagctcagtgggctttgctttgatagtttccctgggtataaggtaagcatgcattccaaacattttcagagctgccatttgtctggcttcaaaactctttacagaaaccccagtggacagcagagtaaatggtttattctgctcctccatctccttcttattcattttacaaaacaggtttacatttccaagctctttagaaaaaggttccaatcaccaattgatcacttgccaaaatattgtaatgagcttcaacagaccttttataataagaaaaactcagttgcccaggcaagagaagctgaaagtatgtattttcgagcactgaaaactgagttaagctgcataaaagccagaactcaaattgctttatagatacagagatttttcatcattgttgtcatcaccaccagcgtcatgatcattaccatcctcaacatagctagcactcaccaaaggccatctgtttaccaagcgcggtccttacagcctcccagtaagtaggttgctgagtctgaattttcccatcccacagcccaaggaggagggatgaaagaaagtcacaggttatgagcaaggccgcaatacattttttttttttttagacagagtctcactgtgtcacccaggctggagtgcagtggctcgaacttggctcactgcaacctccgcctcctggattcaagcgattctcctgcctcagcctcctgagtagctgggactacaggcgtgtgtcaccatgcccagctaatttttgtatttttagagagacggggtttcactgtgttggccaggatggtctcgatctcttgtactttgtgatccgcccacctcggactcccaaagtgctgggattgcaggcgtgaaccaccgcacccagccgatgatgacaatttttacctgcctcccaccactcattttctgctcactctagattcggaaatttgtcaggggaaaaattttacagtgaaaatgtgtctttgtactagttttcacactatggtgaaaaagaaaaaatcttttcctgaaccttagagacatttttctacttgaaattgaagttgcaaatgttgcttcagctttagccccatgaggattcgcctgaaagcttcagaagccttatttctctgatgtgtcagtctgtcaattgtagccactaactcctgaccttgaatcagacaaaactccacaaagacagcaacagaaaaaaaacatagcaggctggaagtcatgtgggagtggagtcagacctcactacccctacaaagtctacaggaatgacaggagctgctttacatgctttcaacatcatatgacactttgtagcagtttggggtcaaggcatttataattacttgcattttgtcttgaacatttctcgaagaaattgttcaataaaaacatctttatttaaagccgtggactattttccagttatgcctggtacacatacgcctttttaagatgtgtgccctttaagaactctttcattcatctgcttgttcaacaaatagagtgacctcctcctaaagaccaggcattgtgctaaacactgggcatgcaatgttgaagacacatttcccacctttagaaagcccaaagtcaattagggagatgtgcaaggaagcaggtgattacctgattgccaagaattctgctatggagtagaccttgttcattggcttctgcaaaggtacagccacagcccacttagaataaaaattaccctgttaaagatgatcctatttacatgtatgaaagtgcttttgaagtataaagcatcatacagatgtgagtttaatcaatattcttatattgtctcaccatgaaaaaataatagcactggaacactttgcctatgctttttttaacaattaatatttttaaatagtcaaaactgattttttaatatgggtaagtttccttttgacatccagtgtcttcacccagacctcaaaaggcatttccttatgggtcaactctacaattagaagaaaccagatatagcctgtaatcccagcactttaggaggccgaggtgggtggatcatctgaggtcaagagtttgagaccagcctggccaacatggcgaaactccaccttaattaaaaacacaaaaattagccgggcgtggtggtacacatctgcagtcccagctacttgggaggccaaagtaggagaatcgcttgaacccaggaggcagaggttgcagtgagccaaggtcacacctctgcactccagcctgggcaacagagcaagactctgccaaaaaaaaaaaaagaaaccagatatccttgggttcttaactccgaacttaatctagtattctgaggccacatgtattccacaggaaatatgcttctgtgtctcttcaaagagaaggaattataaagattgcttcacttagttatctgcagctaatagaatcttcccttccccctgcttcaaaccagacaaataaattaatagaggctaaaacctacttgctcttgtggaataaaaatgatgatatgattgctatttttaatcctataatgtcttccttttcaagaatgtaaaagatctcttagtaaggtgaattgcatgattaagttacatataggtaagtttcaggaggtccctgaagtcatgttgatgtaaagttattttttaaatagcagtacttgggagcataacacatgtaatttctgttacgacaactacataaagtgttgtggtttttcatctaagattatgtgggatgcacgtcagcccatttaaatagctttacatgccatacaccatttcttatgttagtttcaaagacttacaggagatcttattaaaaatgatactgactgctctttgaatgctgccaaaaattgctccatatttcgtgttctaccccaagctgccacaagagggcattcttcccccaaaatatatgcaagtaggtagtaccattgagttctacaaatagagaaaataatatttgtaagatatttcatgagtttctttggcctggctaggaaatatttacattaatgtctgattataagatgatactttattttctcactgtgttttcttctccgattttgaattttatagggtgttaaccaatggattagatgacaaccaaaaactgtatatgttttttaagtaaatggctttttgttttgcttttgatttatgattagcattgtctaataaaattggtggttcattatgttccatagggcttttttgaagaagaagaaggtaaagagtatatttataaagagcctaagctgacaggtctgtccgagatttcccaaagattactcaagctctatgcagataaatttggagcagacaatgtgaagataatccaggattccaacaaggtagaggaaaatcagtattcatgcaagtgctaagaattgactgagttttttattctttaactacattaagttttcattttctgcctgacgatgcaaagtaaactacaaaaacgattttagatgttttgcttgtttgcctgttggttggtaatttgaggggaggagggtcaaaaacattatatgtgtttatttgggtaacttttaaaaagagcttagtaaattctctacgtctccattggttatttgcatttgaatagcaatcaaagcctgaaagtaattgggctcagtggtggaattggagaaaacagcaagttgaaaatatttattcagttaaggaagtcttcccaggcgtattagtcagggttctctagaggaacaggactaacagaatagatgtatatatgaaagggagtttattaaggagtattgactcacacgatcacagggtggagtcccacaataggctgtctgcaagctgaggagcaaggaaaccagttttgtgtcccaaaacatcaaaagtagggaagttgacagtgcagccttcaatctgtgactgaaggcccaagagcccctggcagatcactcgtgtaagtccaagagtccaaaagctgaagaacttggagtctgatgttagaaggcaggaggcatccagcacaggagaaagatggaggccagggtcttagccagtctaatccttccacattcctctgcctacttttatcctagctgtactggcagctgatttgatggtgccaacccagattgagggcaggtctgcctctcccagttcactgactcaaatgttaatctcctttagcgacaccctcacggacacacccaggaacaatactttgcatccttcaatccaatcaggttgacatttaatattaaccatcacactacgccatactttacattacattacattacattaacctttgaacattcagttaccttcctcttggctccagaaagcaaatacttacctcttcttttagattactcagcatcttcttacacactgtcgttcagttagccaacctctatcaaatgcctgctgaatgccaagcccagaactgagagatgaggcgcacagggtcttttccttctggagctcacagttcacatggggctaagaagagaaggacctgtgcaaacagccaattaaatagattacaataaagtgtcaccagagagtcaaagtccaagttgtacaaggaaagctcagggcagggaccttccttaacagctcattcttagttgggcagcattacatagaagggatgatgtttgagttagttttctggaagcaaagggcatgctgagaagcccagcacatgcaatgatggggaggaatgaaagagggagatatgtttagagaatggcaggtctttgaaacacagtttggatagaagagtgtggcagaagatgcagctggaaaaggtggtttgtgcccaatggcatacagttctattgggctacagaagagttctttttttttttttctgtcctcttttacaagctcaagtttggaggcatctgggcatgaaatccttgagtctgggcagaaatttctgtgaatgtgttcatcattctccttcttagctatagtcaccttccccaggaaggcaggcagctggaactactttattagtggctctcctaggtagaaagtatacacagagttcctggggcagcgtggggggatgagaaaatgccaaatttggtatcagaacaacttaagaattcattccaccatcccaccacttatcagctgatgatcttagagaaattagctggtcactcgaaacctctatttttgatgtaaaatggttacaattatacccaccttacagtgtaattagtagtagcattacaaaataaattcaggaggtccctcaaatctctgggactggataggcagtggatgggtagacagatggagaaaattggaagaagttttaaaattctttgaggtttcattagaaaagctgagaactccagctcttccaactccaagggagagcaagtgcaatttcctggattttcttagtacccccagcctgtcttccttgctatttgtcaaactcactcaccaaagcagtttgtttaaaaaaaaaaaaaaatgcatgggatgacttgttacagataagagaaggaacctgaccttaaaactataaaattttgcaatcatgtaataggcttatcagctaatctgctaaattaaacaaggaatctccctcctcggcacaagcccaaagccagtggcctcagtctagatacatgggtaaaatcatagagggaccaaaagatattttttaaaagttttcatttgaattactctcaagaagcttgcattctagggctgggtgcagtggcccttggctctaatcccagcactttgggaggccaagaggacagatctcttgaggccaggagtttgagaccagcctggccaacagagcataaccctctctctactaaaactacaaaaattagctaggtgtggtggcacatgcctgtaatctcagctactagagaagctgaggcaggaaaatcacttgaacccaggagggggaggttgcagtgagccgagatcgtgccactgcactccagcctaggagacagagcaagaccctgtctcaaaaaataataataataataatataaataaaatgaaaaataaaagaagtttgcattccagacaaaggcgattgaacattcattacagagaagagagaaaataaaagactaaataacatgccacagccaggcacatctggaagagcctcacctacttggtatgctggctctaattccacccctacagacctggctgctcagctgcagtccagcctttactctctctgtgatcctgcccagctctgaaatgatgtgactgcccatttttctccaaggggagaggcacagcctcctctggatgcaagctgagggaatgggagcttcccgctttcagagcgctccagggcacaccactcactttgcccataatctgttaacacaggtaaaccccaaggatttggaccccaaatatgcctacatccaggtgacctatgtgacgccgttctttgaggaaaaggaaatcgaagaccggaagacagatttcgaaatgcaccacaacatcaaccgctttgtcttcgagacacccttcacgctgtcgggcaagaagcacggtggggtggcggagcagtgcaagcggcggacgatcctgacaagtaggtgcaggtagccgggccacacatgtggcacctgttccagcacaggcccctttatagggctggatcagtaggaatcaagagttatttcagtcctgcagagaagtacccaacatgtgctaactgggaaatgtttgccaagaagagatttccatctctttattctccattaacagaagtcaaccagaggagaaattgtcaaaagagttgctttgcatacctattcccttaaggttgtaagtgtgaagggtgatggggtcagtgccttgggaaaggcacaaggcactctgaactttcctctctgagtctaccttcaattgtttcagggttaacagctcttatcgtgtgctttggggaaagattctaaaccactctgggattcatattcttcatctgtaaaacgaatgcagatgtcggtctccaatatccctcgatgtgctctctagatctatgctgtgagctagtcatcctttcatttcctcaacacacttttagtgaggccctgctaggggctgggcactgttctgggtactggtaatgcaaatgaaacatgattcttgccctcaaggtgctcacagtctggtaggagaaagagccaagtaaggcaagaatttcagatgagcggagcaggagaaatgaaacaagagcacccagtgggggctcctaaggctggctgcaggggaggtgagcaagggcattctggaggaaatgatcagtaacccgctttgagagctgggccatcctggaataggctacagcctatcagtagcactgatgtctaaactgtgacaagcgtctgccttcagtaaatgtatccaaaacttttgaaataaaaaagccacaacaaagctatatcaatatatactacttggtatatatttaggcattctgtattgtgggttagtgtagtttttatttgaattacaagttgctgtggaagctttaatcttttcagtgtttagaaattctaaaggctggccgggtgcggtggctcacgcctgtaatcccagcacatgggaggcagaggcgggcggatcatgaggtcaagagatcaagaccatcctggccaacatggtgaaaccccgtctctactaaaaatacaaaaattagctgagcatggtggcgcacacctgtagtcccagctactcgagaggctgaggcaggagaatcacttgaacccagaaggcggagactgcagtgagccgagatcgcgccactgcactccagcctggctacagagcgagactcatctcaaaaaaaaaaaaagatagaaagaaaaaagaaaaaaattctaaaggcctaaaacagccctgagaatgagggcctgttagcagtgaaggcagaagggcacacaggtcaaaggagcttgggcacaagctaagaggtattagagaggatggcacctagcagaaaaagtaactcccatgcatgaaaagcatgcagaatggaaggtgccatgtgccgtgaaatgatacatgatcctctggtccttcagggaaacccttgactcttcactaatcctcaaccttgaaatccctttgtatggcttttgtacagcgagtcacctgttcccctacgtgaagaagagaatacaagtaattagccaatcgagcacagaactgaatccaattgaagtggcaattgacgagatgtccaagaaggtttctgagcttaatcagctttgcacaatggaagaagtggacatgatcagactgcagctcaaactgcaaggaagtgtcagcgtgaaggtgagtaagcattgcccagggctgagatgcacatggccaatgaaaccaggtgtaaaatgccctgagaactttgtttacaaagaatataagaaacattttcccttttgtgagaatagaacacctttatctgggtctttaaaatggcttctagttgtcaatgtgcattaatgttactcaacacctgtagataggcctttcttaagtttagctgaaataaaatgtattcttcctccaccttgctatcccatcttctatggataactgtgttctatatctgtatactaacaaatgaattaactaatgaagaaacaccacattcttgtacatatctgtcattaagagccttaaaaaattgttttgaaacaaatccaaaaaagaatgattactagttcataaaaggtgcatgcatgtttatctgtctggcagagttgtgacaggaagcagatggcatgctcagtgagtgattgaggaggatagagtaaataaactgttcccaaaagtgtgtgcagcatttgggaaagccagaaagggctggcacaggggctggcagcactcaggcggtgtgaccaccctagacctgaagatgcaaggagaggagggttagtggaagcagacaggggagctgagaggtccatctgatgacagacaagtagacaggagtgacttcagctagcgatagggaggcttctgcaaggaggacgccctggggcttagtactctgaccagggccaggcaggtgaggtgagtaaggcactcaccttgggcacaaaattaaagggagctccaagcaactcaggaataaggcattaatttttatttattatattaataaattgatgctaagtatttgtaaggaataaagtattaaattttaaaataaaggaagatcagtagtggcaccctgcacagctatattggaccctaaaagccaaagaagtccagatgcagtggctcatgcctgtaatcccaacactttgggaggccgagatggatggatcacttgaagtcaagagttcgagaccagcctggccaacaaggtgaaaccccacctctactaaaaatacaaaaattagccgggcatggtggcacacgcctgtaatcccagctagttgggaggctgaggcaggataattgcttgaacctgggaggtggaggttgcagtgagctgagatcatgccattgcactccagcatcagtgacagagcaagactccatctcaaaaaataaaaaaaaaaaaaagccaaagaaaaaattaatgctactgatcctgacactgaccacactctcccgttccctacctcccttgtctgtgtccccccatgggctgagaaggccagaaagcaagagagccattgtcctatcccatacaagatgacttccctaggcacatagctgagtgaagggaagtggagatttgatctggagaagcaaaagatggtacacccagtaccagtgactgcatcggccacactggccatgcctgctggtcacaggcccctgaagtcagcttccttcttcttttacctttttccttcccaagcctgacagccacattaaaggcttctatgcactaagggatatgaactcctgcacaagtgaggccatccatgggcatgagcatgaattgaacccagcactgtgcattcattcagcaaatctgataaatgcctccttgagccagaatctaagccagaccatcaaatggaacccagtgaaacactgattctagggcagtgcccacaccactaccactgtggattatcccttcataatagtatgtgtttatttgagtgttaatagaaaagaaaaactagcacttcaaacatttgatttcacaaatgttaaatttaaataaatatattggaattaatagaagtgagtctagttttaaaagctgttaagaaaacagcagattccgtgggtggttcatgcctgtaatcccagcacttcgggaggccaagacagatggattgcttgaggccaagagttccagactagccgggacaatgtagtgagaccgccccccttcccccgtctctacaaaaactttctttaaaaaattagccaggcatggtagtaaacacctgtggtcccagctacttgagaggctgaggcgagaggattacttgagcccaatagtttgaagctgcagtgatcatgccactgcactctagcctgggcaacagagtgagaccctgtctctaacaaagaaaaaaagaaagaaaaaaatagtagttcaagcaacgtacagatatgacaaaaaaaaaaaatgtgaaggggttggcaaaggactgaaatttgggaagtttgttagtgaaaggtggagctcagactcatgctctattgacaagttggaggacagcagctaagtcaggtatacaaatgagtggactagaaggcagggtgtgagatgggggtaccacaccattggtgcacagttgctcctcttccagcggtggaaaagactccatgcagaaggtagatcatccttcaccaattttcttctcaacaggttaatgctgggccaatggcctatgcacgagcttttcttgaagaaaccaatgcaaagaagtaccctgacaaccaagtaaagcttttgaaggagatcttcaggtaagcttctcgctgttgggatgttcttccttgaacttcctgagacagggagtcctcaatcccccaagaatccatcacaccaaaactcactgaggtggcagagtccatcagcagcctgactctgaactcacagtcactgagctcaatgccacttccgagggctggtttttaatttgtttaatgctgtcgctaaaggcaatttgcagatgcatgtgggcaggcccttgacgtgaatgagcgcctcatcaaagaggaccagctggagtaccaggaagaactgaggtcccactacaaggacatgctcagcgaactctccacagtcatgaatgagcaggtgagcgctccttggtgcacacgcgctatcagtggacagaaagtccctttcgctcccaatgccagaaggacaggaaagaggcccttttcttgctgcagaaatcactgcatcagcaccatgttgctgatctgttctctctcccgtgcacaccacctcgtgccccaaagcagagatcaggctgggggaaactctgtagaaaaagattatgagaacctagatactttccacagtccaaatgaaccctgggttttctagactatgtgagtcccattaaatgctgaggaacactgggtggcattcccatgagggtttgctgccaccctccgccatccctagttgaggacctcacaaccctgaggccatgatgtggagtccacagttgagggggtctctacactatactcacgatgaaccctaagactagtcatggctgtttaccaccaagactgcctttacggaggctgggcctcctgcagatgtgcagaattcagataaaactcaaccacccaccccacaagcaagtcatccgtgacgtctgggatgtgtacagcatgttctgcaaggctgcacacaaaatgtgggcattcagtcatctcagtactttttgggtggctaaaaatcaactggttgaaagccaagtgttgcttcctggcctacttcctagaatccatacccccacactctacctggacatctcatcacccgtgctcccctccaggagttagatgtgttctctacagaaaaactgaggagcagaacttgaattagtctcccagtagtgcttcatacatggtagccacccactgaatatgcatttcctttgttttccttaaatggcctggcactgttaatacgactcacaaaccatgaagtgtgttgtatgaatctgttttttctaattgcatttcccatcttgcttcttttcggtttttccatcttcttccatcctgatttttaactctccattgtagctagagaaagaaatggttgaccgagttatattggagaaaatgaattgccgtagataggattcctcgtggaggtagtattggtttaggctatttgaggggtgacaggaattaagtactcaggagagatgacttgatagaatggggaaaatcataaatctgggagtgaaataaaaagaacaaatgatggatctgaaagttcgggaaggtggtgaaggaatgcttgtctccaactgtaaatcacatctgacctagaaactttggacaaaaatgcttttctcttttttcctggcagctctgtcgaggtccgtgtttatacagcttctgttcctctgtgtctagtatttccctcagtactgtaagcaaaagtggtatgtttttctttctttatgtctactctgtcctctgtggccttctggtgtacccctctcttcctagccattcagtctctctagtcacctccctagtagctagtgctctctaagtttttatttaattagaacaactccatttccatttcaaggtaggtcaatggggggaaaagcctcatgatttaaactgaagttaacaacacagcttttaaaatgaaaactcatactccaacttctaaagtatatttgagctgatttgtttccaaaacaaagatatgctgtacctaaaactgctaaaacaaaaatataaagacaaggactaggtgattaaggggagagaaaaatcatctcttttccaggaaacctttgctaaaagaagcaaaacttgactctatgcctcatggaaactgacacaaagaaaagaaactgatggattgcacaggccttgttatagaaatagatctataaaaagatctgtccacaggaaatatacaccttctcctggttctgaacttcaatggggatttgtcacctaggtctccatctataggaataccttcacatacctatctattcatgcacatattctgaaaacaggtacatacaaaattacaacaaaggaaaaaaattctattgaacacttaaaaatagaaacaggccaggcacggtggctcatgctgtaatcccaacaatttgggaggctgaggctggtggatcacctgaggtcaggagtgtgagaccagcttggccaacatggtgaaaccccgtcactactaaaaatacaaaaaaaaattagcctgtgtggtggcacactcctacaatcccagctactcgggaggctgaagcaggagaatcgcttgaactcaggaggcagaggttgcagtaaaccaagatcacaccactgcactccagcctgggagacaagagcaaaactgtgtcttaaaaaaaaaaaaagaaacaattagaatggatagctacacatcaaaatataaaaaggaaatagaaaaatagaattaattatgtgtaagcaaacccagatttggctgctgtctgctcaatagccgaacactagaagtgagagttgatgggaggaaaagcaggtttattcagagagccagcaaacatgaagatggtgatccagcatcctaaagtaccatcttaactcagtacacattgtaggctctttttatgttaagggcagggagaaaagaagggggttgaaatcaagaagtgtctgatgaccacagatatctgggcatgagcaaaggtctgaggaggttgcaaacttctttgtcctggtcaggtcacaatgctcctataaatctttaaaaaaacatagtctttaaaaaaacatagaagttgtctacatacttctttaatcccagggttagttttaaaaactacatgaggccgggtgcagtggctcacacctgtaatcctagcactttgggaggccgaggtgggcagattgcctgaggtcaggagttcgagaccagcctggccaacatggtgaagtcccatctctactaaaaatacaaaaattagctggctgtaatggcaggtgcctgtaatcccagctatttgggaggctgaggcaggagagttgcttgaatccaggaggcggaggttgcagtgagctgatatcatgccactgcactccaacctgggtgacaaagtgagattccgtctaaaaaaaaaactacatgattgctgttttttcagattatatcagtgctccaaagtgatcccagcctacattcaggaatgggtaaaggccccatgattaaaactaaaaaatgtagttatgttcgtccttctgctgtttcagctacatatgcaattcactccaaaagtgtctagaaaagtattagctagaggagtattttgaagacatctagttaatgaaggaaccttcagtataaggaacgagacaagacaagataaagtggatgctactgtgtaaaatggagatgttgaggtaaagtagtttgagttgtcactgaccagcaggcaataattgcttttataggtgccaaaattccatactgtttataataaatagcaaaaaacataaaagccttctttgaagccaaagtaatgcatataagcattcagtttaagcatcagtataagatgcccatttggagtctgtttcaacattcagtaagaataacagcatagtgaagtcaactgtgatgatgggtatccaatacaaaatgcagagaaaggaatggacccaatctggtgtgataccaagcataggtatactgcacctggagtctactctttgaacacatcatcagccagattattcagagctttgtgatattgatcataaggagaatttattggtagtataggatgctctcagctgagtgctctttggggcacttacagaagtagcgattctatcttggaagagtagagatgaaggtcatggcacagtgggataatgtgtgaagttagtgggaaaatcttcacaattctttgtacagaaatctcttctgtacaaaaatatattttaaaagtgtctggagtttctgttgttattatgcttacacgtcattgtttgaatcaatctgataaagtattttttaggcacactaacattattttcaagattaaaatcaggtcaagacttttttactatatttccttttatgcaaacatttaaataaaatttctaatgtttcccttttttggcagatgctgacaatataaattataaacttttagaatagaataaaatcctggaattactcagatatatttgtaagtttcatccaaacatttataaatttatgtcagatagcagaagaggattgtgaaaatattttaactttcaccaaaagttaaagctagcacgtggtcttgggggaaaattctttagatccactttaatatgtgtctttttataatttgaataaattaccctgtggggaatgaaaacctctattctgggttttaattttgtgtttgggatattaacattaacctctgcattctgttgtgttgtgtttttccctgttttaagattacgggcagggacgacctgtcaaagcgcggagtggaccaaacctgcactcgagtaattagcaaagcaactccggccctacccacggtctccatctcatctagtgctgaagtctgagggctctgcagcatcagacccacctctaagagaactttctgaatttgcagctaatctcggggaagagaaagataggtttaatttatttgaagttttcatggtgttaatatttttgtttacctcgctagcttcagaattttgccaacctctgaatttgcacattttgtataatttttttttctttgagcagtgttgatcaagccaggttgaatatttgccatgaaattccagtgaatgtgtagctcaaatgcaaaccctaagtttgctgtcagttattgtatggtcagtaccccagtcctagtacacatattttaaaggttaaagtgaatgtttttgtaacatttaagcatatttcagatgtaaataaaagattgtaaaatatacggtttttaccaaatttaaaagatcctttttagttaatactatgacagtactaaaaatatatgaataacatttcagataccattatattaaaatatttgtgtatgtgtacaaaagcgttgataaatactaatctttaaagtttgtggagttcctttatttgtaatatatgtgctcttaaaagcaatgggatgtgaaattatgaaagtattttattgttcatagaaataaaaaacacagttactttgcatttggtttcctgttgaagagtgggtgagttactgagaaaaatggttcattgaatatcttctgaatgcaaatctatactcaatacttaggatgccttgccaagaaaccaacaaaggactcaaatctcagctaagaagttcctccaaagatgaactgggtagatcagaggtttccaaatgtaggagagacttagaatgacttggggaaaatctaatgaatccgaatcttgaggtctgtggaggttctcagagagatcacaaatgttccatttctctgctctaatcttgtggtaggattgcagtttcctgcctcttttgaaggcaagcatgaccatgtgacttgctataaccactgaaatgtaggcagaagtaacatgtgttactttcaggcagaggcttcaaagccagtaagtagttcttcccagcctcttcccctgatgtacttatctttgatgtacctgaagccctgatttacttacctttgacatattgtttcagcctcagtacccaggaaactacaatgagcaagacacacacacacacactccctgctaacgctattggtcatatagtcttgagtgagaaataccattttgctgtgttacgattcaggattgtttgctaccaccatgttatgagcttatcagagcaatgaccgataggtgctgacctacgtttgggaaccactgacattttccactctctggcccacttccctcccctagtgaatactggctgccatggacccgaactgagctgcttctaggtgcagaaggcaagctagagaatctaatttcatactcaccttcagcagccattccaaagccccagacataaaaaaggagacttcagctgagctcatctttctgctatgcaaggccattggccatgtcagtacatgatggtgaggagggaggtaaggggttggaatacgtatttacattttgagtacacagaagggatagaaagatattttgggtgagaactcggatccctcaagacactttttttttttttgagacagagtctcactctgttgcccaggctggagtgcagtgcgcgatctcggctccctgcagcctccacctcccgggttcaagtgattctcctgtctcagcctcccgagtagctgggattactggcacgcaccaccatgcctggctaatttttgtatttttagtagagacggggtttcaccatgttggccaggatggtctcgatctcctgacctcgtgatctgcctgcctcagcctcccaaagtgctgggattacaggcatgagccaccacgcctggcctcaagacacatttaactattcttttctcaaatagagctcacttctttatagaaaagattgccctttgatgagctctggcccaaagcattattcccagcttcattctgcctccagttctcttggttcctgactgtctgggtcagcatctcaggtcttttcttttaatttccccatgtgtagctttaggccaccttagacattactattccaggcacccaggaagatgctgcctccaatatcatctcccacctaacttccacctgtaggctcaagtcctcttgcccatgccaatccacccatctcccatgcccccaggacacggttggcaatgggttacctccaaatctgaaaataaatcttccaaaaaaactctaaggaagtaattgaaaataatagatctttgtgcttgtgttaggtgccaaatattctatttttgcatcacaaaccacaatatctttgatcatgtcaccgttttgcccctgacactgttcatagaacaagaagtttaaatacagcttctctaaagagaatcacctaagaccactctgccttaacagcgttgaaactcaccctgcacaatcccaacaccttttatttcttcctttctctagaccagacacatcagactggctgctcagagatggaatccagcatacgtattttatctgccaaacacgtagtctttattttatttcaattaggtgtcaacagttaaatattacgagactttgtatagatttccagctttctgatatctgttgaatgctcaggccatttagcagtattggaatcgcactcccccatcacaacaacaagtgaaaattgagacactgttgctccatttacatgtgttttccagcttgcagcaataggcaccaagccctaatcagcttctatcgggcagcccctgttatttatatttcctgcctagatcccataggcatgtgtaggccccagttcaaacaaacttttattatctatctcactgtagtaatcactcatggacagaagaccacttgcttcagaatcagacaaaacacctgttcaagtgcatacttctctgtgccataagaacttctgaaatagaaccccctggagtggagtccagtacccaagcccacatgattcttagacatactgggtataaaaactccactggatcctccgctaattagctacccttaaaaaaatgactgtacggatgataaggccttgtaaaacagtgacctcatttcgaattgccaagaaaccaaattcttattttacattctttttcatctttgtataaagttaaattaatactcctcaaaacaagctcaataaaaaatggtagtaactcttcaagttccacagatggaaaggatgaaaataagacaaatggcattttcctctataatttaccctggaaaagatccaacacagaatatgtggatctaatacttgggatgtcagccctggctctgtcccctcattcattcatcatcccactcagtagctacttcttttttcattctcatttcaaagtgcaaaatgcccagactataaaaaattaacataatcccctatttttggtgacaattaccttataaatgagtgtccattatccaaacctcacatagtacatctgtattcctgtgttaacactcacttagaaaccagtacaaatggtccaaacaccatgtttccttcctaatgacagctttctgcgggatgtagtcacagggagatggagagaacattgctgggaaggcttggcttttagaaccctgaatgttggtctctctgcagaagaggtccactatgtttgcaggtggatgatttatcatcttatattagtcaaaccccagaaagccaaaaatacatatattataggatttcagtactcccatgagcagttaagaaaataataaatatttgagaacaaatgtgacaaaatgatactaaatcaaagttattatttgctcatattacaagtggcccccatatcctccacccctacacttatagcagcgaaaaactatataccatatattaaatgttatatgttaatatattttgttgagaaaatgacgaagtgcaggcatgactggccttcaagattctctgcagggagccccttgccttcctcctaatttcacaccccgtctgcttgcctatgcgtaaccttcactagagccgcaatgttctgctcactttaaaaaaaaaagaacaaaaacaaaaaaaaacaaacaaaaaaaacagtccgggcgcggtggctcacgcctgtaatcccagcactttgggaggcggaggcaggcagatcacgaggtcaggagatagagaccatcctggctaacaaggtgaaaccccgtctctactaaaattacaaaaaattagccaggcgtcgtggcgggcacttgtaatcccagctactcgggaggctgaagcaggagaatggcgtgaacccgggaggcggagtttgcagtgagccgagatctcaccactgcactccagcctgggcgacagagcgggactctgtctccaaaaaaaaaaaaaaaagttcctgtccctttctccctttactccaaccacgcaaatctaacccatacacatcaggacccagctcatatgtacagtggatgcagtgaaatcatacctagatcctccctcaggactgaggtccccgttttcccagctacttggactcccagtggctcttaactgagtccctcttgctccaggtcacatcgccagcccagcagaagctcacttcaatgactggttgaggatgagaagcacaaaggcgctcattgccccgactctaaaggccatcctggttccccagctcctactaaaaggcctcttgcaactgcttcacagttcaactcctccctctaagcaaattcccaagaagcattgggaattgctttgtaaacgtcttgcatataaatctccacctcagagtctgtcttttgaggagtgggctaagtcagtaggttttcctgaggctttgcttgtgttcctagcatgtctggattttccatcctctgcccatgactggcaagtgttgcctgcatcacccatctccctcttctcctcagttatgccatcagttatcatgtcattatctgtgttttcttccaatcctgtcatggcgtccctgaaggcagattgtgtcttcatctttgtaatcttggcagttcaacctattgacctgcccttcagagttttggagtcaaattctcaaagttctgttggatggagtcattccagagaaaatgctagggcagggaatggggagcggaggaagatggactgggggcccagacttcattgtaggaatgagtgtccttgaatctcttttataagggagtattttgacagtatcagagtttactggattttggcttcttttgagttctcagcctgagcagggttttgccactgaagtatttgatactggatatgtttacctgcaggagcaaacttaggcaaaattgttatcaacatgatctttttatttggaagtttcccaagtcctctttgctccaagctccattagattcttgtcctctcctgtcacctgctacctactcttaccttgtcacagtcctttctcagcctacacccaggcccaccttggttaaacagaaccccctccccttctcactccatgccttttttgtttccaaaggaactccaattcaaatgtcaactccaatcaaaaggaaattgtttcctcaaatactgggttgagaaggaatatgtgaggccacctccactcctgggaggtttgagcatctcatgaggtactgggcactggctttaggaatggcagcccattttccgtgtctttgccactcctgtgaaccccactcaaggctaacactaattcagctcaaattagaatgcaaatggctgattacagggaaaagagctatggtttcctgagagaaattaataccttcaaagtacaatctttaaccaaagagaatgaatttctgatttgggggatattaagttttcagatattctaccacagaacttcttctccacccataccctctcttcaccatctcactgcaagagcaatcatctcctgtatctaggcctaaagccagccctaaacatattcacttaaatctaggtggcatagtaagttacgaagaaccatacctgataatggtctgaaggctcaaatcagtatgtccttgggtcaatcacttaaactctttaaacctcatctctaagaggggagtataatagctactgaatgagttgttagaaaaaaaggcaggaggacatgtgggtactttgtagagtggtatatacatacgtcatatgatagtcctgaattgacaagttccaatcagccatccaaagctactcattctatcttcttacatcattacaaagcaactgacatcaatgagacctgatgcacagacaatattcaaggtctgagagctactgagagagctgcatgtgagtaatactaataaaagaagttttaaaatgtaagaaagtttatgtaggatcacgactttttaagcagatggagagaagtgtaaggaatgacaagagctggcatctgagaaccagtcctctgcacatccactgacccatgtcctgagccttcactagaagatccagggactacttaaagaacacagccccatcctgaccaggaggtcatctgcctgagatggagcatgacaaaaattaatcaggttttaaaaggccaatctggaaggggcttcaagataactagaagcatctggtattcacctcctccacaaagaagaatcaaaatagtgagtagataatcacactttgaatacacaatttaagacagaacagcagaattcagcagagaagtgacagcaaacatggaagacaaaggacaaggaagtgaggcagcctactctaccatctagaagcctggagaagctccctaatgtgggcaaacagtaagtgagagacccccagtgggtccacattcccaccacagacttctgcaatcctagccacaggagagccgcttgacactcaaaggccctcaggctaacataggagatacgtggatattgcttgatagcactgatccagagacggagctcacactgggtcccacacacccctagttctaagcagctacagcacatcaccattctggaaacccagccctcaccagaaggcattctgctttgggtcccaacagaccctgtatctctagacccctttggccccattgacatctcccacctgctactgctgctacaactgactgcaaactggcaagagccactgggagcaagcaccacccctgcaattccccacccagcagaggaactaccatgcatttccatgcaccttgaggtcaggctttcctgcccacagtcactactgctcccagttgccaccatcagggccaaacttctgcctagacatccaggcatttccacacatcctctgaaatctatgcagaagttcccaaacctcagttcttgactttggtgcactggcaggctcaacaccacatggaagctgtcaaggcttgaggcttgcaccctctgaagccatggcctgagctgtaacttgaccccttttagtcatgcctggagcagctgggatgcacagcaccaagtctagactgcacgcaacacatggactctgggcctagcccacaaaaccattttttcctcctaggcctccaggcctgtgataggaggggctaccatgaagacctctgacatgtcctggagacattttccccgtggtcttggtgacaatgttcggctcctcattacttatgcaaatttctgcaactggctcaaatttctcctcagaaaatgggattttcttttctattacattgtcaagctgcaaattttccaaacttttatgctctatttcccttttaaaaccgaatgcctttaacaacacccaagtcacctcttgaatgctttgcagcttagaaaattcttctgccagatatcctaaaacatctctctcaagttcaaagttccacaaatctttagggtaagagcaaaatgccaccagtctctttgctaaaacataacaagagtcacctttgctccagttcccaataagtttttcatctccatctgagactacctcagcctggaccttattgttcacatcactatcagcatttttgtcaaagccattcaacaagtctctaggaagttccaaactttcccacattttcctgtcttcttctgagtcctccaaactattccaacctctgcctgtcacccagttccaaagttgcttccacatgttcaggtatcttttcagcagtgccccactctactggtaccaatttactgtattagtccattttcatgctgctaataaagacatacctgagactgggaaatttacaaaagaaagaggtttattggactcacagtttgacgtggctggggaggcctcacaatcatggcagaaggtgaaaggcacatctcacatggcggcagacaagagaagagagagcatgtgtaggcaaactcccatttttgaaaccatcagaactcgtgagactcattcactaccacaagaacaaacagcatgggaaagactcacccccataattcaaacacctctcactgggttcctcccaggatatgtgggatttgtggcagttacaattcaagatgagatttggtggggacataagcaaaccatatcagcatgtaacaaaatatcacttgcaccccataaatatatataaatattatgtatcaattttaaaaatttaaaaagagttgattaacctgtgggcaaacaagaggatccgctatgaatatggggcagataaacaggtttgggctcagaatatgggtgattataatgttccaggtaaattgtggagatgaggaatgtcagccaaaaaaaaaaaaatctcataaaagttctaaacgcccttgtcttccccttaccccttgttattattgtaataggctgcatgtggtgggggatgggatatatgagaagattaacttgatggagagatcataagtcacaagactcaagagagacactacaatgagcacacagggttgatcttagagcaataagtagtgagagagagatcaaaactttcccatatggctcaatcaccattatttcaccaaataatttacactgttagcttctccaagtcttttggagaaggtaatggtgattgagcctgaataattaagtaaggtttataaagaatagctttaaatgacaataacatgaaggattctccagaggactctgtttgcagttttcttttttttttttttttttttttgagacagagtctcactccaggctggagtgcaatggcacaatcttggctcactgcaacctccacttcccgggttcaagcaattctcctgcctcagcctcctgagtagctgggactacaggtgcaagccaccatgcccagctaatttttgtatttttagtagagatggggtttcaccatcttggccagactggtctcgaactcctgacctcaggtgatccacccaccttggcctcccaaagtactggaattacaggcgtgagccaccacgcctggccaatattaatatactaactataacaacattgtttcttggatatatatatacatacatatatatatatacacacatacatatatatatatacacacacatacatatatatatatatacacacacatacatatatatatatatatatatatatatatattttttttttttttttttttttttttttttttgagacggagtcttgctctgtcgcccaggctggagtgcagtggcgcgatctcaactcactgcaagctccgcctcctgggttcacaccattcttctgcctcagcctccagagtagctgggactacaggtgcccaccaccacgcccagccaatttctttttgcatttttagtagagacggggtttcaccatgttaggcaagatggctacgatctcctgacctcgtgatctgcccacctcggcctcccaaagtgctgggattacaggcgtgagccaccacgcctggccttcttggatatatttctaattcataaagggtattttttaggctgatgacttttcttttttttgttttgttttgttttgtttctttgttttgtttttgtttttgagatggagtctctctctgtcacccaggctggagtacagtggcacaatctgggttcactgcaacctccacctcccggtttcaagtgattctcctgcctcagcctcccgagtagctgggactacagatgcatgccaccacgcgcagctaattttttgtatttttagtagagacagggttttacagtgttagccaggatggtctcgatctcctgaccttgtgatccgcccaccttggcctcccaaagtgctgggattacaaggcatgagccactgcgccctgccaacttttcttgaatgtcatcaaaagtagtgcaactataactactaaacctatggtgggtaaggtgttggtggtggtggtggtggtggtgctgttgttgttgttgttataaataagacagtggtacttgtaggattttttattgaacagagtggcccatggactgagaaagtaagtttgtttaataacacttgcatggaaattagtgagttcccttggattttaaggaacctgtcttctgcaatgtgacttttccctttagaagagtgattttttaaa

SEQ ID NO: 573 - DNA, 2916 bp, Homo sapiens
acaatggaactctcaaaggatccaatccttcctgccagacatcaggtctcttgtcacaatggatgcactccacttccagtcatgaaggccataagcagcacagatcacaaactttacctataattcgaggcaaaaatgcactttctaaccccaaactcttacagatgttagacaataccatgaccagcaactccaatgaaatagacatcgtgcatcatgtagacactgaggccaatatagctacggaggtttgcctcactattctggacctgttatccctcttcacacagactcatcagagacaactccaacaatgtgactgtcaaaattcattgatgaaaagggtctttgatacctacatgctctttttccaagtcaatcagtcagccacagcgctgaagcatgtgtttgcctccttgagactgtttgtatgcaagcaagcagaagtcaattgtccggtcccacttacaactcatcaaagctgtgagccagttaatagccgatgctgggattggaggctctcggtttcaacattcgcttgcaattaccaataatttcgccaatggagataagcaaatgaaaaacagcaatttcccagcagaggtgaaggacctgactaagcgtataaggactgttttgatggccacagctcagatgaaggagcacgagaaggaccccgagatgctggtggatctccagtacagcctggcaaactcctacgcaagcactcctgaactacgcaggacctggctggaaagtatggccaagattcatgccagaaacggagatttatctgaggctgccatgtgttacatccatattgctgctctcattgcagagtatctgaaaagaaagggttactggaaagtggaaaagatttgcacagcatccctgctctcggaggatacccacccctgtgatagcaactcattactaacaactcccagtggaggaagcatgttctctatgggatggccagcttttttgagcattacaccaaacattaaggaagaaggagcgatgaaagaggattctggaatgcaagatacaccatacaatgagaatatcctggtggagcagctatacatgtgtgtggagtttctctggaagtctgagcgatatgaactcattgctgatgtcaacaagcccatcattgctgtctttgagaaacaacgagacttcaaaaaattgtcagatctctactacgacattcatcggtcatatctgaaagtggcagaggtggtgaattcggagaagcggctgtttggtcgctactatcgtgtggcattttatgggcagggcttttttgaagaagaagaaggtaaagagtatatttataaagagcctaagctgacaggtctgtccgagatttcccaaagattactcaagctctatgcagataaatttggagcagacaatgtgaagataatccaggattccaacaaggtaaaccccaaggatttggaccccaaatatgcctacatccaggtgacctatgtgacgccgttctttgaggaaaaggaaatcgaagaccggaagacagatttcgaaatgcaccacaacatcaaccgctttgtcttcgagacacccttcacgctgtcgggcaagaagcacggtggggtggcggagcagtgcaagcggcggacgatcctgacaacgagtcacctgttcccctacgtgaagaagagaatacaagtaattagccaatcgagcacagaactgaatccaattgaagtggcaattgacgagatgtccaagaaggtttctgagcttaatcagctttgcacaatggaagaagtggacatgatcagactgcagctcaaactgcaaggaagtgtcagcgtgaaggttaatgctgggccaatggcctatgcacgagcttttcttgaagaaaccaatgcaaagaagtaccctgacaaccaagtaaagcttttgaaggagatcttcaggcaatttgcagatgcatgtgggcaggcccttgacgtgaatgagcgcctcatcaaagaggaccagctggagtaccaggaagaactgaggtcccactacaaggacatgctcagcgaactctccacagtcatgaatgagcagctctgtcgaggtccgtgtttatacagcttctgttcctctgtgtctagtatttccctcagtactgtaagcaaaagtgattacgggcagggacgacctgtcaaagcgcggagtggaccaaacctgcactcgagtaattagcaaagcaactccggccctacccacggtctccatctcatctagtgctgaagtctgagggctctgcagcatcagacccacctctaagagaactttctgaatttgcagctaatctcggggaagagaaagataggtttaatttatttgaagttttcatggtgttaatatttttgtttacctcgctagcttcagaattttgccaacctctgaatttgcacattttgtataatttttttttctttgagcagtgttgatcaagccaggttgaatatttgccatgaaattccagtgaatgtgtagctcaaatgcaaaccctaagtttgctgtcagttattgtatggtcagtaccccagtcctagtacacatattttaaaggttaaagtgaatgtttttgtaacatttaagcatatttcagatgtaaataaaagattgtaaaatatacggtttttaccaaatttaaaagatcctttttagttaatactatgacagtactaaaaatatatgaataacatttcagataccattatattaaaatatttgtgtatgtgtacaaaagcgttgataaatactaatctttaaagtttgtggagttcctttatttgtaatatatgtgctcttaaaagcaatgggatgtgaaattatgaaagtattttattgttcatagaaataaaaaacacagttactttgcatttg

SEQ ID NO: 574 - protein, 545 aa, Homo sapiens
MKNSNFPAEVKDLTKRIRTVLMATAQMKEHEKDPEMLVDLQYSLANSYASTPELRRTWLESMAKIHARNGDLSEAAMCYIHIAALIAEYLKRKGYWKVEKICTASLLSEDTHPCDSNSLLTTPSGGSMFSMGWPAFLSITPNIKEEGAMKEDSGMQDTPYNENILVEQLYMCVEFLWKSYELIADVNKPIIAVFEKQRDFKKLSDLYYDIHRSYLKVAEVVNSEKRLFGRYYRVAFYGQGFFEEEEGKEYIYKEPKLTGLSEISQRLLKLYADKFGADNVKIIQDSNKVNPKDLDPKYAYIQVTYVTPFFEEKEIEDRKTDFEMHHNINRFVFETPFTLSGKKHGGVAEQCKRRTILTTSHLFPYVKKRIQVISQSSTELNPIEVAIDEMSKKVSELNQLCTMEEVDMIRLQLKLQGSVSVKVNAGPMAYARAFLEETNAKKYPDNQVKLLKEIFRQFADACGQALDVNERLIKEDQLEYQEELRSHYKDMLSELSTVMNEQLCRGPCKFCSSVSSISLSTVSKSDYGQGRPVKARSGPNLHSSN

SEQ ID NO: 575 - DNA, 2840 bp, Homo sapiens
acaatggaactctcaaaggatccaatccttcctgccagacatcaggtctcttgtcacaatggatgcactccacttccagtcatgaaggccataagcagcacagatcacaaactttacctataattcgaggcaaaaatgcactttctaaccccaaactcttacagatgttagacaataccatgaccagcaactccaatgaaatagacatcgtgcatcatgtagacactgaggccaatatagctacggaggtttgcctcactattctggacctgttatccctcttcacacagactcatcagagacaactccaacaatgtgactgtcaaaattcattgatgaaaagggtctttgatacctacatgctctttttccaagtcaatcagtcagccacagcgctgaagcatgtgtttgcctccttgagactgtttgtatgcaagcaagcagaagtcaattgtccggtcccacttacaactcatcaaagctgtgagccagttaatagccgatgctgggattggaggctctcggtttcaacattcgcttgcaattaccaataatttcgccaatggagataagcaaatgaaaaacagcaatttcccagcagaggtgaaggacctgactaagcgtataaggactgttttgatggccacagctcagatgaaggagcacgagaaggaccccgagatgctggtggatctccagtacagcctggcaaactcctacgcaagcactcctgaactacgcaggacctggctggaaagtatggccaagattcatgccagaaacggagatttatctgaggctgccatgtgttacatccatattgctgctctcattgcagagtatctgaaaagaaagggttactggaaagtggaaaagatttgcacagcatccctgctctcggaggatacccacccctgtgatagcaactcattactaacaactcccagtggaggaagcatgttctctatgggatggccagcttttttgagcattacaccaaacattaaggaagaaggagcgatgaaagaggattctggaatgcaagatacaccatacaatgagaatatcctggtggagcagctatacatgtgtgtggagtttctctggaagtctgagcgatatgaactcattgctgatgtcaacaagcccatcattgctgtctttgagaaacaacgagacttcaaaaaattgtcagatctctactacgacattcatcggtcatatctgaaagtggcagaggtggtgaattcggagaagcggctgtttggtcgctactatcgtgtggcattttatgggcagggcttttttgaagaagaagaaggtaaagagtatatttataaagagcctaagctgacaggtctgtccgagatttcccaaagattactcaagctctatgcagataaatttggagcagacaatgtgaagataatccaggattccaacaaggtaaaccccaaggatttggaccccaaatatgcctacatccaggtgacctatgtgacgccgttctttgaggaaaaggaaatcgaagaccggaagacagatttcgaaatgcaccacaacatcaaccgctttgtcttcgagacacccttcacgctgtcgggcaagaagcacggtggggtggcggagcagtgcaagcggcggacgatcctgacaacgagtcacctgttcccctacgtgaagaagagaatacaagtaattagccaatcgagcacagaactgaatccaattgaagtggcaattgacgagatgtccaagaaggtttctgagcttaatcagctttgcacaatggaagaagtggacatgatcagactgcagctcaaactgcaaggaagtgtcagcgtgaaggttaatgctgggccaatggcctatgcacgagcttttcttgaagaaaccaatgcaaagaagtaccctgacaaccaagtaaagcttttgaaggagatcttcaggcaatttgcagatgcatgtgggcaggcccttgacgtgaatgagcgcctcatcaaagaggaccagctggagtaccaggaagaactgaggtcccactacaaggacatgctcagcgaactctccacagtcatgaatgagcagattacgggcagggacgacctgtcaaagcgcggagtggaccaaacctgcactcgagtaattagcaaagcaactccggccctacccacggtctccatctcatctagtgctgaagtctgagggctctgcagcatcagacccacctctaagagaactttctgaatttgcagctaatctcggggaagagaaagataggtttaatttatttgaagttttcatggtgttaatatttttgtttacctcgctagcttcagaattttgccaacctctgaatttgcacattttgtataatttttttttctttgagcagtgttgatcaagccaggttgaatatttgccatgaaattccagtgaatgtgtagctcaaatgcaaaccctaagtttgctgtcagttattgtatggtcagtaccccagtcctagtacacatattttaaaggttaaagtgaatgtttttgtaacatttaagcatatttcagatgtaaataaaagattgtaaaatatacggtttttaccaaatttaaaagatcctttttagttaatactatgacagtactaaaaatatatgaataacatttcagataccattatattaaaatatttgtgtatgtgtacaaaagcgttgataaatactaatctttaaagtttgtggagttcctttatttgtaatatatgtgctcttaaaagcaatgggatgtgaaattatgaaagtattttattgttcatagaaataaaaaacacagttactttgcatttg

SEQ ID NO: 576 - protein, 540 aa, Homo sapiens
MKNSNFPAEVKDLTKRIRTVLMATAQMKEHEKDPEMLVDLQYSLANSYASTPELRRTWLESMAKIHARNGDLSEAAMCYIHIAALIAEYLKRKGYWKVEKICTASLLSEDTHPCDSNSLLTTPSGGSMFSMGWPAFLSITPNIKEEGAMKEDSGMQDTPYNENILVEQLYMCVEFLWKSYELIADVNKPIIAVFEKQRDFKKLSDLYYDIHRSYLKVAEVVNSEKRLFGRYYRVAFYGQGFFEEEEGKEYIYKEPKLTGLSEISQRLLKLYADKFGADNVKIIQDSNKVNPKDLDPKYAYIQVTYVTPFFEEKEIEDRKTDFEMHHNINRFVFETPFTLSGKKHGGVAEQCKRRTILTTSHLFPYVKKRIQVISQSSTELNPIEVAIDEMSKKVSELNQLCTMEEVDMIRLQLKLQGSVSVKVNAGPMAYARAFLEETNAKKYPDNQVKLLKEIFRQFADACGQALDVNERLIKEDQLEYQEELRSHYKDMLSELSTVMNEQITGRDDLSKRGVDQTCTRVISKATPALPTVSISSSAEV

SEQ ID NO: 577 - DNA, 6863 bp, Homo sapiens
cgcgcgcccgggggagcgcagagtttggaaagtcttcgagaagcttcagaggagggaagggggtgggaagagtgggggtgcaagagagaaaaacccgcctcttgcgagttgagcgaggaagaggggggggaaggctccgagttccgcttcctgaacggcgggtggatagagaaggttggcacggggaagaccggcgggaggcgcgccccgggcccgcggcgcgattggcgtgaccggcgatggccggtgagcggacccgcaggttcacccggagcctgttgagacctgggcaggcggccgagctccggcacagcgccgcgtccgccgccgcggtggcagtcagcagccggcagcagcagcggcaagaaaagcctaggcttctcgagcctttggattatgagactgtcattgaagaacttgaaaagacctaccggaatgatcctcttcaagatctcttgttcttccccagtgatgacttttcagcagccacagtttcctgggatatccgcacgttgtactcaacagtacctgaagatgcagagcacaaggcagaaaatttactggttaaggaggcttgtaaattttatagttcccagtggcatgtggtaaactacaaatatgaacaatattctggagacattcgacagctaccccgagcagaatacaaaccagagaagcttccttcacattcctttgagattgaccatgaagatgctgataaggatgaagataccacttcccactcgtcttccaaggggggtggaggagcgggaggaactggtgttttcaagtccggctggctctacaaggggaattttaacagcaccgtgaacaacaccgttactgttcggtcattcaaaaagcgctacttccagctgactcagttaccagataactcctacattatgaacttttacaaagatgagaaaatatccaaagaacccaaaggatgcatctttttggattcctgtacaggagtggtgcagaataacagactaagaaaatatgcctttgaattgaaaatgaatgatctgacctattttgtgctggcagctgaaacagagtcagatatggatgaatggatccacaccctcaaccgcattctgcaaatcagtcctgaggggcccctccaagggaggaggagcacagagctcactgatctgggtctggattcgctggataattctgtaacttgtgaatgcacgccagaggaaacagattcttcagagaacaacctacacgcagactttgcaaagtacctcacagaaacagaagatactgtaaaaacaactcgaaacatggagaggctaaatctgttctctctagatccagacatagataccttgaaacttcaaaaaaaagatctcttggaacctgagtctgtgatcaaaccatttgaagaaaaagctgccaagagaatcatgatcatctgtaaagccctcaactcaaatcttcagggatgtgttacggagaatgaaaatgatccgataacgaatattgagcctttttttgtgagtgtggcactttatgacctcagagacagcaggaagatttctgctgattttcatgtggatctaaaccatgctgctgtcagacagatgctcttgggggcttctgtggctttggaaaatggcaacatcgacaccatcactccaagacaatcagaagaacctcacatcaagggacttccagaggaatggctaaaatttccaaagcaggctgtattttctgtaagcaatccacattctgaaattgttttggtggccaaaatcgaaaaagtcttgatgggaaacattgcaagtggtgccgaaccttatattaagaacccagactccaacaagtatgcacaaaagatactaaaatccaacagacaattctgcagcaaattgggaaaataccgtatgccttttgcttgggcagtaagatcagtatttaaggacaaccagggaaatgtggacagagactcaagattttcaccattgtttagacaagaaagtagcaagatttcaactgaggacctagttaaactagtatcagattatagaagggtaacatcgtcctttatccctgtcaagcctttcaacatgatggctcaaacagaacccacagtggaggtggaagaatttgtttacgattcaacaaagtattgtcggccttacagagtatataaaaatcaaatttatatttaccccaaacacctcaagtatgatagccagaaatgcttcaacaaggcacggaatataactgtgtgcattgaattcaaaaattcagatgaagaaagtgccaagcccctgaagtgtatttatggaaaacctggagggcccctcttcacctcagccgcctacacagcagttctgcaccactctcagaatccggatttctcagatgaggtgaaaattgagctaccaacacaactccatgagaaacaccatattttgttttctttttatcacgtcacctgtgacatcaatgcaaaagctaatgccaaaaagaaggaggctctggaaacgtcagttggatatgcttggcttcctctgatgaaacacgatcagatagcttctcaagagtacaacatcccaatagcaacaagtctgcctcctaattatttaagctttcaagattctgcaagtggaaagcatggtgggagtgacattaaatgggttgatggtggcaaaccacttttcaaagtgtcgacatttgttgtatcaacagtaaatactcagcatgcaatcatgagttttctgcctataattttgaatcagctcttcaaagttctggtacagaatgaggaagatgaaataactacaactgtcaccagggttctgaccgacattgtggccaagtgccatgaggagcagctggatcattctgtccagtcatatattaagttcgtgttcaagaccagggcatgcaaggagaggactgtacatgaggaactggctaaaaatgtgactggtcttttgaaatcaaatgactcaacaacagtaaagcatgtcctaaagcattcctggttcttctttgcaattatcctaaaatcgatggcacagcacttgattgacacaaataaaatccagcttccccggcctcagagatttcctgaatcttaccaaaatgaattggacaatcttgtcatggtcctatccgaccatgtgatttggaaatacaaggatgcacttgaagaaacaagaagggcaaaccacagcgttgccagatttctcaagcgctgctttacatttatggaccgagggtatgtgtttaagatggtcaacaattacatcagcatgttctcctccggtgaccttaagaccttgtgccagtataaatttgattttcttcaagaagtatgtcaacatgaacactttatccctttgtgtctgcccatagaatattcagtcacaaatgaattttgtcgcaaacacttcttaatcggaattctgctccgagaagttggctttgccctgcaggaagaccaagatgtcagacacttagctttagctgtcctaaaaaatctaatggctaagcattcatttgatgatcgatacagagagccaagaaagcaggcccagatagcaagtttatacatgcccctgtacggcatgctcctggacaatatgccaaggatttatctgaaggacctgtatccttttactgtcaatacatctaatcaggtacgtatttctacagtaaaccatgctgactccagagcatctttagcaagtcttgactccaatccaagtaccaatgagaagagcagtgagaagacggacaactgtgaaaagtcaactcttcgatttgacaagttagatcaagcagaaaccaggagtctcctgatgtgttttcttcacattatgaaaacgatttcgtacgagactctgattgcctactggcagagagctcccagcccagaggtgtccgacttcttcagcatcttggacgtttgtcttcaaaatttcagatacctaggaaaacgcaacataataagaaaaattgctgctgcatttaaatttgtgcagtccacccagaacaatggaactctcaaaggatccaatccttcctgccagacatcaggtctcttgtcacaatggatgcactccacttccagtcatgaaggccataagcagcacagatcacaaactttacctataattcgaggcaaaaatgcactttctaaccccaaactcttacagatgttagacaataccatgaccagcaactccaatgaaatagacatcgtgcatcatgtagacactgaggccaatatagctacggaggtttgcctcactattctggacctgttatccctcttcacacagactcatcagagacaactccaacaatgtgactgtcaaaattcattgatgaaaagggtctttgatacctacatgctctttttccaagtcaatcagtcagccacagcgctgaagcatgtgtttgcctccttgagactgtttgtatgcaagcaagcagaagtcaattgtccggtcccacttacaactcatcaaagctgtgagccagttaatagccgatgctgggattggaggctctcggtttcaacattcgcttgcaattaccaataatttcgccaatggagataagcaaatgaaaaacagcaatttcccagcagaggtgaaggacctgactaagcgtataaggactgttttgatggccacagctcagatgaaggagcacgagaaggaccccgagatgctggtggatctccagtacagcctggcaaactcctacgcaagcactcctgaactacgcaggacctggctggaaagtatggccaagattcatgccagaaacggagatttatctgaggctgccatgtgttacatccatattgctgctctcattgcagagtatctgaaaagaaagggttactggaaagtggaaaagatttgcacagcatccctgctctcggaggatacccacccctgtgatagcaactcattactaacaactcccagtggaggaagcatgttctctatgggatggccagcttttttgagcattacaccaaacattaaggaagaaggagcgatgaaagaggattctggaatgcaagatacaccatacaatgagaatatcctggtggagcagctatacatgtgtgtggagtttctctggaagtctgagcgatatgaactcattgctgatgtcaacaagcccatcattgctgtctttgagaaacaacgagacttcaaaaaattgtcagatctctactacgacattcatcggtcatatctgaaagtggcagaggtggtgaattcggagaagcggctgtttggtcgctactatcgtgtggcattttatgggcagggcttttttgaagaagaagaaggtaaagagtatatttataaagagcctaagctgacaggtctgtccgagatttcccaaagattactcaagctctatgcagataaatttggagcagacaatgtgaagataatccaggattccaacaaggtaaaccccaaggatttggaccccaaatatgcctacatccaggtgacctatgtgacgccgttctttgaggaaaaggaaatcgaagaccggaagacagatttcgaaatgcaccacaacatcaaccgctttgtcttcgagacacccttcacgctgtcgggcaagaagcacggtggggtggcggagcagtgcaagcggcggacgatcctgacaacgagtcacctgttcccctacgtgaagaagagaatacaagtaattagccaatcgagcacagaactgaatccaattgaagtggcaattgacgagatgtccaagaaggtttctgagcttaatcagctttgcacaatggaagaagtggacatgatcagactgcagctcaaactgcaaggaagtgtcagcgtgaaggttaatgctgggccaatggcctatgcacgagcttttcttgaagaaaccaatgcaaagaagtaccctgacaaccaagtaaagcttttgaaggagatcttcaggcaatttgcagatgcatgtgggcaggcccttgacgtgaatgagcgcctcatcaaagaggaccagctggagtaccaggaagaactgaggtcccactacaaggacatgctcagcgaactctccacagtcatgaatgagcagattacgggcagggacgacctgtcaaagcgcggagtggaccaaacctgcactcgagtaattagcaaagcaactccggccctacccacggtctccatctcatctagtgctgaagtctgagggctctgcagcatcagacccacctctaagagaactttctgaatttgcagctaatctcggggaagagaaagataggtttaatttatttgaagttttcatggtgttaatatttttgtttacctcgctagcttcagaattttgccaacctctgaatttgcacattttgtataatttttttttctttgagcagtgttgatcaagccaggttgaatatttgccatgaaattccagtgaatgtgtagctcaaatgcaaaccctaagtttgctgtcagttattgtatggtcagtaccccagtcctagtacacatattttaaaggttaaagtgaatgtttttgtaacatttaagcatatttcagatgtaaataaaagattgtaaaatatacggtttttaccaaatttaaaagatcctttttagttaatactatgacagtactaaaaatatatgaataacatttcagataccattatattaaaatatttgtgtatgtgtacaaaagcgttgataaatactaatctttaaagtttgtggagttcctttatttgtaatatatgtgctcttaaaagcaatgggatgtgaaattatgaaagtattttattgttcatagaaataaaaaacacagttactttgcatttg

SEQ ID NO: 578 - protein, 1435 aa, Homo sapiens
MAGERTRRFTRSLLRPGQAAELRHSAASAAAVAVSSRQQQRQEKPRLLEPLDYETVIEELEKYNDPLQDLLFFPSDDFSAATVSWDIRTKTVPEDAEHKAENLLVKEACKFYSSQWHVVNYKYEQYSGDIRQLPRAEYKPEKLPSHSFEIDHEDADKDEDTTSHSSSKGGGGAGGTGVFKSGWLYKGNFNSTVNNTVTVRSFKKRYFQLTQLPDNSYIMNFYKDEKISKEPKGCIFLDSCTGVVQNNRLRKYAFELKMNDLTYFVLAAETESDMDEWIHTLNRILQISPEGPLQGRRSTELTDLGLDSLDNSVTCECTPEETDSSENNLHADFAKYLTETEDTVKTTRNMERLNLFSLDPDIDTLKLQKKDLLEPESVIKPFEEKAAKRIMIICKALNSNLQGCVTENENDPITNIEPFFVSVYDLRDSRKISADFHVDLNHAAVRQMLLGASVENGNIDTITPRQSEEPHIKGLPEEWLKFPKQAVFSVSNPHSEIVLVAKIEKVLMGNIASGAEPYIKNPDSNKYAQKILKSNRQFCSKLGKYRMPFAWAVRSVFKDNQGNVDRDSRFSPLFRQESSKISTEDLVKLVSDYRRVTSSFIPVKPFNMMAQTEPTVEVEEFVYDSTKYCRPYRVYKNQIYIYPKHLKYDSQKCFNKARNITVCIEFKNSDEESAKPLKCIYGKPGGPLFTSAAYTAVLHHSQNPDFSDEVKIELPTQLHEKHHILFSFYHVTCDINAKANAKKKEALETSVGYAWLPLMKHDQIASQEYNIPIATSLPPNYLSFQDSASGKHGGSDIKWVDGGKPLFKVSTFVVSTVNTQHAIMSFLPIILNQLFKVLVQNEEDEITTTVTRVLTDIVAKCHEEQLDHSVQSYIKFVFKTRACKERTVHEELAKNVTGLLKSNDSTTVKHVLKHSWFFFAIILKSMAQHLIDTNKIQLPRPQRFPESYQNELDNLVMVLSDHVIWKYKDALEETRRANHSVARFLKRCFTFMDRGYVFKMVNNYISMFSSGDLKTLCQYKFDFLQEVCQHEHFIPLCLPIEYSVTNEFCRKHFLIGILLREVGFALQEDQDVRHLAVLKNLMAKHSFDDRYREPRKQAQIASLYMPLYGMLLDNMPRIYLKDLYPFTVNTSNQVRISTVNHADSRASLASLDSNPSTNEKSSEKTDNCEKSTLRFDKLDQAETRSLLMCFLHIMKTISYETLIAYWQRAPSPEVSDFFSILDVCLQNFRYLGKRNIIRKIAAAFKFVQSTQNNGTLKGSNPSCQTSGLLSQWMHSTSSHEGHKQHRSQTLPIIRGKNALSNPKLLQMLDNTMTSNSNEIDIVHHVDTEANIATEVCLTILDLLSLFTQTHQRQLQQCDCQNSLMKRVFDTYMLFFQVNQSATALKHVFASLRLFVCKQAEVNCPVPLTTHQSCEPVNSRCWDWRLSVSTFACNYQ

SEQ ID NO: 579 - DNA, 4008 bp, Homo sapiens
cgcgcgcccgggggagcgcagagtttggaaagtcttcgagaagcttcagaggagggaagggggtgggaagagtgggggtgcaagagagaaaaacccgcctcttgcgagttgagcgaggaagaggggggggaaggctccgagttccgcttcctgaacggcgggtggatagagaaggttggcacggggaagaccggcgggaggcgcgccccgggcccgcggcgcgattggcgtgaccggcgatggccggtgagcggacccgcaggttcacccggagcctgttgagacctgggcaggcggccgagctccggcacagcgccgcgtccgccgccgcggtggcagtcagcagccggcagcagcagcggcaagaaaagcctaggcttctcgagcctttggattatgagactgtcattgaagaacttgaaaagacctaccggaatgatcctcttcaagatctcttgttcttccccagtgatgacttttcagcagccacagtttcctgggatatccgcacgttgtactcaacagtacctgaagatgcagagcacaaggcagaaaatttactggttaaggaggcttgtaaattttatagttcccagtggcatgtggtaaactacaaatatgaacaatattctggagacattcgacagctaccccgagcagaatacaaaccagagaagcttccttcacattcctttgagattgaccatgaagatgctgataaggatgaagataccacttcccactcgtcttccaaggggggtggaggagcgggaggaactggtgttttcaagtccggctggctctacaaggggaattttaacagcaccgtgaacaacaccgttactgttcggtcattcaaaaagcgctacttccagctgactcagttaccagataactcctacattatgaacttttacaaagatgagaaaatatccaaagaacccaaaggatgcatctttttggattcctgtacaggagtggtgcagaataacagactaagaaaatatgcctttgaattgaaaatgaatgatctgacctattttgtgctggcagctgaaacagagtcagatatggatgaatggatccacaccctcaaccgcattctgcaaatcagtcctgaggggcccctccaagggaggaggagcacagagctcactgatctgggtctggattcgctggataattctgtaacttgtgaatgcacgccagaggaaacagattcttcagagaacaacctacacgcagactttgcaaagtacctcacagaaacagaagatactgtaaaaacaactcgaaacatggagaggctaaatctgttctctctagatccagacatagataccttgaaacttcaaaaaaaagatctcttggaacctgagtctgtgatcaaaccatttgaagaaaaagctgccaagagaatcatgatcatctgtaaagccctcaactcaaatcttcagggatgtgttacggagaatgaaaatgatccgataacgaatattgagcctttttttgtgagtgtggcactttatgacctcagagacagcaggaagatttctgctgattttcatgtggatctaaaccatgctgctgtcagacagatgctcttgggggcttctgtggctttggaaaatggcaacatcgacaccatcactccaagacaatcagaagaacctcacatcaagggacttccagaggaatggctaaaatttccaaagcaggctgtattttctgtaagcaatccacattctgaaattgttttggtggccaaaatcgaaaaagtcttgatgggaaacattgcaagtggtgccgaaccttatattaagaacccagactccaacaagtatgcacaaaagatactaaaatccaacagacaattctgcagcaaattgggaaaataccgtatgccttttgcttgggcagtaaggtatgttgacagttgcagccaacagactagaaatacatttaatggtggcattggaagcttcagttttgaacgtttttgtgttgcctattatttttaatgtgtctacacctagaaaatcctaatatggtcatcttcataaacatcttgagcttctctgagacatacatttcacaagacagtttagcaatacagtttataatagagggccgtgacacatgtaccctgcatgcatgaccagatatgctatgggttcttggtagatatcaaatcaatgtcataaattgtttattatgtatatttgacttaacaaacctttgacattatgtcagtcctgagagtctggtgtgcctaaaattcagatagatgcactgtaatttcttatgcagctgtttgttttcatttatgcgtagagctcaggtctatatatggacgtccaaatgaaaccatcaaaccaatcatttaaactcattttgattttgatactgtttagcccagccaaatttatcagtaccagttgcctctgaaagaaagtctgagttctgtggacatagatggacacatcattcacttggatgcatgacctcttcatgaagaaccataattgcttttcagaactgtttaatcatcaattatgattgtcctcatcaatctctttacatctttattagtgtaagaatttcttaagtgaggaagagcctggcatagactcataaggctaaaaggtcatcaatgtacacactgaatgaactaagaaaggttagagctaccagccgggcatggtagctcacgcctgtaatcccagcactttgggaggccaagacaggcggatcccgaggtcaggagttcgagaccagcttggccaacatggtgaagctctgtctctactaaaaatacaaaaattagccaggtgtggtggcaaataagacagcccatcaagtattcatttgaactttgctgacattatctcaatgtatccaactttagcatccagaaggaagagagaacctgttaattatgccatttttaagtctcacagttcccagtgatgtatattcagagtaaactcaccaatatttgtcataattttgaggttgttatttaaagttggagatgagtaggtgtaggaaggagaaatgtggaagtttgggcagcagtaaatcaagatagattcatgcagtctccaggaattcgtttgccctaaggcagcgtcatagcaagggagggagagtccaggcctgggagtctaataaacgttgcagatcaggccactacttactgtgacttggaacaagtttcttctccatgtctctgggtccccagctataaattgaagctgacaatacctgtgttatgagcagtatgtgcaatctcaagtgcacaagcatttggcgtaaaatagatcatgaatagtactttatcctcccttttctatctctttctataggaacaactaatgccaggacattctgcatgaaaaagatggtatttagatttgcagaaccctttataatgaatttgtttttatttctcataagctttaagacaaaggttaactaattataattcactgattaaacatttttggtattgttaagcattctcagttccctccagaaaacctactggggcaagtagaggcaagatgtctgttgtgaaatattccagtataacaaaattacaatagtgcacacatttttcactttaaggatccaacattgctctgaggttttagaaacaggcattttagaaccagacagagctgagctcaaaatatcctaactctggccaggcatggtggggcatgcctataatcccaatactttaggaggccaaggtctcctggaggttcacttaaggtcaggaattctagaccagcctgggcaacatagtgagacccaatctctaaaaacaacttttaaaaaattaaccaagggtggtagcatacacctgtagtcctagctactcaggaggctgagatgggagtatcagaatcatcagagatgagcccagaagctggaagttgcaatgaactatgatagcaccactgcactccagcctgggcaacagagtgagaccctgtctct

SEQ ID NO: 580 - protein, 585 aa, Homo sapiens
MAGERTRRFTRSLLRPGQAAELRHSAASAAAVAVSSRQQQRQEKPRLLEPLDYETVIEELEKYNDPLQDLLFFPSDDFSAATVSWDIRTKTVPEDAEHKAENLLVKEACKFYSSQWHVVNYKYEQYSGDIRQLPRAEYKPEKLPSHSFEIDHEDADKDEDTTSHSSSKGGGGAGGTGVFKSGWLYKGNFNSTVNNTVTVRSFKKRYFQLTQLPDNSYIMNFYKDEKISKEPKGCIFLDSCTGVVQNNRLRKYAFELKMNDLTYFVLAAETESDMDEWIHTLNRILQISPEGPLQGRRSTELTDLGLDSLDNSVTCECTPEETDSSENNLHADFAKYLTETEDTVKTTRNMERLNLFSLDPDIDTLKLQKKDLLEPESVIKPFEEKAAKRIMIICKALNSNLQGCVTENENDPITNIEPFFVSVYDLRDSRKISADFHVDLNHAAVRQMLLGASVENGNIDTITPRQSEEPHIKGLPEEWLKFPKQAVFSVSNPHSEIVLVAKIEKVLMGNIASGAEPYIKNPDSNKYAQKILKSNRQFCSKLGKYRMPFAWAVRYVDSCSQQTRNTFNGGIGSFSFERFCVAYYF

SEQ ID NO: 581 - DNA, 2552 bp, Homo sapiens
tttccttcagcgttctttcaagggcctgctgacctctgtggatcattctgttacgaagtcctaaaatgctgtaaccacaggtcacggtcaactcagacagaagcctcagcccttctgtactttttcatgaggaagaattttgaatttaacaagcagaagtcaattgtccggtcccacttacaactcatcaaagctgtgagccagttaatagccgatgctgggattggaggctctcggtttcaacattcgcttgcaattaccaataatttcgccaatggagataagcaaatgaaaaacagcaatttcccagcagaggtgaaggacctgactaagcgtataaggactgttttgatggccacagctcagatgaaggagcacgagaaggaccccgagatgctggtggatctccagtacagcctggcaaactcctacgcaagcactcctgaactacgcaggacctggctggaaagtatggccaagattcatgccagaaacggagatttatctgaggctgccatgtgttacatccatattgctgctctcattgcagagtatctgaaaagaaagggttactggaaagtggaaaagatttgcacagcatccctgctctcggaggatacccacccctgtgatagcaactcattactaacaactcccagtggaggaagcatgttctctatgggatggccagcttttttgagcattacaccaaacattaaggaagaaggagcgatgaaagaggattctggaatgcaagatacaccatacaatgagaatatcctggtggagcagctatacatgtgtgtggagtttctctggaagtctgagcgatatgaactcattgctgatgtcaacaagcccatcattgctgtctttgagaaacaacgagacttcaaaaaattgtcagatctctactacgacattcatcggtcatatctgaaagtggcagaggtggtgaattcggagaagcggctgtttggtcgctactatcgtgtggcattttatgggcagggcttttttgaagaagaagaaggtaaagagtatatttataaagagcctaagctgacaggtctgtccgagatttcccaaagattactcaagctctatgcagataaatttggagcagacaatgtgaagataatccaggattccaacaaggtaaaccccaaggatttggaccccaaatatgcctacatccaggtgacctatgtgacgccgttctttgaggaaaaggaaatcgaagaccggaagacagatttcgaaatgcaccacaacatcaaccgctttgtcttcgagacacccttcacgctgtcgggcaagaagcacggtggggtggcggagcagtgcaagcggcggacgatcctgacaacgagtcacctgttcccctacgtgaagaagagaatacaagtaattagccaatcgagcacagaactgaatccaattgaagtggcaattgacgagatgtccaagaaggtttctgagcttaatcagctttgcacaatggaagaagtggacatgatcagactgcagctcaaactgcaaggaagtgtcagcgtgaaggttaatgctgggccaatggcctatgcacgagcttttcttgaagaaaccaatgcaaagaagtaccctgacaaccaagtaaagcttttgaaggagatcttcaggcaatttgcagatgcatgtgggcaggcccttgacgtgaatgagcgcctcatcaaagaggaccagctggagtaccaggaagaactgaggtcccactacaaggacatgctcagcgaactctccacagtcatgaatgagcagattacgggcagggacgacctgtcaaagcgcggagtggaccaaacctgcactcgagtaattagcaaagcaactccggccctacccacggtctccatctcatctagtgctgaagtctgagggctctgcagcatcagacccacctctaagagaactttctgaatttgcagctaatctcggggaagagaaagataggtttaatttatttgaagttttcatggtgttaatatttttgtttacctcgctagcttcagaattttgccaacctctgaatttgcacattttgtataatttttttttctttgagcagtgttgatcaagccaggttgaatatttgccatgaaattccagtgaatgtgtagctcaaatgcaaaccctaagtttgctgtcagttattgtatggtcagtaccccagtcctagtacacatattttaaaggttaaagtgaatgtttttgtaacatttaagcatatttcagatgtaaataaaagattgtaaaatatacggtttttaccaaatttaaaagatcctttttagttaatactatgacagtactaaaaatatatgaataacatttcagataccattatattaaaatatttgtgtatgtgtacaaaagcgttgataaatactaatctttaaagtttgtggagttcctttatttgtaatatatgtgctcttaaaagcaatgggatgtgaaattatgaaagtattttattgttcatagaaataaaaaacacagttactttgcatttg

SEQ ID NO: 582 - protein, 594 aa, Homo sapiens
MRKNFEFNKQKSIVRSHLQLIKAVSQLIADAGIGGSRFQHSLAITNNFANGDKQMKNSNFPAEVKDLTKRIRTVLMATAQMKEHEKDPEMLVDLQYSLANSYASTPELRRTWLESMAKIHARNGDLSEAAMCYIHIAALIAEYLKRKGYWKVEKICTASLLSEDTHPCDSNSLLTTPSGGSMFSMGWPAFLSITPNIKEEGAMKEDSGMQDTPYNENILVEQLYMCVEFLWKSYELIADVNKPIIAVFEKQRDFKKLSDLYYDIHRSYLKVAEVVNSEKRLFGRYYRVAFYGQGFFEEEEGKEYIYKEPKLTGLSEISQRLLKLYADKFGADNVKIIQDSNKVNPKDLDPKYAYIQVTYVTPFFEEKEIEDRKTDFEMHHNINRFVFETPFTLSGKKHGGVAEQCKRRTILTTSHLFPYVKKRIQVISQSSTELNPIEVAIDEMSKKVSELNQLCTMEEVDMIRLQLKLQGSVSVKVNAGPMAYARAFLEETNAKKYPDNQVKLLKEIFRQFADACGQALDVNERLIKEDQLEYQEELRSHYKDMLSELSTVMNEQITGRDDLSKRGVDQTCTRVISKATPALPTVSISSSAEV

SEQ ID NO: 583 - DNA, 5506 bp, Homo sapiens
cgcgcgcccgggggagcgcagagtttggaaagtcttcgagaagcttcagaggagggaagggggtgggaagagtgggggtgcaagagagaaaaacccgcctcttgcgagttgagcgaggaagaggggggggaaggctccgagttccgcttcctgaacggcgggtggatagagaaggttggcacggggaagaccggcgggaggcgcgccccgggcccgcggcgcgattggcgtgaccggcgatggccggtgagcggacccgcaggttcacccggagcctgttgagacctgggcaggcggccgagctccggcacagcgccgcgtccgccgccgcggtggcagtcagcagccggcagcagcagcggcaagaaaagcctaggcttctcgagcctttggattatgagactgtcattgaagaacttgaaaagacctaccggaatgatcctcttcaagatctcttgttcttccccagtgatgacttttcagcagccacagtttcctgggatatccgcacgttgtactcaacagtacctgaagatgcagagcacaaggcagaaaatttactggttaaggaggcttgtaaattttatagttcccagtggcatgtggtaaactacaaatatgaacaatattctggagacattcgacagctaccccgagcagaatacaaaccagagaagcttccttcacattcctttgagattgaccatgaagatgctgataaggatgaagataccacttcccactcgtcttccaaggggggtggaggagcgggaggaactggtgttttcaagtccggctggctctacaaggggaattttaacagcaccgtgaacaacaccgttactgttcggtcattcaaaaagcgctacttccagctgactcagttaccagataactcctacattatgaacttttacaaagatgagaaaatatccaaagaacccaaaggatgcatctttttggattcctgtacaggagtggtgcagaataacagactaagaaaatatgcctttgaattgaaaatgaatgatctgacctattttgtgctggcagctgaaacagagtcagatatggatgaatggatccacaccctcaaccgcattctgcaaatcagtcctgaggggcccctccaagggaggaggagcacagagctcactgatctgggtctggattcgctggataattctgtaacttgtgaatgcacgccagaggaaacagattcttcagagaacaacctacacgcagactttgcaaagtacctcacagaaacagaagatactgtaaaaacaactcgaaacatggagaggctaaatctgttctctctagatccagacatagataccttgaaacttcaaaaaaaagatctcttggaacctgagtctgtgatcaaaccatttgaagaaaaagctgccaagagaatcatgatcatctgtaaagccctcaactcaaatcttcagggatgtgttacggagaatgaaaatgatccgataacgaatattgagcctttttttgtgagtgtggcactttatgacctcagagacagcaggaagatttctgctgattttcatgtggatctaaaccatgctgctgtcagacagatgctcttgggggcttctgtggctttggaaaatggcaacatcgacaccatcactccaagacaatcagaagaacctcacatcaagggacttccagaggaatggctaaaatttccaaagcaggctgtattttctgtaagcaatccacattctgaaattgttttggtggccaaaatcgaaaaagtcttgatgggaaacattgcaagtggtgccgaaccttatattaagaacccagactccaacaagtatgcacaaaagatactaaaatccaacagacaattctgcagcaaattgggaaaataccgtatgccttttgcttgggcagtaagatcagtatttaaggacaaccagggaaatgtggacagagactcaagattttcaccattgtttagacaagaaagtagcaagatttcaactgaggacctagttaaactagtatcagattatagaagggtaacatcgtcctttatccctgtcaagcctttcaacatgatggctcaaacagaacccacagtggaggtggaagaatttgtttacgattcaacaaagtattgtcggccttacagagtatataaaaatcaaatttatatttaccccaaacacctcaagtatgatagccagaaatgcttcaacaaggcacggaatataactgtgtgcattgaattcaaaaattcagatgaagaaagtgccaagcccctgaagtgtatttatggaaaacctggagggcccctcttcacctcagccgcctacacagcagttctgcaccactctcagaatccggatttctcagatgaggtgaaaattgagctaccaacacaactccatgagaaacaccatattttgttttctttttatcacgtcacctgtgacatcaatgcaaaagctaatgccaaaaagaaggaggctctggaaacgtcagttggatatgcttggcttcctctgatgaaacacgatcagatagcttctcaagagtacaacatcccaatagcaacaagtctgcctcctaattatttaagctttcaagattctgcaagtggaaagcctcacaaagatatgcctgaatattcagtcacaaatgaattttgtcgcaaacacttcttaatcggaattctgctccgagaagttggctttgccctgcaggaagaccaagatgtcagacacttagctttagctgtcctaaaaaatctaatggctaagcattcatttgatgatcgatacagagagcaactccaacaatgtgactgtcaaaattcattgatgaaaagggtctttgatacctacatgctctttttccaagtcaatcagtcagccacagcgctgaagcatgtgtttgcctccttgagactgtttgtatgcaagtttccttcagcgttctttcaagggcctgctgacctctgtggatcattctgttacgaagtcctaaaatgctgtaaccacaggtcacggtcaactcagacagaagcctcagcccttctgtactttttcatgaggaagaattttgaatttaacaagcagaagtcaattgtccggtcccacttacaactcatcaaagctgtgagccagttaatagccgatgctgggattggaggctctcggtttcaacattcgcttgcaattaccaataatttcgccaatggagataagcaaatgaaaaacagcaatttcccagcagaggtgaaggacctgactaagcgtataaggactgttttgatggccacagctcagatgaaggagcacgagaaggaccccgagatgctggtggatctccagtacagcctggcaaactcctacgcaagcactcctgaactacgcaggacctggctggaaagtatggccaagattcatgccagaaacggagatttatctgaggctgccatgtgttacatccatattgctgctctcattgcagagtatctgaaaagaaagggttactggaaagtggaaaagatttgcacagcatccctgctctcggaggatacccacccctgtgatagcaactcattactaacaactcccagtggaggaagcatgttctctatgggatggccagcttttttgagcattacaccaaacattaaggaagaaggagcgatgaaagaggattctggaatgcaagatacaccatacaatgagaatatcctggtggagcagctatacatgtgtgtggagtttctctggaagtctgagcgatatgaactcattgctgatgtcaacaagcccatcattgctgtctttgagaaacaacgagacttcaaaaaattgtcagatctctactacgacattcatcggtcatatctgaaagtggcagaggtggtgaattcggagaagcggctgtttggtcgctactatcgtgtggcattttatgggcagggcttttttgaagaagaagaaggtaaagagtatatttataaagagcctaagctgacaggtctgtccgagatttcccaaagattactcaagctctatgcagataaatttggagcagacaatgtgaagataatccaggattccaacaaggtaaaccccaaggatttggaccccaaatatgcctacatccaggtgacctatgtgacgccgttctttgaggaaaaggaaatcgaagaccggaagacagatttcgaaatgcaccacaacatcaaccgctttgtcttcgagacacccttcacgctgtcgggcaagaagcacggtggggtggcggagcagtgcaagcggcggacgatcctgacaacgagtcacctgttcccctacgtgaagaagagaatacaagtaattagccaatcgagcacagaactgaatccaattgaagtggcaattgacgagatgtccaagaaggtttctgagcttaatcagctttgcacaatggaagaagtggacatgatcagactgcagctcaaactgcaaggaagtgtcagcgtgaaggttaatgctgggccaatggcctatgcacgagcttttcttgaagaaaccaatgcaaagaagtaccctgacaaccaagtaaagcttttgaaggagatcttcaggcaatttgcagatgcatgtgggcaggcccttgacgtgaatgagcgcctcatcaaagaggaccagctggagtaccaggaagaactgaggtcccactacaaggacatgctcagcgaactctccacagtcatgaatgagcagattacgggcagggacgacctgtcaaagcgcggagtggaccaaacctgcactcgagtaattagcaaagcaactccggccctacccacggtctccatctcatctagtgctgaagtctgagggctctgcagcatcagacccacctctaagagaactttctgaatttgcagctaatctcggggaagagaaagataggtttaatttatttgaagttttcatggtgttaatatttttgtttacctcgctagcttcagaattttgccaacctctgaatttgcacattttgtataatttttttttctttgagcagtgttgatcaagccaggttgaatatttgccatgaaattccagtgaatgtgtagctcaaatgcaaaccctaagtttgctgtcagttattgtatggtcagtaccccagtcctagtacacatattttaaaggttaaagtgaatgtttttgtaacatttaagcatatttcagatgtaaataaaagattgtaaaatatacggtttttaccaaatttaaaagatcctttttagttaatactatgacagtactaaaaatatatgaataacatttcagataccattatattaaaatatttgtgtatgtgtacaaaagcgttgataaatactaatctttaaagtttgtggagttcctttatttgtaatatatgtgctcttaaaagcaatgggatgtgaaattatgaaagtattttattgttcatagaaataaaaaacacagttactttgcatttg

SEQ ID NO: 584 - protein, 1531 aa, Homo sapiens
MAGERTRRFTRSLLRPGQAAELRHSAASAAAVAVSSRQQQRQEKPRLLEPLDYETVIEELEKYNDPLQDLLFFPSDDFSAATVSWDIRTKTVPEDAEHKAENLLVKEACKFYSSQWHVVNYKYEQYSGDIRQLPRAEYKPEKLPSHSFEIDHEDADKDEDTTSHSSSKGGGGAGGTGVFKSGWLYKGNFNSTVNNTVTVRSFKKRYFQLTQLPDNSYIMNFYKDEKISKEPKGCIFLDSCTGVVQNNRLRKYAFELKMNDLTYFVLAAETESDMDEWIHTLNRILQISPEGPLQGRRSTELTDLGLDSLDNSVTCECTPEETDSSENNLHADFAKYLTETEDTVKTTRNMERLNLFSLDPDIDTLKLQKKDLLEPESVIKPFEEKAAKRIMIICKALNSNLQGCVTENENDPITNIEPFFVSVYDLRDSRKISADFHVDLNHAAVRQMLLGASVENGNIDTITPRQSEEPHIKGLPEEWLKFPKQAVFSVSNPHSEIVLVAKIEKVLMGNIASGAEPYIKNPDSNKYAQKILKSNRQFCSKLGKYRMPFAWAVRSVFKDNQGNVDRDSRFSPLFRQESSKISTEDLVKLVSDYRRVTSSFIPVKPFNMMAQTEPTVEVEEFVYDSTKYCRPYRVYKNQIYIYPKHLKYDSQKCFNKARNITVCIEFKNSDEESAKPLKCIYGKPGGPLFTSAAYTAVLHHSQNPDFSDEVKIELPTQLHEKHHILFSFYHVTCDINAKANAKKKEALETSVGYAWLPLMKHDQIASQEYNIPIATSLPPNYLSFQDSASGKPHKDMPEYSVTNEFCRKHFLIGILLREVGFALQEDQDVRHLAVLKNLMAKHSFDDRYREQLQQCDCQNSLMKRVFDTYMLFFQVNQSATALKHVFASLRLFVCKFPSAFFQGPADLCGSFCYEVLKCCNHRSRSTQTEASALLYFFMRKNFEFNKQKSIVRSHLQLIKAVSQLIADAGIGGSRFQHSLAITNNFANGDKQMKNSNFPAEVKDLTKRIRTVLMATAQMKEHEKDPEMLVDLQYSLANSYASTPELRRTWLESMAKIHARNGDLSEAAMCYIHIAALIAEYLKRKGYWKVEKICTASLLSEDTHPCDSNSLLTTPSGGSMFSMGWPAFLSITPNIKEEGAMKEDSGMQDTPYNENILVEQLYMCVEFLWKSYELIADVNKPIIAVFEKQRDFKKLSDLYYDIHRSYLKVAEVVNSEKRLFGRYYRVAFYGQGFFEEEEGKEYIYKEPKLTGLSEISQRLLKLYADKFGADNVKIIQDSNKVNPKDLDPKYAYIQVTYVTPFFEEKEIEDRKTDFEMHHNINRFVFETPFTLSGKKHGGVAEQCKRRTILTTSHLFPYVKKRIQVISQSSTELNPIEVAIDEMSKKVSELNQLCTMEEVDMIRLQLKLQGSVSVKVNAGPMAYARAFLEETNAKKYPDNQVKLLKEIFRQFADACGQALDVNERLIKEDQLEYQEELRSHYKDMLSELSTVMNEQITGRDDLSKRGVDQTCTRVISKATPALPTVSISSSAEV

SEQ ID NO: 585 - DNA, 23801 bp, Mus musculus
  misc_feature (1)...(23801): n = A,T,C or G
gctgttccaggagcctgtgcccagaacagctctccggaggtttgagaggctgtccccacacagtgcccgggctcgggtcaccattgaatggctgagagtccgtgaggatggctccaatcgcactgccctcatcgactctaggtaggggatgctgctggatgctgttgttgctgatgtgtgtgtgcgcgcacgtgcgcgcgtgtgttgggggagttgggaagtgagggactcgcccatgcagggggaggggagcagcagatgatagggatgggtaccggacgggacagactcctccttcagggcctccctaacagcctgccagtcccctcgcctgacgcgcactgctgtgtttcaggctcgtgtccatccacgagagcggctggaaggccttcgacgtgaccgaggccgtgaacttctggcagcagctgagccggccgaggcagccgctgctgctccaggtgtcggtgcagagggagcatctggggccggggacctggagcgcacacaagttggtccgtttcgcggcgcaggggacgccggacggcaaggggcagggcgagccacagctggagctgcacacgctggacctcaaggactacgggtaggctggaggttgggtggctagggatgcaatagacccggtcctcctccctctctgcccccagccgcgccgagattttgtaccagcttaggtgtgaactgtgtaggctgccccgggagatgagccattcctacctataatactttctagcggtgcgtttagaaatggtattataatattgaattataacattctatttccactgtccccttcaagagtaagtctttgaagatttttagcttcaagccaggcattggtggcacatgcttttaatcccacacttggaagggagaggcaggcagatccccgagttcgaggccagtctggtctataaaggatagctaaagctacacacagagacatcctatttcaaaaaacccaaaccaaaccaaaccaaacaaccaaccactaaaaacagaacaaacaacaacaaaacccatcttattaggcatatactttaaacatttgtatttgctactattgcgcatgtgtgtccgtgtgtacacactgtgttctactctgtcacctttatatgagttccagggatccaatccagcccaggtcatcagttttgcatggcaagctctttacctgctaagctaccttgcctcccctgcatatactctttgttgttgttaaaaattctttattttgggggaattttattcatatatacaatgtatctttatcatagcattctctactccccatcttgctcctcctgataagcattatagtgtgtgtgtgtataggggtgtgtgtgtgtgcatatatgtggtatgtgtgttgtgtgaagtatgtgtgcatgtgtatatgtgtggtatgtgtggtgcatgtggaatgtgtggtgtatgtgtgtgtggtgtgcatgtgttgtgtatgtgttgtgtgatatgtggtgtgtatatgtatgtgtggtatatgtgtgtgtagtgtgtatgtgtgtggggtgtgtatgtgtggtgtgtgtatttatgtgtggtatatgtggtatatgtgnnnnnnnnnnnnnnnnnnnntatgtgcatgttgtgtatgtggtatgtgtatatgtgtggtatgtgtagtatgtgtgcaagtggtgtgtatgtatgtgtggtatatgtgtgtgtgtgtgcagtgtgtatgtgtggtgtgcatgtgtgtatatgtggtgtgtgtgtgtgtgtttgtggtgtgggtgtgcttgttctatagcaggcatgtggtggtcaaaggatgaccttgaatgtcagtgtctaccttaagccttgtttgagagaggggtaccttgttactcagcatgaagtttggctgcaagcttccggaggttctcctgtccctaccttctcttttactttaaggttatattgattactgaggcacactacctgccagccttctgtgggcactggggatttgaactcaggctgctctcatatttgtgctcttcccccattgagcaatctgcccagcgcttgttttgtattttgaggcatgggtctcatatagctccagctgctcttgaattctttacacagctcaggatgaccatgaaccgctgatcttgccatcttctcctccctagtgctggggttacaggcatgcgtcaccaggtcaccagcagcatgtgcttttaaaagaccttctcagtcctcactactatgtagttggccgggaactctgtgtaggtcagtgtggcctcagctttatagatcagtctgtcattgcttcccgagtgctagggagattaaaggcaggcattaccatgctcaacttcactaggtattataggtagccaagtacggtttaaagcttctaggagggtgtgcatagttcatatgtacaggctgtaccgttttggtatccttgggctttctggacgccatctcccatggacactagtcactgaggacaagttgcttaagaccaggcctttgtcgtgaagttcggttctatctagctctgcttttcacttgttctccatcatgtcactgagcacctttgggtctcagagtcctcaggtataacaaggctaagaccagaactcccttcaggattcctctgaggatgaagtacaaatatcaccctagataacacataggccatatgtagttctggcataccaagactcttagtaagcactttatgttctagacatttatttgttctttaatcttcacagtgttctctttgaagaccttgggaaatggttggtaggacttccttccctgccctgtcaggtgacctttgctctctcacccctacagagctcaaggcaattgtgaccccgaggtaccagtgactgaaggcacccgatgctgtcgccaggagatgtacctggacctgcaggggatgaagtgggccgagaactggatcctagaaccgccagggttcctgacgtatgaatgtgtgggcagctgcctgcagctaccagagtccctgaccatcgggtggccatttctggggcctcggcagtgtgttgcctcagagatgacctccttgcccatgattgtcagcgtgaaggagggaggcaggaccaggcctcaagtggtcagcctgcccaacatgagggtgcagacctgtagctgcgcctcagatggggcgctcatacccagggggatagatctgtagtctccctgtccacagatgtattctcagtgagcttgtcctaacttagtgctcacgtcagacctttgctctacagtcttggttttcttgtccatcacccagtttaagcacttacatgggtaaatcatgtcactccagtaggacacactgaccccacttagccaaggacatggctatgcagtgaacaggttcgcagctgagtctgttttctggccagaactcagcttaatgtacaacaaaaccctacggtgagaacaggggaatcaaaagctcgtttactcttacacagtgattactggcatcaacgtaccatgtcagggactgcccacagcaggctgggagggagacatctcagaagcctgcggcagctccttgtgaaaaaccgttgttcccatttctcctaaccttagccctagacaagagctgtatagatttcatgtgtgtgactgcttttcagttggccttggtgttcatagttattctatattatttgactttcctactcctttctccttctgccctggtgaattctatgaaactagatgttccttgatgtaatgattcttaaacaattaaaaagttgaggcatgggacacagcacagcacagtcctgatggcccaggtgcatgctgtagatgtattctgtgtgctcttatcttggaaacaatgcaataactttgcaatgttagttcagattaatgtttgacttgcaaagaaagtttgaagaaattattagaaagtgaaatagagccaacactgggatcccgaaaagaaaaaagctattgaagttatgaaataagttttgcacaaaatttgagagtgtttcctggataagcaagtatagaatacataaaatcttatattagtaaaactaagccaaaacaccgggactcttaggagggtcactgcgtgcaatgtgcagaagcagaaagctggcagaactgccgagttaagggtgtacctgagtctttctggccattgcctggcagctttgcccatgtcatttattgtcagagcttcacgggaaaatgcaagtagccgacttcggagctctgagctctggagtataataagtcaaaaggtaaagtttaaataatgataagtttgcaataattattattttggccagaggcctgggaataggggaagcttgaaactctgggggaacaattataattcttgattctttgtgtgatgtgggtattgttttgaatttgatttggcaacgattatacaatgtctttttttcctatctgcatttggagtatcaataaaagactggggcaagagaaagggagagagcgagtcatcgagtggagagagtggggtgtgcatgcagtgtgcgtgaggtgagtgtggagtggagagagtgtgaggagagtgtatggagagtgtgtgtgagtgaaaggggaacgcacagaggtgtgtatgagcatgagagtgaaaagaaaactgcacaggagaaaagagcgtgtgtacagcctcaagctgcaaacaagcaagcaagaaatagaacacacacacaaacacacacacagagggagagggagagagagagagaacaattttaagcttcgaaaaattgcctgtcagtttgtactcggaaagttgtcagtgtctgtttattatgtgccttccagatatccctgcttccagttgagaactccaatcctgtgtcgaggctggaccccgacaagtgatacataaattaatttacacaaaacagaacaaagcaaacagaactccaacatgccctagataggagaatatctggaaagagcccaccaggtactgacccattccagacttgttttcctctcttgaaacaaggtctcagtatgtagcccaggatggtctctaactcaaaaccactcctgcctctgcttcccaagagctgaattagaggcgttcactgtcatgatcagcccaccatagactttcacaaatactctgaggccctggttctaaaagcactaagaggtggggaagaggaagggctataggctgggatgctggccaggaagtcaaatatttagcttccagagctgaccacaagcaggcgtctcaaggcaatgcggaaacctatgagttactcaggtggctttaaaaaggagcagtggttgtgccaggcggtggcggcgcacgcctttgatcccagcactcgggaggctgaggcaggcagatttctgagttcaaggccagccttgtctacaaagtgagttccaagacagccagggctatatagagaaaacctgtttcaaaaaacaaaaaccaaaaaccaaaaccaaacaatcaaacaaaagaagcagtgggcttcagctcagaagcaccacggcccagggaataggcagccctgagcattgcgttctactccagagtcagcgcgacccgggtgtgtttaacatccccctagagaactaccttcagcaagaatatacttcaacacggtgcctttttcatatttagcaaaacaacaacaacaacaatgaaacatagataatctgaagaaacaaagttaaagggaagctttttaccgtgtcttacgtcatttctaggactctcaacagaaggggatgatgggtaatgatgacagcctgattggatgatacagggatgatcaaagtctctccagtttggaagcttgaggaccacagtaactaagtttaaattccctatgcaagctctcattggaaactagtattttgagcattacatacacttcctctttagaaagtatcttgacccttgccaaggagaggaggctaaggttgtgtggtgggcgagcatttgtggagctaggctaggcaatagtgtatgtctatcatgagtatcaccacttaaatctttgtaactaaagccaggcacggtggcacacacctttaacctccacacccagtaagtagaggcaggttcgtgaccagcctggtctatgaagcaaataacaggtcagctagggctgttataaagagaaactctgcattgaaagtcttaaaaataaacaacaaaaaataaatttttgtaactaatgcacagagactagtcctttgaatctttagtagagtaacttatttatgtgctaggctgttttttaagaaagccatccgtggggatggggagatggcaaagcactggctacccttccagaggacccaggttcaattcctaacacagatggcaactcacaattgcgtgtaactcaatttctacaggatccaacattgtcttctggtctctgtgggtactaggcacgcatgcaatacacagatatacatgcacacaaattacccacgcacatcaataaaaacactttttaaaaaggaattctacccacggttggacagagagaacagcagattccttgttaagagtaagggaagagtagagattaaatacccttttctggtctggttttgttggtgcctttttttttttttttttttttttttttttgctggcgtctacagccatttctagttccttaacactaggtggcgctctgaacctgtttgcaaattaattctgctcttgctctaggagctggtgcaaaggcaaggacctttttggtggaaaagccaaacttgtcaatctttctttggtctgtctgaatttccttagttggtatgaacaaatatttcttttacacctctacaggaaaacccacgaaactctatttccttcttaagagaaggaaataattataggcagcaagccaaaccccattagaagtggaactttaaatttttcaattttgtatttgtttgtatagtcttttcttttgttttgttttgtttgaaatagggtcctatatcttttatagccctggctgtcatggaactcactttgtagaccaggctgacctcaaacttagagatctgtctgcctctgccttcagaggactgggtcgaaaggcttgtgtcactactgtggcccagcttactccaggctacccttagccacactacgtatcattggtttgcatgaggtggttacaaaaatccaaagatgaaaaagtttcatcagttttgtctttaaaattggttatcttagtctgtcctacataggaaataatgttgcctaatcttttgttggtttgtttgagacttggtccccaggcaggctgtatagacatgggtgaccttgaacttgtgcccctaataaccagcctctcaaatgctgggattgcaccatctcatgggtaatgcagtggaggggaaggagccccgtccttcatgcacgatactgaatgagttatattcccagccttccaacaataaactggaactttaattcattttttcttttttttctaaagatttatttattttatgtatatgagtaccctttaactggttgtgagccttcatgtagttgctgggaattgactttaggacctctgcttcctctggtcaaccccacccactctggtctgccccgctcgctctgatcaaccctgctccctcagtccctgcttgctgtggcccacagatttatttattattataaataagtacactgtagctgactttagacacaccagaagagggtgtcagatctcattatggatgggtagtgagccaccatgtggttgctgagatttgaactcaggaccttcggaagagcagtcagtgctcttacccactgagccatctcaccagcccataatttattttttcgaggcagggtttcttctgtcatatatcccagactggcctggaactctcaaacatcctgcctctgcctctagactccagccattgcaagatctgcacaacctgtcctggcttatctcgctgaagtgttctaacaaagacatcaagatttaaatctattctcagatgtcttcaaaggaaatagagagctattctccaaaaactgtcatattggttctccttcgatggtgagactgaagacggtgagcccacgcctgatatgtaaaaggccggggtttcatctgaaatactgaaaannnnnnnnnnnnnnnnnnnntcttttacacctctacaggaaaacccacgaaactctatttccttcttaagagaaggaaataattataggcagcaagccaaaccccattagaagtggaactttaaatttttcaattttgtatttgtttgtatagtcttttgttttgttttgttttgtttgaaatagggtcctatatcttttatagccctggctgtcatggaactcactttgtagaccaggctgacctcaaacttagagatctgtctgcctctgccttcagaggactgggtcgaaaggcttgtgtcactactgtggcccagcttactccagtaagaaagaaagaaagaaagaaagaaagaaagaaagaaagaaagaaagaaagaaagaaagaaagaaagaaagaaagaaagaaaaaaaaagaaagacatagttttttactgaacctaatttttgggtaatagacatggattcctgtgtaatacagggagctaagggagggttggctgctggagattggccatctgcctagcctgggacacctcagtactctgtcccattgtctggttcttcctaattctcagaaggggcaggcgtgttacttaaggataagacaagggtgaaggccctgaggcactgataaaaatgatgctgggggcggagaacccggggagaggggagggaggaggctgaactggttttcctattggctgggaggtccggaagggaagggctggacggtagggtcagggtggggccctcctggagggtgtgtcccaaatggctgggtgggaaggtagctattcatctacctcactgtagcagaatacaagaaagcagatagtatgtatgtagtttccaattctaggaagactggtaggaaggtccattgagttcaggaacttaagtctagcctgggcaacaaagcaagagattctggccagaaaaaaaaaatcgttccactttaactgtttggttcgtccattaatggaataaatacacgttagaatcttgtgtaaaataacgtttcggtggcgttgggaaactgcttatgattggtatactatagaaatgtatgtactacacgcctataatcccatccctcaagaggatgaggcaggaaggtcactagttcaagaacagcctgggctacatagtgaaacactttccaaaagtcaaacccaacttgtggctgttcctgagccctctggtgcgtctggacatgtttcgagaaatctttctgggaataaacaatacaattctaatggaagagaggagatgtcactggtgattcgggacagctcctgaaaagcttcgatgctgggtctctttgtatactctaaaaccacaaggtggggtggacaaacaagcagtcatttctcactgtctcagctgtttctccaggtcgccctgttccgggtagcaagagaagtcatgcttggccaacaggccgtgcaagcagtgctttaaggaaatcactaaataaatcaacaaatcatgatctagtaattcgtcttttctacctagttctacttcggaaggagcatgccgaagctggctagctgtagcctggtgtccatgaggggtacatctctaataggcgttttggagatctcactcctgaaccagagttagaaaccaactcttctaaccaggaattaccagtgtcccaggcagggccaagcagacccgcaccagcggagctaacaggttccacccgctgcgcgatcaggaggcgggcgcacggcctgacggcgatgccgattggtccgccccagacccgagcctcggattggttgccttggacacgtggccaaccggaggctgcgtatttggcggtggatgctctgggatacttggggcctctctagcagttcatctggtgcatcccggtttgaaagctgttccgagcaattcgggtccatctttttccacgcgcggacactgaccccgggatccccagagtccccggatcggcgctcgccgggatcctgcggccatgagcgtgggtttcatcggcgcaggccagctggcctgtgctctggcgcggggcttcacggccgcgggtgagcgcgtggtcagccttccctctcaccagagtgaacgagtgagtgagtgggtgggtgggcgatgagtgaatgtgaatggatggtagatttgcatccatctgctgggagcatagcgtcggaggccggcactgctagagctgctgttggcttccattgatggactgcatgattgggccatgatctacagttgaaaaactttgttttctgtaggcgtcctgtcggctcacaagataatagccagctccccggatatggacctgcccacggtgtctgcgctcagggtaggctaggagggatggagggaagtgggcaagaggaagaggcccaggaaaagcgtgtccggagatgccctgagtctggcaggctccgactctcctttagggaagtcatcattgtaagccctgcaccttctctgaggcagccttgtgtggtgggagctcccaggcaaagttagtgtcggatcctactggggtgaaagtaggcatataagaaaggttctttttgggctggtgagatggctcagcgggtaagagcacagactgttcttccgaaggtcctgagttcaaatccagcaaccatatggtggctcacagccatcccttaacaaaatctgatgcccttttctggagtgtctgaagacagctacagtgtacttacatataataaataaataattctttaaaaaaaaaaggttctttttgttagtctgctttgaatttcactgcatagcccgtgttggcttctaagtctggaaaattctgcttaccgatgttgtaaatgacagcgttgctaggggacttggtgagttacgtagtttctttattcaataaagcttaatgtcccaagtcttctaacatctggccaatgtgggacaggtgagcagatgaagcactgtggatactgtttgtgcctagtataggcttatgtccccaacgctgtaggaccccagctatgcacctcagagccctagagggggccccgtggagacttgttactccggtaaacagctgtgaggttgggagtgggctttgcagctctgcttccagactctgggtgctcagctctttccatcagttctctctcacctggcagagaggttcgagattgctggggttgaggggacagccactttcctggccatggtggagcagcttaccattttgtacctatttgtccggtggcaggaaaggaaagctgccatttggggatagtcacggagccctgaaggcacagaacagagtgttggctacagttgacagagagggtctgctattctatgggtggcacgggctcagccatattacctagcattacggacagggtcccctactccttactgcagaggatgggtgtgaatctgacccgaagcaataaggacactgtgcggcacagcgacgtcctgttcctggctgtgaagccccacatcatccccttcatcctggatgagattggagccgacgtgcaggagaggcacatcgtggtctcctgtgcagccggggtcaccatcagttctgtggagaaggtgctgttgccccggtgcccattgtgtgagaggaggggtggcctgggagtggctcagatccgagggagctatgtcctggacactcagttggcttgctctcctcctctagaagctgatggctttccagccggcccccaaagtgatccgctgcatgaccaacacgcccgtggtggtccgagagggggccaccgtgtatgccacgggcacccatgctctggtggaagacggcaagcttttggagcagctgatgagcagtgtgggcttctgcacagaggtggaggaagacctcattgatgctatcaccgggctcagcggcagcgggcctgcctatgtgagtggttctcacttgcccactggcttgcatgcatcctgggcagcaggaggggctggcggaagagagggcagccggcacatctcttggacatggctggctggtggaaggagctgaccttcaggattggtcccagtcacctgagaaagccgcctgtggtgtgtgggtgcgcggatgcttggttcctgtgttcagagaatatctccacaggcattcatggccctggacgccctggcagatggtggggtgaagatgggcgtgccgcggcgcctggcggtcagactgggagctcaggcgttgctggttagtgtctttgcgcggttggtggttggttttagggttgtgttttgggggaggggcaccgagctgggcctgggttgagtctaatgctgctttgtatctcagggagcagctaagatgctgctggactcagaggaccatccaggccagctcaaggacaacgtctgctcccctgggggggccaccatccatgccctgcacttcctggagagtgggggcttccgctctctgctcatcaatgcggttgaggcctcctgtatccgaaccaggtgcgcgttctcgctctcccctgtctgagttcttccgttggtgttactcttgaagatttcatgagcgcggtcagagtctgtgctctgttgataaccacagttttaagcttcctttaaccaagggtttgctaacctttctctacttagttcttagcgcacttctgatggctatgattaactttgtttatgtagatgggtacattcgagatcaaacagttaaatgatggagatgggattcaactgctgactggcttcaaattctataacttcccctagtttttttttttttttttttcttgtgtggtcaccgatatcactggaacactgtacctagcttggatcgcaccgggggactgggatatcccctgttagttatttgactcttaagaagcttggagcttctctggtttgggattctgagtcttggtggcgtcgggttgagagtctgggtctgtatagctggggaaggcgcaaagctctggctccgaggtttatcatcttcctggtggggctttgtttacagagaactgcagtccatggctgaccaagaaaaggtgtctcctgctgcccttaagaagacccttctggacagagtgaagctggagtcacccacggtgtccacgctggccccacccagctcagggaaactccttacaagaaaccccgcccagggaagcaagaaggagtgaggaggactctgtagggtgtccctgtcccctgtagtacagggaggggcaggctcaggtctgggggtgaagctgcttacatctgttcacctggtgccaccgagtccttctcccgtcccgtggcagaaggtgctctgaagaggcggctgatgccagaagtcagcatgcctctctgagagaggtggaggccttagagttagcatccccctcagcggaagtctgtggagagctttagttagatccgaggctgcttcagattgatctccaggtgaggtgagaggaaacgggaatcctctgaattaaaaacacgcaaagaagcctgtgtcttggtgttgcaggtggaagtgtggggagtcatcctgtgacctcttgcttaactcttctggacaggtgacccattagaaggtgatgttcagggctgctttaataaagatcttatttatttttgagttctagtctcactgtgtagcccaggctgacctcaacttgtggcaatgctcttgcctctgcctcttttctcctcctccttctccttctccttctctttctccttcttctctctgtctatctctctgtctgtctctgtcccttcctccctcccttcctcctctctctctctgtctctcagacagggtttctctgtgtacccctgactgtcatggaactcactctgtagaccaggctggccttgaaccttgaactcacagagatctgactgcctctgcctcccaaatgctaggatcagaggtgtcctccaccctcaccccttgcgccccctcccccccatcactggccttttctctacttctatgtcatagtttctattgctgtgataagacaccatggccaaggcaacttggagaagaaacagtttgtcttgggcttgtggtttctgaactttggagtctgtgctggcagaggcacagcagcaggaccagctgagagcacaggaagcagggctaaccctgatcctcaaagcccaccctggtgccagcttcctccagcaaggccacgcttcctaatctttcccacacaccaactggggaccaagtattccaattcccaagacttaggggagaaatcttgtcagaagccaagaccagcccctgcctgcacagtctgcccgtggcctgttccaggctccttgtgtcctacaggactctccaacctggggcagccttcagtccccactaaacaccgtgagcttttctgaggttcccaggaaaacgtttacctatttgtgcctctgttttgcttttctgaaacagcaagcagttctacttgactgctaacagtagatccctggggcggtcgaggctgacttctcacttggtttcttctcctttggcaggcatggttttgctagttcaaagactgaatgaacactttggggctggaggcgtagctcagtgatagaacatttacctagcatgctgaagcccttcctggcttctgtccccagggacagaaggagagaaaacagaaagatatgacagttcctacacccccccacccccccactgttccttttatggcgtgcagaaatataaacacactccttccatcccgtatgtgactgttgctaagtaacaccccagagagactggagagttatgggtgcccaagggcctggctctgtggcctttcctgtgctctgctatcactaggaaggcaggtggaatatcgaagtggtgggggctgggaaagtgactgggtgggagagtgtgtctagtgtgcttaaggccctgggcccagtcagcagcaccagcaagcttgatgtcttgagcgttggcccctggagctcacataaggcagcggtgggatggggggcggaagaatagacaccacatgcatttatgacatggaggtccatctccctcccccaacacacacagcatataaaaatggaatttaaaagaaaagtaaatgagaagagtatacaagctagtaagaggggaacctaggtgggggcagggcaggagcaagacctgtcaggatgcagctcttgatttaagacagtattgctctatagagcaggctggtcttgaactcacagcaatctggcttcagcatctttaatgctggggttatagtctcattacatactttaggtgtcactgtgcagatttgaaaaacaatcctatgaaagtatgtcctagtcaccaagtacatttggagtccctgcggtgctgcaggtgcggtgactgcaggtctgaatccctggtggtcagggctggagcatactccagctgtctgccctgctttggtctgagctatgtccaggaacattcttggcatgaaagtaccatcctttgctctggagagatggctcagtggttaagaacactcactgctcttctagagttcctgagttcaattcccagcaaccacatggtggctcacagccatctgtaatgggatccgatgccctcttctggtgtgtctgaagacagtgtacacttaacacacataaattctttcttttcttttcttttttttttttttttttttggttttttgagacagggtttctctgtgtagccctggctgtcctggaactcactttgtagaccaggctggcctcgaactcagaaatccgcctgtctctgcctcccaagtgcgggattaaaggcatgcaccaccatgcccggctacaaataattcttgttttgttttttgtttttgttttgttttgtttttgagacagggtttctctgtatagccctggctgtcctggaactcactctgtagaccaggctggcctcgaactcagaaatctgcctgcctctgcctcccgagtgctgggattaaaggcgtgcgccaccacgcccaactctataaataattcttaaaagaaagaaagaaaacagaaaatgccttggaacaggtgggtagactggtactctggatcccacctcttagaagcccacctgtgcagccaggctagcctggggtccctcctgtgggtgcctgttgacaatggaatggttaccatccacttctccatggaaggactctcccatgacctgggagcaccttgagcatgctcagtatgttctttatggtagagtaacgcacagcctttagtctgaccttgaacctgctaattgagttttgacatcttttaatctatgagagttttgtttgatgagggttttgtttcttgctatactgacccaagatagctttgaactctcataagccaaggctgccctcaaacttggaatcttcctttgtttgtctcccaagtgctgggcttacaggcagcagggcttacaggatgctgggattaccatagtacaccaccgcggcagtacagtgagtgctatcaaatgccttcagggtgatgatcttgcctcaagaagctacccaggccctttcggtgaatgacatcctaccctgcttattcttacagccttgagagtcttcaggtaggagagaatgtctgagggacatttaccttgagaggaaaaccaatttcatgatggctttcagcttcaggaaggtcacgtggataaacgttgcatccttgaagacaggagtgattggcctgtacactgggctaaagcatcctgagggtttttggacagcaggcagtagagatacttcaataacgggagagcgctcatcctacctcccagagtgtccactggagggcagctttggttggatttggggatcccttttatacatacttaggtttgtatgtaagcttctcccctccatgggaactgtgccatagtcactaaaacaggatgagaattggcagagtgagtggctagctagcaggggaaaaaccccaacccatttctgcctccagcaccaaaacaagaagatgaaaggaggtggccggtggtatcgctcctgacccaggcatttactaaggaagtccccacgtctggagtaacgtctgaacgcagcagtactgctgttccttctccagagccaggctgagcttcttcataggagagaggagaacttggggggggggcaggcggggggtgtatagaggggagggtgggctccaagccacagggttgcctgcgcaggtccccgggagcatactcaggtatccagaagccccacggaagaccgggcaattactgacttgtgtgcggtgctgggaacccagggctccctgcatcgtaagcgggaagagccacgccccaacttcattcttcgttaaaggtttttgagataagatgtcatgtagttcatgctggcctagaactttgtcttagttactggtctctccgctgtgaagagacgccgtgaccaaggcagctcttacgaaagaaggcatttaattggggctggtttacagtttcaaaggcgtagcccattattgccatatggcagcgaggtgatgtcaggcgggcgtggtactggaaaagtagctgagggctacctttttgttctacaggacgggggagggaggaagtgggggaagagagagagagagagagagagagagagagagagagagagagagagagagagagagagagagagagagagagagagagaacgcgcaggagcaagagagctagcacactgggcacaggcctttgaaacttcaacctccccagtacacttcctcccacaaagccacacatatataagcctatgaggagctcttattcaaaccaccacaaggtaactacatagcctgagctggtcttaattttgctataagctgaccttcccccttagcccaccgagtgccagaattacagaataaagcaccacactttgctttgttttctattttaatgaaataaccagaaactgaagtagaaatgggatttgcccaaggccacctggccaggaaggattagaacccagacctctgtgcttctagcagtttaccaactaatttggcgagaagaacacggttcatcgttgatcatctgtagagataggcacgagacattttcatttagttttcccaatcttagaattcagagtggaggagaaagtgagaggcaccccttcctctgagtctgctgttggtctccgcatcttaagactgttgttattttcttgaaaacagcacggctccacagcaaccccttgtaattgacaaggtcagttgtcaagggtgggtaaccccatctcaggccccaggcagccatgtttcagcccctggatcagagtcgtttccccagaacttactggtcactctgatgtcccaagtcagagaaaaaagttgttacaaggtgctattgggttcccatggtgtagggcagcaaagcggctctgtcactagaggacatctacctctgagctctggagtggggtgtcggggatcagggagaaggtaggttggagagaagctggtgacttcctgtttctgctaacaagttcagtgttctgcagagggcaaagcctgggtttattctctgcttccttctcacctctgccatagcagccaccgggccgtggagctgggcagttgcccccttgtggacccacaaaccaacatcccttctaggctcctggacagagtgtcttgccattatcaatcactccctgaatctagcctttccaggtcaccggaagcggcacacaccggtctcacgcagggtgagaggtctagagagtgagaccacatcttaccaggtcaccttgccaagttcctgaggctgactgtcctcacctgtaaactgagagtgcgaacaggctcgcccatctgtatgctggcatctaaaggagacaaagcctggtgtgtggcaggcatgagccccgagaacctgaaggaactgttttgttacaatctgcaagaagtcagaggcacaggaagcctggcaaacaggtggtacagccagggtcaaagctgtgggctgcctggattcaggacctattccctgaatggcatctgccattttattttattttattttattttattttattttattttattttattttgcagtgtttgggttggaaaccaaagcctcattcatgtgaaacatggggccctttctccttctggggacagggtctcaatgaactgcacaggcaggccttgaactctcccattcttttgccccaggagcagctggaattatagttctatgctgccaaccagccctaacgtcctcccctttggatgatgggaaatgaggggctcggagcaaacacagacttccatctcctctccctccagatgctcccaaactctctgctcccgaaggtgcccagtttccgatcatctggatcccttcatcacagatgtttctcatttatcgtctctgcctctttaaatctacattcagcagccctgagggctctacaggaatgctcagccctcaggcagctgtgggaaccactgccaggcacctgatgagtaagttcttgttaacttgaatccgagctgactgtggctgctagccaacattctcagaaagctggctacctaaggctggggagaaatccctatcaaatgaacaatgtgtattcagaccctgttatagacacataacatgcagcttactcatgtgccaggtccccctggttttacagtgtcagcatcctgagacattcatgaccagctaaaggaacaactggctggtaaagagaagatctagatgactgggcagtggtggtggtaaggggtggggaggagtagggggtggaagtgggatgaggtgggcccagagacaagatgaagcaggccttcctataactctgacattcctcttgagttgagagggtgtcttagttagagttttactgctgtgaacagacaccatgaccaaggcaattcatagacaatatttaattgggtctggtttacaggttcagaagttcagtccattatcttcaaggtggacatggcagcatccaggcaggcatggtgcaggcagagctgagagttctacatcttcatctgaaggctgctagtggaagactgacttccaggcagctggggtaagggtcttaagtccacacccacagtgacacaacttctcccaacaaggccacaactcctctttaaaaaaaaaaaaaaaaagatttatttatttactgtatatatgtgagtacactgtagctatctttagacacaccagaagagggcatcagattccattataggtggttgtgagccaccatgtggctgccgggacttgaacgtagtacctctggaagagcaatcagtcctcttaatcactgagccacatctacagcccaaggccacacctcctaatagtgccactccctgggtcaagcatatacaaaccaccacagaaggttaaatgtaagtagtacctgttgcatgtaacctcaggcttttccacccatgccccagtttccaaaacaacaactctgagacttattatttatggataaatgcacaagccataagttagggcttgttccttgactagcttgtaacttaattacctgtttattctattctatgagttccacagggctggctacttctcagtttcatgtatttctctcctcagagttgggggcaaatctcttcccaggcttgactctattccagagtccctctctccctacaggaactcccaccctctactttctgcctcagctaatagaccatcagctttttttttaacaggtgatacttccatacagtgcatgagaaagtctctgtgtagctgtagtccagctagcgggcttttgttcatcccttactcagtacttgttgtgcacccaacctgcagttacaaacacacccagacctgatggcttcctctaatgcagaccccaatttgtgaggggaagggaaaaaaaaaacggagatgcagaaaaaccactgtagtccagtgctccatgaacatggtgggtatttgtgtaccaagccagggaagagagaccaatgtggcacaaggattgtggtcagatgtagctctggaaagatgagggaccttttcaactctagacaggtgactcagagcaaggtggccaaggcctgatctcagaaccatgcccctcgtgagtgaagtcagtggtgtgaggagagacaagtgtatgtgtgctaggtacgcgggtgaccaggggtcgggaggatgcacttggaagacaggtgctttcacagggagaataaacgggggaagcctcctctgagcctagcaaacctgggcgtggcagcgtgagcttttcatctccctgctggggaggaggcagagacaggcgcatccccggctcgctggccagcatggctagctgcatcagtaagctccaggttcatacagagactctgtctcagaaaataagacagtggctgggagatgctcagcgggtaaagtggttgctgtaccaatattgaggctgagtttgagtgcccagaattcatgctaatctccatacttctgtgctgagatgggagactaagacaggagaatcttggcagctcctgggcagtccacacaaagagaacctgcctcgggcaaggtagaaggcaagaccaaacgtgagactgccctttgacttccacgagtgtacctgcacacatacacacgcatcatacacagagtaaataaataaacaatgatgatgcatgactgttgcatacattttttttcaagttactttaataaggttcaacctctcctctagcccaccacccaccagagttatcggaagagaaaagttatcaggacatgggggaagtggacctgtttaacaatagttctttgggtatgggtccaatcttcatggtcagaatatcagcagttcagcccagtagcaaacactaaatacaaaccagcagctgcagtccagtccacttggcagtcaccgcacatgaaccagcaagggcagttcaaactgaaaggctcgccaaccacccgagaccacggaagtggcaggaagccgcaggaacctcccatgaagtactttggtgagcttgtctctatagcatcatcacaaatgggctggggaatgcagtgtaagacaaaccaatacatgtgtgccattagtgaagaatagcgaggtggagcaaagcaaaccggtgcttcagctcccactgtctgcggggtcattcttatgctcctcccaaacgttacgagtcctttcacgtgtctgcttcagcaaaacatcctttcacctctgtgtcccagcagaatatctttgacgtaactgacttatcaaagaaaccagaagtttctacttcacatgactttgactttagcaacccccaccccaacatgcacacccacacaaacatgtgcacacacacaaacatatgcatcaaagacagaaaaagaaaatgtaatgaaatacatgcatgaaaatgtcataatgaaactcactgctttgtatgttaacttaagaaatacatttttagtgctgagtataacggtctgaaaatcactgaaggaagacctcagacgcagagagtatacagaggcaaagagtgtttattctgcagaaataaccagcatgtgggggtcaaccattctccaaaatggcaaccccagacaaaggctcacttgttttctcaaagggaactgggggaactctctagaaggattagggtagcataaaatctcattggtgggtgcagggaggtcacaggtggtcagtggtctgcattcctatgtcatgaacgtttaaccataggatgacatagcccagcacagatctgagataagcacagatcctgagataagatagcctgcctcatttttgtggttttccccatttttgtggttttcctcattgtcaggattatcctcaggagattttatgactttgtttctggattttatggtctgttcctggagctggtgctatggccttcttattgaaatcaggcctggggtctagagagatggctcggctctgtggttaagagcactgactgttcttccagaggtcctgagttcaattcccagcaaccacatggtggctcacaaccatctgtaatgggatctgatgccctcttctggtgtgtctgaagacagctacagtgtactcacatatataaaataagtaaaatcaagaaaggaagaaagaaagaaagaaagaagaaagaaggcctggtcctcaaatggagacaaatggggtttatgtcatcctttcactgggcatggtggtgcacacctttaaccccaacacttgggagacagaggcagatggattgctgtgagtttgaggtcaactagagctacatagtaagatcctgtctccaaaaggcaatcaaatataagtaagtaagtaagtaaatgaatgaaatctaagtgggaggagggcgacaaaagctccattgggcaacagtaaccgggactttgcagacatctggatgagaaaggtcagggccagggaaggtgtaatcaacaaagtttctccctgtagcgccatagcaatagattgtttaaaagccaatctgtgggctggtgagatggctcagtggttaagagcactgactgctcttctgaaggtcctgagttcaaattccagcaaccacat

SEQ ID NO: 586 - DNA, 1598 bp, Mus musculus
cgtatttggcggtggatgctctgggatacttggggcctctctagcagttcatctggtgcatcccggtttgaaagctgttccgagcaattcgggtccatctttttccacgcgcggacactgaccccgggatccccagagtccccggatcggcgctcgccgggatcctgcggccatgagcgtgggtttcatcggcgcaggccagctggcctgtgctctggcgcggggcttcacggccgcgggcgtcctgtcggctcacaagataatagccagctccccggatatggacctgcccacggtgtctgcgctcaggaggatgggtgtgaatctgacccgaagcaataaggacactgtgcggcacagcgacgtcctgttcctggctgtgaagccccacatcatccccttcatcctggatgagattggagccgacgtgcaggagaggcacatcgtggtctcctgtgcagccggggtcaccatcagttctgtggagaagaagctgatggctttccagccggcccccaaagtgatccgctgcatgaccaacacgcccgtggtggtccgagagggggccaccgtgtatgccacgggcacccatgctctggtggaagacggcaagcttttggagcagctgatgagcagtgtgggcttctgcacagaggtggaggaagacctcattgatgctatcaccgggctcagcggcagcgggcctgcctatagaatatctccacaggcattcatggccctggacgccctggcagatggtggggtgaagatgggcgtgccgcggcgcctggcggtcagactgggagctcaggcgttgctgggagcagctaagatgctgctggactcagaggaccatccaggccagctcaaggacaacgtctgctcccctgggggggccaccatccatgccctgcacttcctggagagtgggggcttccgctctctgctcatcaatgcggttgaggcctcctgtatccgaaccagagaactgcagtccatggctgaccaagaaaaggtgtctcctgctgcccttaagaagacccttctggacagagtgaagctggagtcacccacggtgtccacgctggccccacccagctcagggaaactccttacaagaaaccccgcccagggaagcaagaaggagtgaggaggactctgtagggtgtccctgtcccctgtagtacagggaggggcaggctcaggtctgggggtgaagctgcttacatctgttcacctggtgccaccgagtccttctcccgtcccgtggcagaaggtgctctgaagaggcggctgatgccagaagtcagcatgcctctctgagagaggtggaggccttagagttagcatccccctcagcggaagtctgtggagagctttagttagatccgaggctgcttcagattgatctccaggtgaggtgagaggaaacgggaatcctctgaattaaaaacacgcaaagaagcctgtgtcttggtgttgcaggtggaagtgtggggagtcatcctgtgacctcttgcttaactcttctggacaggtgacccattagaaggtgatgttcagggctgctttaataaagatcttatttatttttgagt

SEQ ID NO: 587 - protein, 321 aa, Mus musculus
MSVGFIGAGQLACARGFTAAGVLSAHKIIASSPDMDLPTVSALRRMGVNLTRSNKDTVRHSDVLFLAVKPHIIPFILDEIGADVQERHIVVSCAAGVTISSVEKKLMAFQPAPKVIRCMTNTPVVVREGATVYATGTHALVEDGKLLEQLMSSVGFCTEVEEDLIDAITGLSGSGPAYRISPQAFMALDADGGVKMGVPRRLAVRLGAQALLGAAKMLLDSEDHPGQLKDNVCSPGGATIHALHFLESGGFRSLLINAVEASCIRTRELQSMADQEKVSPAALKKTLLDRVKLESPTVSTLAPPSSGKLLTRNPAQGSKKE

SEQ ID NO: 588 - DNA, 24438 bp, Homo sapiens
aagaccttctactgggacaagatgtggaggtggaagacagtgatattgctgatcctgaccctgtgtaggcctaggctactgtgtgtgtttgtgttttattttttaacaaaaaacttaaaaattagaaaaaaaataaactttttaatagaaaaagtttatagaataaggataaaaagaggccaggcgcggtggctcatgcctgtaatcctagcactttgggaggccgaggtggcaaattggctgaactcaggagtttgagaccagccagggcaacatggtgaaaccccaactctactaaaatacaaaaaaattacctgggcatggtggcgcatgcctatagtcccagctactcgggaagctgagacaggagaatcacttggatccgagaggcagaagttgcagtgagccgagatcacaccactggactccagcctgggcaacagagcaggactctgttcccctccaaaaaaataaaagaataaggataaaaagaaaaatattgtataaatctgtacaatatgtttctgttttaattgttattacaaaagagttggccaggtgtggtggctcatgcctgtaatcccagcactttgggaggctgaggtgggcggatcacctgaggtcgcgagttcaagaccagcctgaccaacatggtgaaaccctttctctactaaaaatataaaattagccgggcatggtggtgcatgcctgtaatcccagctactcgggaggctgaggcaggagaatcacttgaacctgggaggcagaggttgcagtgagctgagatcgcaccattgcactccagcctggtgacagagtgagactccgtttccaaaaaaaaaaaagagtcaaaaagtttctttttaatttaacgtttataaaaaagttacagtaagctaaggtcaattattaaagaaagaaaaatttatttttacaaatttagtgtaggctaagtatacagtgttgataaagtctacagtagtgtacagtaatgtcctaagccttcacattcactcattactcactcactgactcacccaaagcaacctccactcctccaagctccattcatggcaagtgccctatagatgttgtgccattttaaaatattttacactatatttctactatatcttctctatgtttaggtatgtttagatacacaaatacttaccattgtgttacgattgcctacagtattcagtacagtaatatgctgcacaggtttgtagcctaggagcaataggctacaccacatagtctaggtgtgtagtaaactccaccgtgtaggtttatgtgagtgcgctccatgatgtttccacagcaatgaaatcgcctaacaatgcatttcttagaacacatccccatcgtttttttttttttttttttttgagttggagtcttgctctgtcacccaggctagagtgcagtggtgtgatctcagctcactgcagactccgcctcccagactcaatcgattctcctgcctcagcctcccaagtagctgggattacaggtacccgccaccgcgctcagctaatttttgtattttttagtagaggcagggtttcaccatcttggccaggctggtctccaactcccgacctcatgatccatctactttggcctcccaaaatgctgggattacaggcatgaaccaccgcaccaggccaatatccccattgttaagtgaggcatggctgtacttcgggataaaggactctctatttcttacctgcaaagctaattaatactaactaaataataagagaaaaataggctgggtgtggtggctcatgcctgtaatcccagcactttgggaggctgaggcgggtagatcgctctaggccaaggagttctagaccagcctggccaacatggtgaaaccccatctctactaaaaatacaaaaattagctgggcatggtggtgcacacctgtgatcctagctactcaggaggctgaggtagagaatcacttgaacctgggaggtggaggttgcagtgagccgagattgtgccactgcactccagcctgggtgacagagccagactctgtctcaaaaaaaaaattaaaatcataacagaagaaaaatagagctaaaaaatgtctaaagagggccaagattttccagttggggtattgtaaataccagggcatatggttgctttgtgtaccagaaggatatcaatatccacctgaagaactctaccagttacacagtgatgtatctgtggctctaaaagatctgtggattcccaggcagtcacatgcaatcagtgacaaagatgggcctgctcacaccaggctgagtgtgagctaaaaaaaaaaaaaaatgtaggagattggcttcatttcaaaatgtaaggcgtgctcattaggatagggagacagtgtggtagacagaacgctctccccaaagacacctgggccctaatccttgcaacctgtgactgttatgttacatagcaaaaaggactctgcagatgtaattaaggttacaaaccttaaaatagggagattatcgtggattatctgagtgtgcccaatctaatcacatgagcccttcaaagcagagaactttctctggctggaggcaggagagatgaggtagaagggagaggtcaaagagatctgaagcatgagaaggacttgccctgccattgctggtctgaagatgagggaagccatgagctagagaatgtgagtggcctctaaaaggtgggctgactcccagctgatagccagcaaggaaaggggacctcagatctacacccacatggaagtcgaattctgccaacacttgaatgagtctgaaggtggatcctcccccagagcctccagataagagcccagattatcagctgacatggggatttgtctttatgagacctggagcagagaaaccagctgaggctactcagactgtttttttgtcttgttttgttttgttttgttttgttttgttttaaagacagggtctcactgccacccagactggagtaaagcacgatcatagctcactgcagcctctatctcccaggctcaagtgatcctcccacctccctctccccaagtagctgggactacaggctcataccaccatactggctaatttttacaatttttgtaaagacaggggtctccctacattgcccagcatggcctcaaactcagactttaaatctacaaaatgtgagataaagttgtttcattttaagcagctaaatttgtgatgaattaatacagcagcaatagaaaattaatacagacagtaagccaaatcccattagaagtaggatgtaattacaattttttttcacttaaaagatgaaataaagggccaggtgcagtggctcaagcctgtaatgccagcgctttgggaggccaaggcaggcagattgcttgagcctgcgagttcaaaaccaaactgtacaacatagtgagaccatccccatcatctatactttaaaaaatacaaaaaattagccaggagtagtggttgtagttccagctacttggcaggcagaagtgggaggagtgtttgagcctgggaagttgaggctgcagtgagctgtgatgatgccactacactttagcctgggtgacacagcaagaacttgtctcaaaaaataaataaataaataaataaataaataacattaaagataatttttaatgtattgcaaaccacccataatcccaccatcctaaaacaaaattattttggtttttgcatatcacctgtttccatgcagcatgagtaaatacttattttaaaaaccaaggttttggctgggcacgatggctcacgcctgtaatcccagcactttgggaggccgaggtgggtggatcacgaggtcaggagatggagaccatcctggctaacatggtgaaactctgtctctactaaaaaaaaaaaaaaacaaaacaacaaaaaaaattagccaggcgtggtggtgggcacctgtagtcccagctactcgggaggctgaggcaggaggatggtgtgaacccgggaggcggagcttgcagtgagctgagatcccgccactgcactccagcctggggcgacagagcgagactctgtctcaaaaaaaaaaaaaaaaaaaaaatcaaggttttggccaggtatggtggctcacgcttgtaatcccagcactttgggaggccaaggtgggtggatcacctgaggtcaggggttcgagaccagcttggccaacacggtgaaaccccgtctctactaaaaatacaaaaattagctgggtgtggtggtgcacacctgtagtcccagctcctcaggaggctggggcaggagaattacttgaacctgggaggcagaggttgcagtgtgctgagattgcaccactgtactccagcctgggtgacaaagctagactccgtctcaaaaaaaaaaaaaagtttttcttatctttcttttttttttaattatactttaagttctagggtacttgtgcacaacgtacaggtttgttacatatgtatacatgtgccatgttggtgtgctgcacccattaagtcatcatttacattaggtatatctcctaatgctatccctcccccctccccctaccccacaacaagccctggtgtgtgatgttccccttcctgtgtccaagtgttctcattgttcaattgccacctatgagtgagaacatgcggtgtttggttttttgttcttgcgatagtttgcttttttttctttcttttctttttctttttttttttgagacagggtctcacccttttgctcaggctggagtgcagtagcaggatcttagctcactgtaacctccacctcccaggctcaagtgatcctgccacctcagcttcctgagtagttgggcctacaggcacgaaccaccacactcggctaattttttatttttattatttatttatttttatttttttattttttggtagagacagggttttgccatgttgcccaggatggtctcaaactcctgagctcaagtgatcctcctgtctcagccttccaaagtgttggaattacaggcatgagccactgcgcccggccaaaatcaagttttaatgtgcttattgcatgggaaaaagaagtgaagagagttattctccaaaagggtcacatttgttctaaatctttgtgtggtggaattgaaaacaatgtttttccatttgttctctttcttttttgttttttcgaggcagagtgtcactctgtcgcccaggctgaagtgcagtggcacgatctcagctcactgtaaccaccgcttcctgggttcaagcgattcttgtgcatccgccaccagagtagctgggagtacaagcgcaggccatgatgcccggctaatttttgtatttttagtagacagggttttgccacgttggctaggctggtttggaactcctgttttcaaatgatcgcctgccttgttctcccaaagtgctgggattacaggaatgagccactgcacccagccttccatttgatctcatttctaatttttctaaaataaacatggattatttatgcaataacaaaaagaatgcaaaaatgcactcaaaaatgcgcctctttggagaggctcctaggacagggaggattgagggccaaggcacttgccatctgtttatctgggagcagcacaggcttctctctcatttcctaggtcatctcagttcttaggagagactggcctgctgtttagagataggagagactggcctgctgtttagagggaggccctgaggccctgatagtgaagaagcagaagtagacagaagtgaagcagtatccattttgtctgagacagctggagagggccatcaggcaggacagaggggagtgaagagggaggaagggtacaaacagcagaacctgactggtggatgagaggatgggagtagaggggtgaaggtgggcagtcctggcagctttgtggacgtgtctgctccgagacagcaaaaggatagtgggtgcccaaggagacaagtgccagcagggactgagcatgtcccatggcaggatggcagtgcaaggctggggtgtcctttagggtggctggatgggaacgaagggcttcccctctcctctcctcaacttcagttcagaggaactccacaggcatcagatgtgactgccttagaaaccaaggcagtggccacagcaccaaggaaatgggacgttagagtcagcaaggtcattaaaagagaataaaatggtcttacctatatttaaaataggtaacaggctgggtgcggtggctcatgcctgtaatcctaacactgggaggccaaggagggaggattgcttgaggtcaagagttcaagatcaacctagactaacatagtgagaccccgtctctattttatatatatattttatatatacatatatttgggtttttttttgttttcttactttgtttttattttttgttgttttcttttctcttttgctcttttttatttccatcttatatttttaaaaaataaaatataatagattttgtatatataaactttaaactttggagatgaaaaaataatagatcaaaactaccacaaaaaagaacagtttgtggtcagtggctcacttgctgccctaagtccaaactgaggggagcaagtgcttttgctactccgtgtcttatgtggccagtcctggctggggatgaagccaacactgggggtcaccaacatggcctcttttttttttttttttttttttttagacagagtctcacactgtcactcagcctggagtgcagtggcacaatcttggctcactgcaatctccacctcccaggttcaagcaattcccctgtctcagcctcctgagtagctgagattataggtgcccgccaccacatccggctaattttttgtatttttagtagagatggggtttcaccatgttggccaggctggtctcgaactcctgacctcaggtggtccattcgcctcagcctcccaaagttctgggattacaggtgtgagccaccgcacccggccatcctttcttaggcttttgcagttctcccatttcaccctggctcccggaagcggaaacgggagatatcaacgcaaggcaaccaggtaagggatgggtgtatgtaaggggtcagaaaggagtgagacacaagtgtcccccacacctcactccaaaacacacattcagcttcagcacaacctcctgtattgcaggtcagatccagagctccccacaacagaccacagccaggaaaagcaaagggccctgcagtgccctggtggactatggggagggtgagtatcctgcagaggagcaggcagcattaggaagttgtgaaggagggtaaacccccaacttcctcactacctgacaaagactcctctacaacaaaagggaggccaaatgcaggcaaacagaaatgagacaaagagaagaggggaagtgctggcagcgcagtgttctagttccattcctgaggtcctgctctctgtaggtgccccttctggtctgtgagctcccctgtgcctctcccaagcgctgtacagaagccccccttttccttcagccagtttggtttctgctgggtttctggtttcagagctttacgctggtaaccattaggctatgctgcaacatggcagctatgggagctcttaaagccccaaaccactggaccttacaaatctcacttctgggagtcatgttaagaaaataatgagtcaggcaaagattttatcacaataatatgaacaaaaatttaaaaaattgaaggccaggagtggtggctcatgtctgtgatcccagcactttgggaggctgaggcgggtggatcacctgaggtcaggagttggagaccagcctggccaacatggtgaaaccccatctctactaaaaatacaaaaattggccaggcgtggtgacacatgcctgtaatcccaggtactcggaaggctgagacaggagaatcgcttgaacccgggagatggaggttgcagtgagccgagatcatgccacttcactccagcctgggtaacaaagactccgtctcaaaaataaataaataaataaaaataagaaataataataaattgatgttttatgaggacaggaacttgtctgttttgttcatagctatactcccagaacctggctcagtaagttatctattatataaatcaataaacctaacattgacctttgaatggttaaatcagtaaggtacatacatataataagtagtcattaaaactgtcttaaataacttttcagtgacattggaaaatgctcatgtctactagagaaatttcaaaactacatgtacatcatttatttccaatgatggagaaagtagatatgcataggacatgatagtgtaaggaaatacaccaaaaatgtttgtaagaaactatctttgggaagtatgatgtggatgattttatttttacttttatctccaaactttcttcaatatgtctgtattacttttcgaatttaaaaaatacagaggccaggtgctgtggctcacgcctgtaatcccagcactttgggaggctgagacaggcagatcacctcaggtcgggagttcaagatcagcctgaccaacatggagaaaccctgtctctactaaaaatacaaaaaattagccgggcgtggtggcgcatgcctgtaatcccagctactcaggaggctgaagcaggagaatcgcttgaacccgggaggtggaggttgcagtgagccgagatcgtgccattgcactccagcctgggcaacaagagcgaaactctgtctcaataaataaataaataaataaataaataaaacatagcattattttgcttaatagtaaatattatatttggtcctcactttaaagggtgcacaaactgagggcctggggacttgctcagggaagttcacagaaagcagccccttgcctgggagtgggggtgtgcattacacggaaaggactagaaaagctagcagagagaccatgggaactaagggtcctcagctcttctgagtcctctaggaacgccaccttcttcctctctacttctgtcatttgttccctgcggccccttatatttactactgatagaaaaggaaacatcacattggtggagcttttaaaagcaagagacaggtcgggcgcggtggctcacgcttataatcccagcactttgggaggccgaggcgggcggataacctgatgtcaggagttgaagaccagcctgaacaacatggtgaaaccccgtctctactaaaaatacaaaaattatccggtcgtggtagcgggcgcctgtaatcccagctactggggaggctgaggcaggagaatcgcttgaacccgggaggcggagattgcagtgagccgagatcgtgccactgcactccatcctgggcaacaagagtgaaactccgtctcaaaaaaaaaaaggcaagtgacagcaaggggctggggggtgcgggatcgcggaagagtcggagactcgaacttgtccttcttgtatctagtttggacaaattcgcgagaaacactcaagttcaagtgaataagccgcggctgaccaccctggtgccgcctcgccgccacctggtctgaacctcgccgccacctggtctgaacctacgccaggagggcctcgttcatccccgcaaatcggcaacctggagaattcctgtgggccttgaggggcatctgatggccagcgccagaaataatattagccaggcctgggccaggcctcagccctgagcccgaggtggcttagggacggcgacctcagccttggggtggggggggggggtgggggcggccgggcgtcctgggccggcgggcgcctggagctcacgccaagctgccacaggggcttccgggactccagcccggagttccgccctccagtcgcgagcggaggaggcgggcacgcggcctggctcggccgcggattggcctgccccgagatcctggccactgattggtcgcccggacggggcggggccacgtggcctaaggcgccatcagccgcccgggagatatccgccgggggagaatagggttgcaccatcccagaagctgctgttagctcgccggtcctcggcacgccgcccgttcgcccctgcgctgtccgcccttcccctagcgttacttccggtccctcgctgagggggttcgtgcggctcccaggaggcgtgaaccgcggaccatgagcgtgggcttcatcggggccggccagctggcctatgctctggcgcggggcttcacggccgcaggcaagcgcgtggaggcgggaggcggcttcgcgggcggtcccgaggcccgagggggcctccgtcccaccagcatgagcgaatgaaaggggagtttgcgtccggtggggtagatgagactctggttgagcagcaagtgcgtcttctgtcctcgtagagggttgagggggagagggagactggcactgttaggacggctctgggttttagagccagggaaagcgtggtaacgggctgggccgcgacccctagttgaaaagctctgtcttctgcaggcatcctgtcggctcacaagataatagccagctccccagaaatgaacctgcccacggtgtccgcgctcagggtaggtggagccgggcggagtgggaagcgggtggaggcccaggaaaaggatgacctgagatgaagtgagtctggccggcccctgcgcccaagtgctggtctttggccggcggtgacctttactccaggaacgtgacaatctttccaccttctcttgggcagctcaatgtggtgggaacacccagggagacataactgggggtcagatccagacactggagtggtagaggattaactgaggtgattatgtgatgaaagcacctggcacatagtaggtacctaataaatactcattttttaaattttttttcagacagggtcttactctgtcgcccaagctggagtgcagtggcgcgatctcagctcactgtaacctccgcctcccacctcagcctcccacctcagcctcccgagtagctggaattacaggcatccaccacgcgcagctaatttttgtatttttggtagagaatactgttggccaggctggtctcgaactcctggcctcaagtgatctgcccgccttggcctcccaaagtgctgggattacaggggtgagccactgcgctcagccatttttcttaatagacgagttgtatgaccttaaagtactcagccactttgaggctatttcctcatttacaacagtggccactttgctgttattctgagtcgtgaatgagcatattgggaagaatctggtgagttagttgttctgttctccaaaaacatattccaagtcttcacccaaaacctgtgctctgtgggagaggatggctgatgaggcaggtgacaggcagtgtctgtgcctagggtgggctgatgtccctagcactggagggtcctgcttctcagtttggagtcatagagggatggatggcttccagcctagccctggaccacatggagactgtgcggtccccacgaacaagcggccagggttaggatagggcctgactcagctgtgcttttaacgaccaggtattagcatttccctttgccctgccactttcaccatagggccttcttacctggcagaggagtgccttagataccagaagattggcagggaagaagggcagccacttcctggttaccatggagaagcttgtcatgctccaagcctgtgcttacttgtccagtagcaacaatgggaaactgtattatttggggtaggggtagaaccctgagggcataaagctaagaattccaggctgcatctggcagaatcggtttggcaggggttcagctgctccctgggaggccttggcatagccaggctgctccagcactgtgagctgggagtctcctcttgcagaagatgggtgtgaacctgacacgcagcaacaaggagacggtgaagcacagcgacgtcctgtttctggctgtgaagccacatatcatccccttcatcctggatgagattggggccgacgtgcaagccagacacatcgtggtctcctgtgcggctggtgtcaccatcagctctgtggagaaggtgcccatctcagccctgatgccccttgtgtgaggggagggttgacccacgaatggcagctaatgggtgggtgctggtgggagccgtgccctggccactcattcggctctctccctcaccctagaagctgatggcattccagccagcccccaaagtgattcgctgcatgaccaacacacctgtggtagtgcaggaaggcgctacagtgtacgccacgggcacccatgccctggtggaggatgggcagctcctggagcagctcatgagcagcgtgggcttctgcactgaggtggaagaggacctcatcgatgccgtcacggggctcagtggcagcgggcctgcctatgtgaggccctcatttgctcgctcagccttctaggaacccaggcagcaagatgggctggcaggcaggcttggactgggggtggcgcccacctcttgggcacagctggctggtacaggatgctgacccttggagctagttctagtcatcagaaagcagacctaaggaaaggcccttcagtgcctatggcctggggcttagtgagtgtctccacaggcattcatggctctggacgcattggctgatggtggggtgaagatgggtttgccacggcgcctggcaatccaactcggggcccaggctttgctggtcagtatctttcccccgcatgttcaggaccagggtgtagaatgggggttcttgtgcatcactgaactgaggtgggagttggttgggaagctggggtagcagttgggcaggagcagtgggtatgggaagcctgttccaacgcacaccagcaactttctcctaatgtgcccttccccatagggagctgccaagatgctgctggactcggagcagcatccatgccagcttaaggacaatgtctgctcccctgggggagccaccatccacgccctgcactttctagagagtgggggcttccgctctctgctcatcaatgcagttgaggcctcctgtatccgaacacggtgagtccatcccgcggacttctgtcccagacccttcagtcctggttggtccctgggctgggttgagcaccatttgcggaacctgctgtcttgggtcccatttagcagtgttggagtctgtgctctgttaataaccacaacttagtagattttgtttacctaagagtttgcaagccttacttcacttaattctcactgcatttcagataaccaggattaactttgacttgtagatgggaagttgaggctcagagataattttcccaaggtcaaacagttaaaaagtgatggagacaggattctaatttgaatctatgactccaaagcctgtcactcttcccgtgtgatcacagataccacttggggctctgatcaaatgagataaataagcaaaccctaacttaggtaactaatacttcttagaagtactagttgggaagtactagttgggaagcgtttgtcttggggctctaatttttggtggtgtcacatcaacaagcttgagggttgtgtggatagtggagactcaaagctctggccccagggtttattgccttcctttaatccttctggggttttgtctgcagagagctacagtccatggccgaccaagaaaagatctccccagctgcccttaagaagaccctcttagacagagtgaagctggaatcccccacagtctccacactgaccccctccagcccagggaagctcctcacaagaagcctggccctgggaggcaagaaggactaaggcagcatctgtcccctctgtgattcagagcccttagttgagagcccctgccgcccctgccacccccctgccccgctcccaccattgcccctcctcagctgtgcaaggagaaagcatgcttaggaagttttcaggtccttgtgataaaacctccttaaatctgttcagaccaagcaatgcgagcttcctctcctgtcccatgttggaagttgctctgaaggggtggtagatgctggaagccagacacaaccctgcgtacgctgctcagttggtggagactggggctgggactggagtcagcccagctgggaggaggggctggggaggatctgcagctgaagcccgaggcagggttggtgtgatgccaaggcaaagtggtgaggagaaaacaggaaacgggctttctctgaattggtaaatgggaaagaagtgagcaacttaagattgtcacaattaatcacaagtgtacaggattagactgggtttatatttaactcttgcttcataggtgtaccatttaaagagtgttatttaatgctaagtttaactgctttaataaagtttatttttaaatatcttgcttttgttaggcttaatcttaaataatcatcctggagaacttgatgcccttgtgaggtcctccctgcttctctgcgagagcactgtccaagggctagaagtagggatgagaggaataaggggccaggcccttggtctggatcaaggtgttgttctagaatgagccaaagctaatggcagggaagagccaagtgggctgcatgggttgtgggtcagcagcccagaataaaggggaaagccgtctgctttgatgtggggcaggcactgtgctgagcatttgatcctcacagctgccctctgaaggaagaactgttcttttctcaccgtatagatgtcgaggccagccaggcgcagtggctcacgcctgtaatcccagcactttgggaggccgagccaggcggatcatgaggtcaggagatcgagaccatcctggctaacatggtgaaaccccgtctctactaaaaattaaaaaaaaaaaattagccgggcgtggtggtgggcacctgtagtcccagctactcgggaggctgaggcaggagaatggcgtgaacccaggaggcggagcttgcagtgagccgagatcacgccactgtactccaacctgggcaacagagtgagactccgtctcaaaaaaaaaaaaaaaaaaaccatctggaggcctagagggataagcaacttaccccatttgtgctgccggtcagtggtggggctgtctgtgttcttagctatcaattctgcagcctcccagaaatagctgggcatgccatccacatagccagacatccagtgtttctctaggcaggccggtgtgtgcctggtacttgttcctacgagctgcctgcctgtgcagcagggctgtttgaaaaggcatgcgaggccgggcgcagtggctcatgcctgtaatcccagcactttcggaggccgaggtgggcagatcatgaggcagagagatctagaccatcctggccaacatggtgaaaccctgtctctactaaaaatacaaaaattagccaggcatggtggtgtatacctgtaatcccagctactcgggaggctgaggcaggagaattgcttaaacctgggaggcggagattgcagtgagccaagatcgtgccaccgtagtccaccctggcaaaagagcaagactccatctcaaaaaaaaaaaaaaaagaaaaaaggtatgggcattggcatcagcatcagctctgggttcaaatcttagattcccctgctttctactccacagcccgggagaagttaccaaatttctcacagcccgggagaagttaccaatttctctgatctcagggtttcatcccttataaatatggagcccatgtttcatcagggtgttaaatgagaccatgtggcagtgctcaacagaacatctggaacaccatggccccttcgtgtaaatggtgttcttccttcaccctcctgctgagaagagagtggagccttgttccattccactgagtcagggcagccccagctctaactccaaacctgagagcacatgggaagtcattcttctgggccaacacagcaagtgcaatactaaaaactcatttaaagtccccagtatgtggccggccctttgcagacacttcacacatactctcatggccttaggagctgggtatatttttttttttccccagaaaagtgaggctcaaagaggttaaatccaagttgcccaaaaagatttgaacagacatttcaccaaaaaagataaacaaatggtgaagaagcacgtcaaaagatgctcagccttaaaatagttattagggaaatgcaaatcaaagcccaatgagataccacttcacacccacaaatatgactgttcttggttttaaaaaaaatagcaaatgttggcaagcacgtggagaaattggaacccttgtgcattgctggtggggatgtataatgatgcagccactttgggaaacagtctggcacttccttaagagattaaacaagctgggtgtggtggtgcacgcctgtagtcccaactactcgggaggctgagaagggaagatggcctgagcccagaagttcaaatccagcctgggcaacatagcaagagcctacctctaaaaaaaagagttaacaaatgactcagcaatttcgctccaagttatacagtgaagagaaagacttgcgtatgaatgttcatgacagtgttattaagtagccccaaggtagaaacaacccaattggtcatcagctggtgaatgggtaaatatgttacacccacacaatggaatactcagcagtaaaagagatgcgagtacagacacatgaacctgtaagacatgccaagtaaaagaagccagtcacaaaaggccatgtattacatgattccatttatatgaaatgtccaaaaaatgcaaatctatacagacagaaatagaagttgccagggactgtggtggcaatgggaagagcgcagagtttctgttggagccatggcaatgatgtaaaataagatcacggtgatggtttgcacaactccatacatatggtcattgaattgtacacttaaaagtgggtgaattttatggcatgtaaatcatacacgataatgtttttaaaaatgaaataagctgcccaagttttaattagctaggaagtggtgccaggattcaaatctgttatctgataccaaatcctatcctctctgtgctaggcctgctggcaagtcatcctagatgacaagagattgttgcctgcattttcctctcctccatcccctgcaagaccacccctttttccaggcctaaatataccaacatacatttactgaggacctactgactgccaggccccatcttatgtcttggtgcacggggtcaccctggctaagatgtgtcctcacctgccgagcactgctgcccttcccttctgaacttcagtcaggtatgatcagggccagatgggaatgagggtggttgaggccctggtcctgcttcagggagaggaggagagggccattccttggagaaaatttccagtcatctctccccaagacctcaggcctgtctggggaggccaggaagtacccaggacttccgcctcccagcttcccaccttctcacagggctgatgagccttggggccagagctgccggcagtcagtgagggctggcaactccccgaggtggtcaagagagcccccagtgtgtcaggccccagacagaggcactagagcttgcattctaggcccatcaggtgtccaagccaccaggaaagcaaccagatacccctgcaagagctggcattgagggttagcgcagccttttcactaaggatttgctgaatgctcctctcagtgccctgtgaggcctgggtgtgccctaggcagtcagactgtcctggcccagcgcgatggctcacgcctgtcatcccagcactttgggaggccaaggcaggcaggtcacttgagcccaggagtttgagaccagcctgggcaacatggtgaaaccccgtctctacaaaaaaaaaaaaaatgcaaaaattagccaggtgttgtggtgcatgcctgtggttccagctactcggggtagaggtaggaggatcgcttgagtccttgaggcggaggtcgcagtgagccaagatggcatcactgcactgcagcctggcccacagagcgagaccctgtctgaacaacaaaagactgtccttgttcagagttgtacaagggctgagaacagatgtggacaccgcaatgtgacaaatacgggaagcgagagaaggcagcctggagtggactgaaagtaggggagcgtgctgttgggaaagacagcctcagcctttctgccccctctgaaaggccacatgagaatgggcctggaacattcctcacaaagagctaaagtgttctcaagcctgtggtggacttgtcactttgcatgggcgcgtctttcctgtttagacttgatgtatattcctttagtctgcttaagtgtgcatcacatggcacctggccaagcccaccactatatctgttcccactggggaggggcaaggtccttctgctgcagcacagagaggtgtgtgcaggcccatggccctgggttaccgctgggagggacctgctggccatggggaccaacacccaccactgaagctgtgttcgctgctcttttctagtatgagtaaagtggagtagcccgggcttgactgtgctgttgcccctggcaactccagttacgagactcagtgagcagaagtgctaggatttctgctcctgataataggcaacagatgccacttgcgcacaggaaccagccccctctccctgttcccagctccctgcactgccctcttctcaggacccctgagcagcatagccttaagtaccccccaatcccgatttcccagtgggtgtctcttaggaccccagaaaaacgcttccttacctattgcctccatgttactctcctataaaatggggcaaactattgccccaactattaatgatcattacttcggggaagtaggattgagattgacttttcacttaatttcttgatttctttattttactttagattgttgattgcagtaagccggcatgattttggtggttaaaagatctaaagatttttcccactgctcccactcgtggggcatgctagaaaacaaatgcaccctccctcatctcctgcatccttctttcatccccctgtctgtgcgtgtcccctgcaactgttactaagcaacgctctccaaagaaacaccgagagtcagcctcagcccaaggggctggctgcgctttccttcactgtttcaagcaggagagctagtcctttctgcacatctgagcaaaatacttgtaaagccttgacttgtattcacttttaccaataaactagatggaacacagaagtggatattgtgattatatgaagtccatagcattttgaaaatgaaataccccgcttttcaaggtccaagccagtgtgggtagtatactacctttatgtaagaaagggggaaaatacaaaattggataaagaaattctagaaggatataccagaaaccactaaaacagtacctggttgtggggggcagtgggaatgtggcagataggggcagggcaggagggagacctttcattacaaacctctttgtatagtattgatttaggaatcacataaggggattgcttagttacaaaatgcatttggacagcctttagaggggccaggctgccctggccatgcggtactgaagcaggatgcgtggccccacgtggtcagtcaaggtgggagcacgtcctgtgtgccctactttggcctcgagctgtgtcttggacactcctgcaggaacacttagcatgagagctgggctgcaggccatcttcccaatcctagtgcatggtacccaataaacacagctgaacaaatgcttgaatgaatgacagctcttctgcttgaatgtcaggttgggctgttgcctgagtgcccaacgaggtctctggtgtattggggtgaaaactctgtgcaactcctagactgtccttggacctggtcattcctggtttggttttttaaagtatttatttttttgtttatttatttacttatttattattttttgacacggagctcaggctggagtgcagtgtagatctctgctcactgcaacctccacctccctggatcaagcaattctctaatttttttggtatttttagtagagacggggcttccccatgttggccaggctggtctcaaactcctgacctggtgatctgcctgccttggcctcccaaagtgctgggattacaggcatgagccactgcgcctggccctggtttgtttttgactttcttttattcaatcagcaggtgttgattgagcactgaagggctgtgcttgtgcccgattggctgggatgtggggaagcctagtacgtttctgtcctggccactttgcctcatgggtgctctatgagtgtgcctgctcctccccccgtgtgttgcccaagagcctgttcagtacatggatacttcagaggcatcctcccaattcttacagctttaggcttcttcaggtaacagggaagtacctcaggaatattcaagtaaaaagggattgggatggttatcaaatttataacagttttccattttaggaaggattatgtggataaatgttctgtcctccttgaaaataagtgactgaaaacacatgctggtgggctgcagcagagcatgtgaggtttggctggacatcagagacttgtcaattgaggtactttgatattgagcgaccacgagaggctgagaaaccagtgtggggtccggcgtggtggctcacgcctataatcccagcactttgggaggctgagacagatggatcacttgaggtcaggagtttgagatcagcctggccaacatggtgaaaccccgtctctactaaaaatacaaaagttagcccagtgtggtggtaggtgcctgtaatcccagctattcaggaggctgaggcaggagaatcacttgaacccgggaggctgaggtcgcagtgagccgagatcgctccactgcactctggcccagacgaccgagcaagactgcatctcaaaaaaacaaaacaaaacaaaaagaaaccagtgggggtatgtacctctcagttactgctccaccctgaattctaagatatgtgaatatgaaattagaatttcatgtgtagtatcttttcaattaaattacaataaagattgctttccttctgccagtgtagttaatgaacttctggtaacagtaagagcaaaggcctgagttctaatcctcactgctcaggtgacttcaggtaagtcattagtctgctttggtttcaacttattatttcattaaaatgggaaatagataatacttgctcatccttctctcagggtggtcagttgctttgggcaaagcctttgggtaacctgggtcactgtgcagccgggaggcccctgggcaggtgaccatgttgctttgacacaatccctcccccttctacaatcccacacactgcaagctttcctctttcctaagatgggaagcccagccaatgctccttgtcaagcaacttcacatatatgacttgaggcgtagaagctttaaaaacaaacacgtgtcttctttttatgcaccagatctggttttacgcatgcaaggcccatgatctcatttaatctttaataattatgatgtagttatttggaaaactcaggcttggacaagttgggagcacagccagtgaggggaaaggcctgggtgccaatccaggtatgtctaaaaccaagacccgttttacagtgcactgacctgaccttccatgtgcaggcactgctgccctcactgctctcactgaggggtcctctggctggaaaacaaggaatgatcccccaaaactaggctaggtgagaaggtggagatgtaggcagagggtgatgctgtggggatccctggataggtgcctgggaagaaggcccaaaaaacagggggggatggggactggcctccatatagcctgcagtggtgtggggaccttgcctgagtcactgggaaacccactcagagaagcaaatattttaatttttttgttttgtagaaacaaatataaccatcattactatctgctctttgaattaagggaaaggaacaagaaatgagcatttataaagttatgccattgcccggatccccgcataatgctccctttgccctaaacagtgtatctttctgctgaaccccacggccttccccagtgccccgctgtcttgctcacgccccctctccggggctgcctcctcttctctccccagctccttcctgggccattggtccttggcatcctggactgtcagttattttctcatgaacacaagtctttgctctatagtagcgcttctgggctgacaaggggctgtcactcgtcgcatccagcaggagtcccacggcgatctggaggcacgtagggagggggcatccccatccctgtccccatcgccattcccgtcccccataggaagaactcaaggcacccatccaagatgactggggaagccggtgtcaaaatctcagcctccagactcgagtcttctttcccgttttccccactcagctcacagaagagttcctaagaagacccttgaggacagcattgtatttttagtaaagacggggtttcaccattttggccaagatggtctctatctcttgacctcgtgatccgcccgcctaggcctcccaaagtgctgggattacaggcgtgagcccccgcgcctggctagtggttcctaaaaaacgtcccttcgcggctccaagcggtcccggccgcccgcggccgaggaggacctccccgcgccgccagagggcgccaggcgccacagccgaactccccaggccgccagccccggcctggttggagagaaaccgggtgcaaaccccagccccggctgggtgcccacctgctagttgtggcaggtcatttcctgagttcacatagcaaagcagctcagagttggatctaggggaaagcgctggaatccacgctccgcttccccacgcagcctcgcctgtggccccagcagcgccctctgcacatgggaggtcgggcagcttagcggagctccccggccagggactcaggcctcaccaggggcccgcgtgtccagcctgacgtgggccatctgaatcgaaatacacccatcttgctcaagacgaggcctagagagtcagtcactttaacgacaggtgaccttgggtgagttattcaacctccaagaacttatctgtcaagtgagggtgagaaggatccccacctcatgggctgagatgaggattcaatgagataaaggctgggcttggtgtctggcaggacagcgctaataaccagaggttgctgtggtgttgattataactgttagggaaactgaggcctggagaggttaactggaaagacaggacccagcaccggaagtgggtcaggctccactctgggagggttcagggtccttgttccccagggcaccgctggctccagacctggttcccaaacctaattgatcatctgcctttttaaattaagggaaatagagaggaaactagcatttattgagttctgtttccaaccttattacccttgactcctcaaaatgctttttctatctgaaaaccagacctgtgcttaactgtacaacccactgttactagtcacctcattttctccaccagaaatgccttctccttgtcttttctgcctctctgaatgtgacagaccctcatctcccaccccaaagcttggaatcagaatctctggaggttccactggagatgctgaccctcagctgggtgtggggccactgcctgtggagcttgatgaatccttgttaaattgaattgagctggttgtggcctgcagccaacattcctaggtgtccaaagagatagaccagaaagaaggtgaagaggaaacactgtaattaccagtcaatatatatttatttagatcatgggcacataaaatgcaaattattcatggaccaggaccccctatgttagggtgtcaatatcccgacacattcagggccagccctgggaaatggagttccaggcaaagagaagcctcagggcattgtggaggtaaggctggtggggaggatagagagagaagctggacttcctataaacttgaacttcctctgctgtgtaaaaattcagtggggtgaggtgcaaaaagcacctgcctcaacccgccctgcttgcatgcacacattcattcatttatttcaatcctcacctattgagtgtccactgtgggccagaccgggtgctacgcatacaatcagacctgatcactttattccccactggagttcctggtctggtggaggaaatcaggatacaaagaagtgattgcaaattccatatgacaagttaataaatggtggcagtgaggagcactgggagaagggaggaggtgttcaggaagacttggcagag

SEQ ID NO: 589 - DNA, 1745 bp, Homo sapiens
ccacgtggcctaaggcgccatcagccgcccgggagatatccgccgggggagaatagggttgcaccatcccagaagctgctgttagctcgccggtcctcggcacgccgcccgttcgcccctgcgctgtccgcccttcccctagcgttacttccggtccctcgctgagggggttcgtgcggctcccaggaggcgtgaaccgcggaccatgagcgtgggcttcatcggggccggccagctggcctatgctctggcgcggggcttcacggccgcaggcatcctgtcggctcacaagataatagccagctccccagaaatgaacctgcccacggtgtccgcgctcaggaagatgggtgtgaacctgacacgcagcaacaaggagacggtgaagcacagcgacgtcctgtttctggctgtgaagccacatatcatccccttcatcctggatgagattggggccgacgtgcaagccagacacatcgtggtctcctgtgcggctggtgtcaccatcagctctgtggagaagaagctgatggcattccagccagcccccaaagtgattcgctgcatgaccaacacacctgtggtagtgcaggaaggcgctacagtgtacgccacgggcacccatgccctggtggaggatgggcagctcctggagcagctcatgagcagcgtgggcttctgcactgaggtggaagaggacctcatcgatgccgtcacggggctcagtggcagcgggcctgcctatgcattcatggctctggacgcattggctgatggtggggtgaagatgggtttgccacggcgcctggcaatccaactcggggcccaggctttgctgggagctgccaagatgctgctggactcggagcagcatccatgccagcttaaggacaatgtctgctcccctgggggagccaccatccacgccctgcactttctagagagtgggggcttccgctctctgctcatcaatgcagttgaggcctcctgtatccgaacacgagagctacagtccatggccgaccaagaaaagatctccccagctgcccttaagaagaccctcttagacagagtgaagctggaatcccccacagtctccacactgaccccctccagcccagggaagctcctcacaagaagcctggccctgggaggcaagaaggactaaggcagcatctgtcccctctgtgattcagagcccttagttgagagcccctgccgcccctgccacccccctgccccgctcccaccattgcccctcctcagctgtgcaaggagaaagcatgcttaggaagttttcaggtccttgtgataaaacctccttaaatctgttcagaccaagcaatgcgagcttcctctcctgtcccatgttggaagttgctctgaaggggtggtagatgctggaagccagacacaaccctgcgtacgctgctcagttggtggagactggggctgggactggagtcagcccagctgggaggaggggctggggaggatctgcagctgaagcccgaggcagggttggtgtgatgccaaggcaaagtggtgaggagaaaacaggaaacgggctttctctgaattggtaaatgggaaagaagtgagcaacttaagattgtcacaattaatcacaagtgtacaggattagactgggtttatatttaactcttgcttcataggtgtaccatttaaagagtgttatttaatgctaagtttaactgctttaataaagtttatttttaaatatc

SEQ ID NO: 590 - protein, 316 aa, Homo sapiens
MSVGFIGAGQLAYARGFTAAGILSAHKIIASSPEMNLPTVSALRKMGVNLTRSNKETVKHSDVLFLAVKPHIIPFILDEIGADVQARHIVVSCAAGVTISSVEKKLMAFQPAPKVIRCMTNTPVVVQEGATVYATGTHALVEDGQLLEQLMSSVGFCTEVEEDLIDAVTGLSGSGPAYAFMALDADGGVKMGLPRRLAIQLGAQALLGAAKMLLDSEQHPCQLKDNVCSPGGATIHALHFLESGGFRSLLINAVEASCIRTRELQSMADQEKISPAALKKTLLDRVKLESPTVSTLTPSSPGKLLTRSLALGGKKD

SEQ ID NO: 591 - DNA, 1292 bp, Homo sapiens
ttgcaccatcccagaagctgctgttagctcgccggtcctcggcacgccgcccgttcgcccctgcgctgtccgcccttcccctagcgttacttccggtccctcgctgagggggttcgtgcggctcccaggaggcgtgaaccgcggaccatgagcgtgggcttcatcggggccggccagctggcctatgctctggcgcggggcttcacggccgcatcctgtcggctcacaagataatagccagctccccagaaatgaacctgcccacggtgtccgcgctcaggaagatgggtgtgaacctgacacgcagcaacaaggagacggtgaagcacagcgacgtcctgtttctggctgtgaagccacatatcatccccttcatcctggatgagattggggccgacgtgcaagccagacacatcgtggtctcctgtgcggctggtgtcaccatcagctctgtggagaagaagctgatggcattccagccagcccccaaagtgattcgctgcatgaccaacacacctgtggtagtgcaggaaggcgctacagtgtacgccacgggcacccatgccctggtggaggatgggcagctcctggagcagctcatgagcagcgtgggcttctgcactgaggtggaagaggacctcatcgatgccgtcacggggctcagtggcagcgggcctgcctatgcattcatggctctggacgcattggctgatggtggggtgaagatgggtttgccacggcgcctggcaatccaactcggggcccaggctttgctgggagctgccaagatgctgctggactcggagcagcatccatgccagcttaaggacaatgtctgctcccctgggggagccaccatccacgccctgcactttctagagagtgggggcttccgctctctgctcatcaatgcagttgaggcctcctgtatccgaacacgagagctacagtccatggccgaccaagaaaagatctccccagctgcccttaagaagaccctcttagacagagtgaagctggaatcccccacagtctccacactgaccccctccagcccagggaagctcctcacaagaagcctggccctgggaggcaagaaggactaaggcagcatctgtcccctctgtgattcagagcccttagttgagatgcccctcctcagctgtgcaaggagaaagcatgcttaggaagttttcaggtccttgtgataaaacctccttaaatctgttcagaccaagcaatgcgagcttcctctcctgtcccatgttggaagttgctctgaaggggtggta

SEQ ID NO: 592 - protein, 282 aa, Homo sapiens
MNLPTVSALRKMGVNLTRSNKETVKHSDVLFLAVKPHIIPFILDEIGADVQARHIVVSCAAGVTISSVEKKLMAFQPAPKVIRCMTNTPVVVQEGATVYATGTHALVEDGQLLEQLMSSVGFCTEVEEDLIDAVTGLSGSGPAYAFMALDADGGVKMGLPRRLAIQLGAQALLGAAKMLLDSEQHPCQLKDNVCSPGGATIHALHFLESGGFRSLLINAVEASCIRTRELQSMADQEKISPAALKKTLLDRVKLESPTVSTLTPSSPGKLLTRSLALGGKKD

SEQ ID NO: 593 - DNA, 1675 bp, Homo sapiens
cagaagctgctgttagctcgccggtcctcggcacgccgcccgttcgcccctgcgctgtccgcccttcccctagcgttacttccggtccctcgctgagggggttcgtgcggctcccaggaggcgtgaaccgcggaccatgagcgtgggcttcatcggggccggccagctggcctatgctctggcgcggggcttcacggccgcagcatcctgtcggctcacaagataatagccagctccccagaaatgaacctgcccacggtgtccgcgctcaggaagatgggtgtgaacctgacacgcagcaacaaggagacggtgaagcacagcgacgtcctgtttctggctgtgaagccacatatcatccccttcatcctggatgagattggggccgacgtgcaagccagacacatcgtggtctcctgtgcggctggtgtcaccatcagctctgtggagaagaagctgatggcattccagccagcccccaaagtgattcgctgcatgaccaacacacctgtggtagtgcaggaaggcgctacagtgtacgccacgggcacccatgccctggtggaggatgggcagctcctggagcagctcatgagcagcgtgggcttctgcactgaggtggaagaggacctcatcgatgccgtcacggggctcagtggcagcgggcctgcctatgcattcatggctctggacgcattggctgatggtggggtgaagatgggtttgccacggcgcctggcaatccaactcggggcccaggctttgctgggagctgccaagatgctgctggactcggagcagcatccatgccagcttaaggacaatgtctgctcccctgggggagccaccatccacgccctgcactttctagagagtgggggcttccgctctctgctcatcaatgcagttgaggcctcctgtatccgaacacgagagctacagtccatggccgaccaagaaaagatctccccagctgcccttaagaagaccctcttagacagagtgaagctggaatcccccacagtctccacactgaccccctccagcccagggaagctcctcacaagaagcctggccctgggaggcaagaaggactaaggcagcatctgtcccctctgtgattcagagcccttagttgagagcccctgccgcccctgccacccccctgccccgctcccaccattgcccctcctcagctgtgcaaggagaaagcatgcttaggaagttttcaggtccttgtgataaaacctccttaaatctgttcagaccaagcaatgcgagcttcctctcctgtcccatgttggaagttgctctgaaggggtggtagatgctggaagccagacacaaccctgcgtacgctgctcagttggtggagactggggctgggactggagtcagcccagctgggaggaggggctggggaggatctgcagctgaagcccgaggcagggttggtgtgatgccaaggcaaagtggtgaggagaaaacaggaaacgggctttctctgaattggtaaatgggaaagaagtgagcaacttaagattgtcacaattaatcacaagtgtacaggattagactgggtttatatttaactcttgcttcataggtgtaccatttaaagagtgttatttaatgctaagtttaactgctttaataaagtttatttttaaatatc

SEQ ID NO: 594 - protein, 282 aa, Homo sapiens; identical to SEQ ID NO: 592

SEQ ID NO: 595 - DNA, 1157 bp, Homo sapiens
atgagcgtgggcttcatcggggccggccagctggcctatgctctggcgcggggcttcacggccgcaggcaagcgcgcatcctgtcggctcacaagataatagccagctccccagaaatgaacctgcccacggtgtccgcgctcaggaagatgggtgtgaacctgacacgcagcaacaaggagacggtgaagcacagcgacgtcctgtttctggctgtgaagccacatatcatccccttcatcctggatgagattggggccgacgtgcaagccagacacatcgtggtctcctgtgcggctggtgtcaccatcagctctgtggagaagaagctgatggcattccagccagcccccaaagtgattcgctgcatgaccaacacacctgtggtagtgcaggaaggcgctacagtgtacgccacgggcacccatgccctggtggaggatgggcagctcctggagcagctcatgagcagcgtgggcttctgcactgaggtggaagaggacctcatcgatgccgtcacggggctcagtggcagcgggcctgcctatgcattcatggctctggacgcattggctgatggtggggtgaagatgggtttgccacggcgcctggcaatccaactcggggcccaggctttgctgggagctgccaagatgctgctggactcggagcagcatccatgccagcttaaggacaatgtctgctcccctgggggagccaccatccacgccctgcactttctagagagtgggggcttccgctctctgctcatcaatgcagttgaggcctcctgtatccgaacacgagagctacagtccatggccgaccaagaaaagatctccccagctgcccttaagaagaccctcttagacagagtgaagctggaatcccccacagtctccacactgaccccctccagcccagggaagctcctcacaagaagcctggccctgggaggcaagaaggactaaggcagcatctgtcccctctgtgattcagagcccttagttgagatgcccctcctcagctgtgcaaggagaaagcatgcttaggaagttttcaggtccttgtgataaaacctccttaaatctgttcagaccaagcaatgcgagcttcctctcctgtcccatgttggaagttgctctgaaggggtggta

SEQ ID NO: 596 - protein, 282 aa, Homo sapiens; identical to SEQ ID NO: 592

SEQ ID NO: 597 - DNA, 164242 bp, Mus musculus
  misc_feature (1)...(164242): n = A,T,C or G
tttgaagggtctgaccagaatttatagcaattcttagtcacctctttccactctcaaaccacaaaacgacagctgactggtactggaaagtcgtcaatgaagataataaaggacatgtacccaccctcgggatggctcttgagccaagctcaccagttctctagctgaggaccttctaagaagagctggccaagagaccaaagttctacagccttaaagtccaagatcgagatgctatcgggaggctgatgagattagtggcaagcagttctgaatttagcacccatctaagagctgggtgcagaagcacatgcccacaatcgcactgctgagaaggcagaggcatgaagatcactaggacatgctggccaaccaggccagtgggatcagcaaaccccaggtctcaataggaagtgacttctcaagaaattaggttgattaggaagatacctaatacctgacatctggctttcacatttgtgcatatacacattccgtgtatataccaacatacacagacacagatacaacacacacacacacacacacacacacacacacacacaccactctgagtgagccttctcctcggctttcaggtgccatcccttctgatctccttgcatgtctttcctctgtgcagacacaaggaacacactttctatgaagacagtaagtccaactaactcggggccctagtattctgacctcacttaaccttaattatcttcttaaggaatatgtctaaataagtcttacgggggattaaaggcttcaacacaggaatctgggtgggacacagttcagtccacagcacttgaatactgttacagagcatgtatgcagggcaccatccgtgtccctagagcatggaagtgctcagtggctgctgtccctgtgactccccctctctgtatcactctagcctagtgaagctgcctttgctgtagtgaagacaggtccagcccaggagcagggtgaacacattccttcttttcccacagctgtggcttcagatctctcctgggcactctcttgtttgttgagagtctgcctccccacgctgggctggtgactcaacctgacccttctgtttgggaatgaagatgtgagatttgattcctgttcaaggtcagagtccgttctgtgaagacatgatcgggctactactgatatttggtgatactaatatttggtgatatgctgagacccagaggtgccactaagggcttcctatatactgatgtcaccatgcagcacactagtaggacactttggtattcctcttacgatgaggacactgaagcttgagaattttggactccccccacccccaaggcttgcatgactgnnnnnnnnnnnnnnnnnnnnnnnnnnnnnnnnnnnnnnnnnnnnnnnnnnnnnnnnnnnnnnnnnnnnnnnnnnnnnnnnnnnnnnnnnnnnnnnnnnnnnnnnnnnnnnnnnnnnnnnnnnnnnnnnnnnnnnnnnnnnnnnnnnnnnnnnnnnnnnnnnnnnnnnnnnnnnnnnnnnnnnnnnnnnnnnnnnnnnnnnnnnnnnnnnnnnnnnnnnnnnnnnnnnnnnnnnnnnnnnnnnnnnnnnnnnnnnnnnnnnnnnnnnnnnnnnnnnnnnnnnnnnnnnnnnnnnnnnnnnnnnnnnnnnnnnnnnnnnnnnnnnnnnnnnnnnnnnnnnnnnnnnnnnnnnnnnnnnnnnnnnnnnnnnnnnnnnnnnnnnnnnnnnnnnnnnnnnnnnnnnnnnnnnnnnnnnnnnnnnnnnnnnnnnnnnnnnnnnnnnnnnnnnnnnnnnnnnnnnnnnnnnnnnnnnnnnnnnnnnnnnnnnnnnnnnnnnnnnnnnnnnnnnnnnnnnnnnnnnnnnnnnnnnnnnnnnnnnnnnnnnnnnnnnnnnnnnnnnnnnnnnnnnnnnnnnnnnnnnnnnnnnnnnnnnnnnnnnnnnnnnnnnnnnnnnnnnnnnnnnnnnnnnnnnnnnnnnnnnnnnnnnnnnnnnnnnnnnnnnnnnnnnnnnnnnnnnnnnnnnnnnnnnnnnnnnnnnnnnnnnnnnnnnnnnnnnnnnnnnnnnnnnnnnnnnnnnnnnnnnnnnnnnnnnnnnnnnnnnnnnnnnnnnnnnnnnnnnnnnnnnnnnnnnnnnnnnnnnnnnnnnnnnnnnnnnnnnnnnnnnnnnnnnnnnnnnnnnnnnnnnnnnnnnnnnnnnnnnnnnnnnnnnnnnnnnnnnnnnnnnnnnnnnnnnnnnnnnnnnnnnnnnnnnnnnnnnnnnnnnnnnnnnnnnnnnnnnnnnnnnnnnnnnnnnnnnnnnnnnnnnnnnnnnnnnnnnnnnnnnnnnnnnnnnnnnnnnnnnnnnnnnnnnnnnnnnnnnnnnnnnnnnnnnnnnnnnnnnnnnnnnnnnnnnnnnnnnnnnnnnnnnnnnnnnnnnnnnnnnnnnnnnnnnnnnnnnnnnnnnnnnnnnnnnnnnnnnnnnnnnnnnnnnnnnnnnnnnnnnnnnnnnnnnnnnnnnnnnnnnnnnnnnnnnnnnnnnnnnnnnnnnnnnnnnnnnnnnnnnnnnnnnnnnnnnnnnnnnnnnnnnnnnnnnnnnnnnnnnnnnnnnnnnnnnnnnnnnnnnnnnnnnnnnnnnnnnnnnnnnnnnnnnnnnnnnnnnnnnnnnnnnnnnnnnnnnnnnnnnnnnnnnnnnnnnnnnnnnnnnnnnnnnnnnnnnnnnnnnnnnnnnnnnnnnnnnnnnnnnnnnnnnnnnnnnnnnnnnnnnnnnnnnnnnnnnnnnnnnnnnnnnnnnnnnnnnnnnnnnnnnnnnnnnnnnnnnnnnnnnnnnnnnnnnnnnnnnnnnnnnnnnnnnnnnnnnnnnnnnnnnnnnnnnnnnnnnnnnnnnnnnnnnnnnnnnnnnnnnnnnnnnnnnnnnnnnnnnnnnnnnnnnnnnnnnnnnnnnnnnnnnnnnnnnnnnnnnnnnnnnnnnnnnnnnnnnnnnnnnnnnnnnnnnnnnnnnnnnnnnnnnnnnnnnnnnnnnnnnnnnnnnnnnnnnnnnnnnnnnnnnnnnnnnnnnnnnnnnnnnnnnnnnnnnnnnnnnnnnnnnnnnnnnnnnnnnnnnnnnnnnnnnnnnnnnnnnnnnnnnnnnnnnnnnnnnnnnnnnnnnnnnnnnnnnnnnnnnnnnnnnnnnnnnnnnnnnnnnnnnnnnnnnnnnnnnnnnnnnnnnnnnnnnnnnnnnnnnnnnnnnnnnnnnnnnnnnnnnnnnnnnnnnnnnnnnnnnnnnnnnnnnnnnnnnnnnnnnnnnnnnnnnnnnnnnnnnnnnnnnnnnnnnnnnnnnnnnnnnnnnnnnnnnnnnnnnnnnnnnnnnnnnnnnnnnnnnnnnnnnnnnnnnnnnnnnnnnnnnnnnnnnnnnnnnnnnnnnnnnnnnnnnnnnnnnnnnnnnnnnnnnnnnnnnnnnnnnnnnnnnnnnnnnnnnnnnnnnnnnnnnnnnnnnnnnnnnnnnnnnnnnnnnnnnnnnnnnnnnnnnnnnnnnnnnnnnnnnnnnnnnnnnnnnnnnnnnnnnnnnnnnnnnnnnnnnnnnnnnnnnnnnnnnnnnnnnnnnnnnnnnnnnnnnnnnnnnnnnnnnnnnnnnnnnnnnnnnnnnnnnnnnnnnnnnnnnnnnnnnnnnnnnnnnnnnnnnnnnnnnnnnnnnnnnnnnnnnnnnnnnnnnnnnnnnnnnnnnnnnnnnnnnnnnnnnnnnnnnnnnnnnnnnnnnnnnnnnnnnnnnnnnnnnnnnnnnnnnnnnnnnnnnnnnnnnnnnnnnnnnnnnnnnnnnnnnnnnnnnnnnnnnnnnnnnnnnnnnnnnnnnnnnnnnnnnnnnnnnnnnnnnnnnnnnnnnnnnnnnnnnnnnnnnnnnnnnnnnnnnnnnnnnnnnnnnnnnnnnnnnnnnnnnnnnnnnnnnnnnnnnnnnnnnnnnnnnnnnnnnnnnnnnnnnnnnnnnnnnnnnnnnnnnnnnnnnnnnnnnnnnnnnnnnnnnnnnnnnnnnnnnnnnnnnnnnnnnnnnnnnnnnnnnnnnnnnnnnnnnnnnnnnnnnnnnnnnnnnnnnnnnnnnnnnnnnnnnnnnnnnnnnnnnnnnnnnnnnnnnnnnnnnnnnnnnnnnnnnnnnnnnnnnnnnnnnnnnnnnnnnnnnnnnnnnnnnnnnnnnnnnnnnnnnnnnnnnnnnnnnnnnnnnnnnnnnnnnnnnnnnnnnnnnnnnnnnnnnnnnnnnnnnnnnnnnnnnnnnnnnnnnnnnnnnnnnnnnnnnnnnnnnnnnnnnnnnnnnnnnnnnnnnnnnnnnnnnnnnnnnnnnnnnnnnnnnnnnnnnnnnnnnnnnnnnnnnnnnnnnnnnnnnnnnnnnnnnnnnnnnnnnnnnnnnnnnnnnnnnnnnnnnnnnnnnnnnnnnnnnnnnnnnnnnnnnnnnnnnnnnnnnnnnnnnnnnnnnnnnnnnnnnnnnnnnnnnnnnnnnnnnnnnnnnnnnnnnnnnnnnnnnnnnnnnnnnnnnnnnnnnnnnnnnnnnnnnnnnnnnnnnnnnnnnnnnnnnnnnnnnnnnnnnnnnnnnnnnnnnnnnnnnnnnnnnnnnnnnnnnnnnnnnnnnnnnnnnnnnnnnnnnnnnnnnnnnnnnnnnnnnnnnnnnnnnnnnnnnnnnnnnnnnnnnnnnnnnnnnnnnnnnnnnnnnnnnnnnnnnnnnnnnnnnnnnnnnnnnnnnnnnnnnnnnnnnnnnnnnnnnnnnnnnnnnnnnnnnnnnnnnnnnnnnnnnnnnnnnnnnnnnnnnnnnnnnnnnnnnnnnnnnnnnnnnnnnnnnnnnnnnnnnnnnnnnnnnnnnnnnnnnnnnnnnnnnnnnnnnnnnnnnnnnnnnnnnnnnnnnnnnnnnnnnnnnnnnnnnnnnnnnnnnnnnnnnnnnnnnnnnnnnnnnnnnnnnnnnnnnnnnnnnnnnnnnnnnnnnnnnnnnnnnnnnnnnnnnnnnnnnnnnnnnnnnnnnnnnnnnnnnnnnnnnnnnnnnnnnnnnnnnnnnnnnnnnnnnnnnnnnnnnnnnnnnnnnnnnnnnnnnnnnnnnnnnnnnnnnnnnnnnnnnnnnnnnnnnnnnnnnnnnnnnnnnnnnnnnnnnnnnnnnnnnnnnnnnnnnnnnnnnnnnnnnnnnnnnnnnnnnnnnnnnnnnnnnnnnnnnnnnnnnnnnnnnnnnnnnnnnnnnnnnnnnnnnnnnnnnnnnnnnnnnnnnnnnnnnnnnnnnnnnnnnnnnnnnnnnnnnnnnnnnnnnnnnnnnnnnnnnnnnnnnnnnnnnnnnnnnnnnnnnnnnnnnnnnnnnnnnnnnnnnnnnnnnnnnnnnnnnnnnnnnnnnnnnnnnnnnnnnnnnnnnnnnnnnnnnnnnnnnnnnnnnnnnnnnnnnnnnnnnnnnnnnnnnnnnnnnnnnnnnnnnnnnnnnnnnnnnnnnnnnnnnnnnnnnnnnnnnnnnnnnnnnnnnnnnnnnnnnnnnnnnnnnnnnnnnnnnnnnnnnnnnnnnnnnnnnnnnnnnnnnnnnnnnnnnnnnnnnnnnnnnnnnnnnnnnnnnnnnnnnnnnnnnnnnnnnnnnnnnnnnnnnnnnnnnnnnnnnnnnnnnnnnnnnnnnnnnnnnnnnnnnnnnnnnnnnnnnnnnnnnnnnnnnnnnnnnnnnnnnnnnnnnnnnnnnnnnnnnnnnnnnnnnnnnnnnnnnnnnnnnnnnnnnnnnnnnnnnnnnnnnnnnnnnnnnnnnnnnnnnnnnnnnnnnnnnnnnnnnnnnnnnnnnnnnnnnnnnnnnnnnnnnnnnnnnnnnnnnnnnnnnnnnnnnnnnnnnnnnnnnnnnnnnnnnnnnnnnnnnnnnnnnnnnnnnnnnnnnnnnnnnnnnnnnnnnnnnnnnnnnnnnnnnnnnnnnnnnnnnnnnnnnnnnnnnnnnnnnnnnnnnnnnnnnnnnnnnnnnnnnnnnnnnnnnnnnnnnnnnnnnnnnnnnnnnnnnnnnnnnnnnnnnnnnnnnnnnnnnnnnnnnnnnnnnnnnnnnnnnnnnnnnnnnnnnnnnnnnnnnnnnnnnnnnnnnnnnnnnnnnnnnnnnnnnnnnnnnnnnnnnnnnnnnnnnnnnnnnnnnnnnnnnnnnnnnnnnnnnnnnnnnnnnnnnnnnnnnnnnnnnnnnnnnnnnnnnnnnnnnnnnnnnnnnnnnnnnnnnnnnnnnnnnnnnnnnnnnnnnnnnnnnnnnnnnnnnnnnnnnnnnnnnnnnnnnnnnnnnnnnnnnnnnnnnnnnnnnnnnnnnnnnnnnnnnnnnnnnnnnnnnnnnnnnnnnnnnnnnnnnnnnnnnnnnnnnnnnnnnnnnnnnnnnnnnnnnnnnnnnnnnnnnnnnnnnnnnnnnnnnnnnnnnnnnnnnnnnnnnnnnnnnnnnnnnnnnnnnnnnnnnnnnnnnnnnnnnnnnnnnnnnnnnnnnnnnnnnnnnnnnnnnnnnnnnnnnnnnnnnnnnnnnnnnnnnnnnnnnnnnnnnnnnnnnnnnnnnnnnnnnnnnnnnnnnncagacacagacacagacacagacacagtgggcatgggagagtatttggtttccttttagatagatagatagatagataatggatagattgaatagatgatagatagatagatagatagatagataggatagatgatggataaataggatagatgatagatagatagatagataggatagatgattgatagataggatagatgatagataatagatgaatagatagatgatagaatagatgatgatagataaatagcagatatagatagacagatgatagataaatgggatagatagataggatagatgatagttaagtaggcttttaatttctttctaattacctcaagttgtattctttatgggtatgtgtgagtgtggtacagtggatgtgtgtgactgcatgtttatagaggccagaggtagacactgggtgtcctcctccaccttattcctttgaggcagggtctctccctgaactgcagttcatggaactcaggaggggtttttggctaggctggcagctaggctaaaatcccagccattctcctgcttccagcagtgctgggtcacaggcacaggtgcaagcataaccacccatgaagaatgttaggatctgaactcaggccctcatgcgcatgccccaaaccctctgctttccttgtttctctttctttgagacagggtctatatagccaaggttggctttgaactctctggcctaaaactcacggaggttgtcccgactcagcttcctgagtgctgagattataggtgtgaggcaacatgccagatttcccaaacctcttccagtactgtgcaagcaagcagtatatgctgatctttcagtactgtgcacacaagcagtataagctaaaggacactctggggtccaagctgtgctttctccttacaaagaattatatctcagtggttgagcacaaatctagcatacaggagaaccaacgtgcatcatcttccaagtcattaaaaagactctctctctctctctctctctctctctctctcgtgtgacagagagagagagaatatttttgtgttgtcttcttatgatccagtataaaaccaatcagtcagtactttataggttcttaaaattaataaagacttttattttcatgaatgaattgatttaaacattacaagcaagcacagggggtgagcgccccgcccaggctacacttaaagctgtgttcatcactggactcccagctctggcatccctcagcttcctccacaaacatgcctgagtctggaggaggaggcatggagcaagctcagacagggtggcagctcaagatccagttaacccaaccaaactctgtccctaatgtcacactccgctgacaaaataaactcaagcctcctttaagtggcttgcccagggttgcaaggctgctcacaggcagagcccagcgtttgcatctgttcaaaaaaaaccctttgctctttcttctagaccacagtggcctctggggctgtgctcagtggtctgagactcagagccacaacatccatatgccacttaatttctactgtgacatttgcctcctgtctcccagaaaggaacagcctgttggcatctttttgtctttgagccccatcctgtttcagtcaaacgcctgcggctgagagcagctcttctgcagcctgggtcctttaggccacctcagcagtaggtgttccctggtgatgctgacccctcttttctgctgcctgaatcctcactaagggatcgtgattgtcacgctaggctgtgtggaatgctgcccacactgagccttgacataaagctattcctgaaggctggttggaaactcctcaaagccctctccttgatattttgaaagactcagcctcctttgctttccatccaccccattttgccccctccacgcccccccccccccgtcctcttttattcttcttggttctgtagaagaacactcagaagccagttattaacagactcgctctgtgggcacagagatctttctttcttgttttgaggtagggtcttgctatgtagtctaggccaacttgtgatttttcctgtctctgcctccagagttggcatgagccattttgataggataaggcctggaagttttgtgtcccttgcctgtacagtgaagtaatttaatgatattttgggtgacaaggacttcagggtccttgaaaagactggtcttaagatttcaggaagagaacagatgccaagacatgcaaagcaccttaaaaatataggcaactcctttcacttcacaattactaaacccaaggatcaggggtagggggctgggatcttcctgagttaaccactgggccagcaactccgcggggcctaatacaggtttccttgcccggccgagtgccttttccattacactggctgcgcctcagtaaccccacctccgaaagtgctaacgcagttccctcccagtgcctacccaggcggggtggggccccctccgtggcatggaacaaaccgggaaaaccacatattccaacttccagcacacaaaggctggttggccgtgggggcggggtgggaggaccggagctaagactcactactcagagatcctaggattctgaggagagcttctagattgccttctcaaggaggccaccctactttgtcccgtgtctcctgggcggtggcggcatgggggcatcctgcttggagacctccctcaaataaatggcctgttctagctccagtgtcccaccccttagctgcccacggaaatcttggagggacggtcttttcctttcctctttcccctccgcctcctaagcgtcacacagtttggttgatttgggtcatcgccccctctccacttccagtctatctcactccgggcactttcctttagtccaccgtcccacaccttggtagggaaaacgcgctccaaagctagcccattaaaagtgcacgannnnnnnnnnnnnnnnnnnnnnnnnnnnnnnnnnnnnnnnnnnnnnnnnnnnnnnnnnnnnnnnnnnnnnnnnnnnnnnnnnnnnnnnnnnnnnnnnnnnnnnnnnnnnnnnnnnnnnnnnnnnnnnnnnnnnnnnnnnnnnnnnnnnnnnnnnnnnnnnnnnnnnnnnnnnnnnnnnnnnnnnnnnnnnnnnnnnnnnnnnnnnnnnnnnnnnnnnnnnnnnnnnnnnnnnnnnnnnnnnnnnnnnnnnnnnnnnnnnnnnnnnnnnnnnnnnnnnnnnnnncctggcccgcccagcgagcgccccgcgcgctccccgcctcctggcccccagcactgcggagcagagcccggggcgggggagcgcggccagcggcgcctgctcgtcccctcccacccggccccttcctccgccctccccggccgctcgcgcttcctggcgctcgggctctccggaggctcaagttctgcacaacttctcccggctgcccagcgcctcggccgcgggcccggccagctagctgcgctcctcggctcagccgtctcgtccacagggcaggtcctcgtggagcatctggtaccaagtggccgctggcggtccctctctgcgccccacctctctgatcgcccgggtcccctcgcgtgggacggcggtgcttaggttcttggccctttctcctccccggtgcgcccggcgcgccggccgctgcgtaaccctccctgcgcccctcctctgccagctcctggaagccagtggtggggacccagactccctgatggtcaacgtgcggcacccggggcactcccgggccatgtaagcaggtaagctagccggtcgggagcagatactccaggcagagccaacttcgttcgccgccggggacgccgggatgcgcggtgggggcgccaggtggccggccgccggttctcttcgctagcagtgctcgctcgtccgggattgagctggaaggggagcgcggtctgggactcggattcagccaaaacatcgcctccagctcctgttgtgtttgcgagcaggggaacagagcgcagagcccaaagcttgtcctgtgcctctgtgggcactgggtttgtgagggggttcttgtgccctctccccaatacctcagccttgataccaaactcctgagtctcttggccccggcttgggtgatccttacaggcgcgcagggaaaaataccttcatctcagaccaatctccaactcgaactttgcaagttctgagagttaacagcccctttcccacgtgacgccacatctagttttaaatctttgggaatggttttcctatcttttctgggaggaattgatgtgcgctgtcactatcccgctttgcccttcttcctttggtttgaggagatattggggtcttgagtttagttggttcacggattagctgggtcctacttaggcgagttcagactgctgctgaatgggtgtatgtatggtcaatttccaaaatgcgttaatttcttgaaatggatttcctccctcattaattcaacaaactcagtggtgagtcttcccctgtgctaagagatcacattacaagagtctgcagcaccctgcaggcagccgtgggcggatggggacatgtgctgtgagagaggggttctgagactcttgggaaggccaggccctggaggaaaggggttaccttcgttgagggaatgatgctcaacttaggagtggttgagggaccgcattccagaggagggaacagcttgggcaaagtgaggggcgcggagaggggcgtgcagaaagtcttggagagcgacctggtggctggctgggcatgtatgggcaggttggtgcaatgttgctggcatagttagcccccaccccagcagaaacgaaaccggaagtcttttacccacttcccgtgaccaggagtagcttccaaggatcaaaagcgttcccttggacatgttccctcccctgatgtgtttcccacagggttctgtagggtgacaggtgtttaattgtcgttaatttacccatccttggttttgttaaagtatccccgtgaggaccatcccaccccactacagaaccttgtcctgagagcttttgacatggggagagcagtttgtgtcttacaagtggagtttcctctttggtgctggggacagaacctggtnnnnnnnnnnnnnnnnnnnnnnnnnnnnnnnnnnnnnnnnnnnnnnnnnnnnnnnnnnnnnnnnnnnnnnnnnnnnnnnnnnnnnnnnnnnnnnnnnnnnnnnnnnnnnnnnnnnnnnnnnnnnnnnnnnnnnnnnnnnnnnnnnnnnnnnnnnnnnnnttctgagtttccagcatcttgagttttctttgtactctctgaacctgtagaaaccgaaattttccatccttgtaactcagggtccagcacacactgcctgcaaagctcctcagtgcaggagaggttgtccacagtcacctctctgggggacttgttcactgggctgaagtgcatattcctagtggtcggtcctggctaagacgcaaggtctccagccttcatgtatcttaagctgccggagcggttccttgcaatttagggtgtttattcaggactctctctcagcccaactccgatcccaagagcaagcatgtccacggtggaagatctggaatgtgtgtgggacctgcatgagagaaatgtgtgtcaacaggccgctgctttgtgctgcttggtcccgggtctcctcgaggcgttcttccttggtgtgtacaaactcatagcaccgcagttactcaagctggtgtgagttatgttccacggtcagctggaagagaatcaccttagggagacgtttaatgttggcacaccacaaagaattcagaggcaatcagggcttccagacgagttcttccttgccccagggatgagcagaagcccagggctgtgaggatttccccagtgtatgctttttttactggattcctttcccaatgggggatacaagtattggcctcttcctagcaaattgagctcacctgggttccagagtcttgtctgtttttgaaggagaatttggccacattcttgcttttgaacttttcattgcttggttacctagtgctgtgtgggtttcaaatccattctgagcctcagaactttgctaggcacttggttggaggtgaggcaggaggagaagagataagatgaaatacttaattagccaattaaggaaggagagaaacagacaccaaagcttcagtagggaggaagttagtgtctgaactgagtttttgatctcccaaactgatgaaatggatttaatttgccctcctcctagggaaggttgattaagtggtcccaggagtgggtggggccaatagctgcaactttgtagtgagtgtgtatatgtttgtgtgagtgcgtatgtgtgttgtatgtgaaatacagctagacttgaattccaactcttccacttgagttttcttttacatttatttactttgtgtgtgtgtgtgtgtgtgtgtgtgggcacacatttgcgtctctctttccactttgtgggccccaggaatcgaactcagatggtggagcgcatccttaccggctgagccatctctccttcacagctctgctacttttgagaagtcttctgttgggctgactttgtagcttttctgaccgtttgtttcttcatctgtgaggtggagccaggcagatacggcttgccagagcatctatgagacttcagtgggatgccgtataatgtactgccttgtcaggagggtgcttgtgtgttggcggcctcgtatgtggccgtgaatgtgttctttgttactcagcagactgaactcacatgtgtgccaacatacacataaagctttgtccttgactttattttagactattggctcatagcaaacatgtccgctggcagctgcatgtggccctgcacactggaggtggcccatagcaccccaggcagtcggaaagctggtcaggaagaaggcagggaaaggacttcctttgccattccgctcttctatgcgacaaggggctagtgtgttgtgcgggtctttgcattccgaatgctgagatccagttacttaaaggatgctgggatcactgcctatattgaggaagggtgcagaagcaagctgctcacaaaggccctcctcggcagcctggacttccttctctgaagccccaacacagagtcagcttatggtagcacaaggcgggccagccacaggtggctaaattttggtgctgcctttcatccaagaaacctgaagaatttggcaaacattaactcactgatatccctaccaacttcctgggagggaaccggcgaagaaagggactcagacgtcctcaggacaggtgtgtcctcagagcagtgaccacagcgatttggatagatttcccacctgcagaattgcatgctggggagggtcagaaggacaaagcctagaaaaacgcaagcttgactacgattcttacagttgggaagagaaaggactttaactcttcccagaccccgcagtgactttaacgcacgttgcatgcaagctgattataaaaacatactcctggaactatttataatttgaattaaaggatgttccatgaagctttggcatacatggtaaggatggttgagtcttaagtcaggctatagatgacatattgattttgcatttcacagtcctgtcctttttggggggggagagggggggaagtacaggctttctctgtgtagtccaggaactcaatgagataccctgcctccagagtattgatattaaaggcatgcgaccataatggcttcttttcgtttttctctttgtggctctgtgtttcttaactttctttttctgccatgctatatttgccacagtcattggttcgccagccttgcacatacggtttgacgtgcgctccctcagcttcatccttaggccaagattgcatcctgagcttcctccctcaggctgaccccggggacctttgtgttgtcagagatcctgcacagtagctggccattccacaaatgttactgtctgcctgtaggaagaaaggtttccagtgaggagaaaaaaaaaaaaagcagaaagggatcgtgtggtggtggtctagcctcttacagttattaaatgactgtttgcgggtggtagaggatggctcagtgcttaagaacacttgctgtgtttgcggaggacctgggtttggttcttagtactcatttgtgtccagtggctcacaaccatctatgaatgccagcttccagggatcagacaccctcttctggtctctgtggttacccccaagcccccaccgagatgagcatatgcacacatatcaatataagcaaagtacacattaaaacatacctttgaatttgtaatgtttgagattttggtgtgcagccatattccagacttagtctttcaggggaccactgcctggagatctaattgcatgcagtctgcgggtttcgacctatctgtgggggtcaaatggccctttcataggagtcgcctaagaccatcggagaacgcagctatttacattatgatttataacagtagaaaaattacatttatgaagtagcaacaaaaataatcttgtggttgggggtcagcacaccatgagggactaactgttttagagggtcgcagcattaagaaggctgaggaccactgtcttacaggattttagctcacagagaaatgttattcattgtcgagcgctattatgtccgctgcggtctatgcgaaggtgttttacctttgtgccgtgcatttttacacacggaaactaaatttccacgttgggagttcattctggtttttcgttttgttcttcctctccctttcctccaaagagttgggtgttagccgaggcaataaatctgaaacccaagactccgatagccagccagggcttcagaaacatggctatcccaagctgtcccctgttctgcatagccttgggtaaacctgagcatcccctgttctgcctagccttgggtaagcctgagcatcccctgttctgcatagccttgggtaagcctgagcatcccctgttctgcctagccttgggtaagcctgagcatctcctgttctgcatagccttgggtaagcctgagcatctcctgttctgcctagccttgggtaagcctgagcatcccctcttctgcctagcctagggtaagcctgagcatctcctgttctgcctagccttgggtaaggctgagcatcccctgttctgcctagccttgggtaagcctgagcaccccctgttctgcatagccttgggtaagcctgagcatcccctgttctgcatagccttgggtaagcctgagcatcccctgttctgcctagccttgggtaaacttgagcatcccctgttctgcatagccttgggtaagcttgagcatcccctgttctgcatagccttgggtaaacttgagcatcccctgttctgcatagccttgggtaagcctgagcatcccctgttctgcctagccttgggtaagcctgagcatcccctgttctgcatagccttgggtaagcctgagcatcccctcttctgcctagcctagggtaagcctgagcatcccctgttctgcctagccttgggtaagcctgagcatcccctgttctgcatagccttgggtaagcctgagcatcccctgttctgcatagccttgggtaagcctgagcatcccctgttctgcctagcctagggtaagtctgagcatcccctgttctgcatagccttgggtaagcctgagcatttccttctccaagcagcacctgtgcattgctgctctctcgcctcattccccagagcaactgcagtctaagaatgactgagcaagatgtcttgtcctggtcgagcctgatccagcctgctgcagcctctcctggttctcaggcttgctatgggggagggaggaggtctcttacctgttcactaagtccagcatcgcacagaggctgggtgctgctcaatggccattcgtcctcagggagccgagggtcagccgtggacttgctgttttagtgcatctgtctgctgggctgtcatttccagttcaggcctctgacttgccaccggtttggtctgtccagcagcatccatctagtgagatctcctggcctgtctcaaaggagccccttagcacttcttcttctttttcttcttttttttgtttttgtttttgtttttttgttttttgagacggggtttctctgtgtagccctggctgtcctggaactcactctgtagaccagactggcctcgaactcagaaatcctcctgcctctgcctcccaagtgctgagattaaaggcgtgtgccaccaccgccttgccccttagcacttctttatctctgaacctggcagcaaacccttctgattcagctgctcaaggtgggcacttgggacactcttctttctttttaaatctgtttttttttaacttacagaaatgggtttcgctgtgacattttgtgtatttattattattattgttattattatgattgttataatactttgtgtgcttgtttgtctctcagcatgccattcttagcactgaaatgagcccttccttaacccctggagtaacaaagccgtggttattaattatggcctttgaggactctttagcatatttctaggttactctctttccttcatcactgagacccatgggattgtccccagactgttaaggtcaatcttgtacatattcttcaactgctccttaaggacaacaacaaaagtttttaagaacataattaagtgtttttatttaaattactaaggtcatttgcatctcactgcttttgtggtaaagctccttgcccactctccatactggtactcccatcccccactctctctcaccctgcactccccctcccccaccctctttccacactggtactcccatcccccaccctctctcaccctgcacacccccctctctcacactggtactcccatcccccatcctctctccnnnnnnnnnnnnnnnnnnnnnnnnnnnnnnnnnnnnnnnnnnnnnnnnnnnnnnnnnnnnnnnnnnnnnnnnnnnnnnnnnnnnnnnnnnnnnnnnnnnnnnnnnnnnnnnnnnnnnnnnnnnnnnnnnnnnnnnnnnnnnnnnnttcccctccccaccttctctccccactgcattccccctcccccacccttctctccacactgcattccctttctcccttggaatcaagtcccttctttatttcatccccgcccacagtgccctgtcccctgtctgcctctaacctctcattctcagataagtctaccttccctgacactgctccccaagccctcctagccactccctataaacttggtggggaaaggggatggctcagcaggtaagagcactgaatgctcttccagaggtcctgagttcaagtccctgaaaccacatggtgactcacaaccatctgtaatgggacccgatgcctcttctggtgtgcaggtgttcatgcagatagagcactcatacataaaataattaaataaaattttaaaaaattatcaactcagtaaatgaatgaatgcctttttgaaatgtagacctgaggattaggaatgcattctgctttggaatttattatttattctctaacgaacagtaatggccctgggagaagacatcttattaatgaccgaatatgagtaaaactttaaaaacatttttaaaagacagtttattttattttattttattttattttattttatgtttctcagcgttttgcctgtgtgtttgtatgtctaccatattcatgctaggtgcccatggagctcagaactccagaaagaagtggagttacagatggctgtgagccaccatgtgggtgttaggaattgaacccaggttttctgcaagagcagccagtgctccaaaccactgaatcatgcttttagcccccaatttaaacatttaaacagattatcagtattcccaaataccttctatttattcatgtgtggaaacaaatcacacctctaagaaatcatctaaagttgataataatgttattctttctttgcatgttggtgtgtgtgcatgtgtgcacatttgtatgtgcgcgcgtgtctggttcctgagaggcccaagattctgtgggaagctctcctcatttctcgtcagctagtgtattgaagccgggatgctcacctgaatccagagctcgatagtctagctaagtcatcttgctccagggaccccgggcctgcctatgaggtgctgggattcaatagctgttacagccacctggcatttacatggcttctgaggatctgaactcagggcctaatgcttgctgggcaaacggcttatcaaactctagccctagtgagctggttcctcatgttctgcgttgcctgggttcttcagaggcatggctcagtttcctttcatgttcagtccctgaagtctgaatagctgtgcatgtcgtagacaagtgtggattgggaacattcaaggaccggggtcagccgaggtgtttttgcattttagctccgagaaccccacatcctttctgttcattgttttcttgcacctcgtctgaggaggaaagggccctagcactcttctgtgggcagctccacactcctgttttgtgtgtatgtatgtgcaggtacatgtatatgtgcatgcgtgtggaaattagaggaaaatctcggctgtcagtctttagtcacattctacatttttgtttgagacagggtctctcttcttgtcctccgggtctggaactagctacataggccaggctgacctcaaataacagaatctgcctgtctctgcctactgagtgctgggatcaaaggtatgtgtaattggactcggttattagttttaatgaaagagggacaggcttgccatcctgcgtatgaccatggcagcttgctttactcacagaactgaagtaggtggtaatgacatcctggacgtgtccccagatcacgagatcgattcttcccactggatctgttccccagggcaaaagggtgaaaggagattttgtggtcatgaaagtgatttgttacaagttacctatagctgtcaactcacagtatcaggtcctctgaacacaccctcagatagacccctgagggcctcaggtttatatcccactgtgcctggccttctgtcaggcagcaggtgtttcctgagctgactcaatatttcccatgctgtttcctccatcctgcatcccgacacccccagcacctgcccgagccatctcctgggaccctcgaacaccactttccctgggctgggtcaggccttcctgccctgctgctctcggctttcatcccctgatgattcgggtcatccttcacaggctcttcagcctccccttgtcggcctctcagctgcctgggagctgccccgtgcttcagtagctcacagaatgacttttcttctgctgttggtcgcctgtagctagcggctcaccagacctgcattatcacggtccttcacggatgatggttgtgttgtgttgtgttgtgtaagctgctgtcctgctgtccgctgctgtggcttttcgtggtttctactagagagcctttctaagttctcatactcctcctactcttctccctaagacctttcttgcatgttctgttgcttgcggatccagatgtgtagaagggtttaaatgagacacacagggatgagcaccaagcatggcgggtgtatggcagtgaacatcaccagcacgggaatgtactactgttgtgtttcctaagtagatagttcatgttaaacacatcccgggagccgaggggatggctcagtgagtaaaatgcttacagcacaaacatgagaatcagagtttgaattcccagcacccatagtagatgccagatgcgataatgtgcaccgggatcctaatgctagggatgggatggagacaggaggattcctaggactctctggccagtcagtctagactttgacttaaaaataaggtggagaaagagacctatagttaacctctggcttttataggcaagtgtacacatgtatgtagtacttggtacctgcatgcacatgagcgtacatacaaataggcactcagagcctacactcacatacttacataccagattgcctttggttacacacacacacacacacacacacacacacacacacacacacacacacactagctggcagagcgatccaggctctgcttagcaattgatcctccctggctggtctggctggcccctgcttcctggctcactgtcactccagacattccctgtgctttaacggctgttgatttgactggtaatttaattgtgacttttctcttcaccacatatatttctttctgtttattggatcacatgttgataatctttcttttctggaatcaacgtgtgtgtgtgtgtgtgtgtgtgtgtgtgtgtgtgtgtgtatgtgtgtgtgtgtatgtgtgtatgatttatttggtacagctaggtccaataatggctgtttaccagtgggaagtccaagaatcaagtagtcgttcagtccaggaggctggatgtctcagctggtcttcggtgtacactggaatcctgaagaaggaggctataatgccagcaaagaacgagagctgtttgacagccctgaccctctttccctcccacacatggagcacctgcgagcttggagcacatctggctgaggacactctctcttctgtgcagtggcgtgtgctgcctgtgctccttgctctggaatggagaagtgggagcccctcagcctcctggcttcagtttgttccgaggagcgctagtggtcagaatggaggggcaacagtggcatattaagtttaatattgacagcagggtcagtgggggcagctcaagcaaagagatctcatcaaagctaagagaggcagctggcattctctccgatgtgggaagatggaggtccttagggtgtcttactctcagtgttccagagagtgtgttcctggtggaggccatttcccaggagccctctcctgcagtggagctgtaggggatgagcggggacagatgtacannnnnnnnnnnnnnnnnnnnnnnnnnnnnnnnnnnnnnnnnnnnnnnnnnnnnnnnnnnnnnnnnnnnnnnnnnnnnnnnnnnnnnnnnnnnnnnnnnnnnnnnnnnnnnnnnnnnnnnnnnnnnnnnnnnnnnnnnnnnnnnnnnnnnnnnnnnnnnnnnnnnnnnnnnnnnnnnnnnnnnnnnnnnnnnnnnnnnnnnnnnnnnnnnnnnnnnnnnnnnnnnnnnnnnnnnnnnnnnnnnnnnttgcttctgttgctgtaaaaaggtcaaggaatttggacaccacgtggcgtgtcttgactattgtaacaaggaatgctgggctaacaggaagcctggaagagtgtgaatgctgaagtcctgatgggtactgtgaatgatatggtgtgtttaaccgtgaaacaaacttacctaatagctctcaagggccgaagtgaaacccatgacctagaatggttcaccttagcttcttattcatggagtgactgtcagggtcaccatgatacagtgatcttatctgcactagaggattccgttttggatgaaggggagacagtagtagtacagtgatccatcggcatccctgaaaacgagcctccatctgtgtagggtcagctggggctcctttatgagacccctgaggttttcttgttgatgcttcctcctaggaggggtgggaaggctcacagaccctcacctgggattccagacgatccctcctgcaacttccagcctgtcgtaggcaagtctgccctgtcagcagaagggctagagtccacacatctctagaaggttaagcttagggaggagagaactcatccatgcaaccattgagacgttctccccatcctggggtacaactttccaggggcggttgctttagggttgcctgtgctctgtaaataagcccagtgcactgtgctggctccccaggttggatgctggtggagtcattctctggtttatctctggtgatttttgtttgtttgtttgtttgttttttaagggagaggcagatgcttgtgtctctctccccagggaacacgttcttagcgtgatcagtagaactatgacaaaatcaaggatgagactggcaactgaggctaagctgtccggggaggaaccccagtctgttcgtccttcttcacatggtgtgcctcctggccatgatgtttgttggtgggtcttatgatgggtagtgagacctgtaacaggctgaaccactgggaggcggagcagcttggaagtggatgggagatccatggggggcatttttttctggtatagagtgcgtgactgcttgacgaatgggatccactgtgttaggtgtagacaccataacagtagcttgtggtttagagcagatattatggtccctgagattaaaacataagaatgagggtgtgggtgagcggccatgtgtaatgagatgtgtaactgaggctgacatagctgcccagaggcaacctgtttgtttaagggggcacaacaataaagggacattgtggacacacgcctggtgtccccaacacagcttctgttttgagtaggaaagtagaaacgggctgatgaggtctagaaattggcttgccgtttttttccagttggggatgacctaagggtaggcctttgtaaaagggcccttcctgtgacccagaaccctgggccccatgggaagcaaagaggaagagcaagtgtgtatgaaggaggtagcacatgacaccccaccagtctgccaggcaagagaagattgctctccagagtggagagagcccagtgccgctgaggcactggggctagggtggagatccagtgccctcccgagaatcactgtgctggccactgttggggaaggaactcacatggctagaaaccacagcagcctcttctggaatggagtggccaggggcacctgcaagtgaggaccaggcagggtggtgcctagaagctccatgttgaattggtgttctattaatgtgcaaagtatttgggctcggagccaggtgtgccacagttcccggtgccacccctgcccccagcatcagctggtacacacggcaatggagcagagcaggtaaaaatgattaaacttgacctaaggatgggcattttcctccctggaatatgctgtgcacatttctctcctagggtgtggccaatggaaaggcatcagctggctgcagctacgatgcaaaggcagccaagggtctaccaaacccaggaagctggtgggcacagtggcccacccctgttcttctgtcttgctatgtagcctgagctggcccctgctaagcccactggaggtttggagatgcaaacaaggcactatggaaatgccccagaataaggaagctggtgtgctcagggaaagtgtctggtgattacaaggagctgaacacagcggttaagagcaccaactgctcttccgaaggtcctgagttcaaatcccaacaaccacatggtggctcacaaccatgtacacaactgtacagctacagtgttctcatatgcataaataaataagtaaatctttaaaaatacaaagtagctcacctgggatgccatgcccctctcggctgctctgaaagggaaggtacagcgcagaggatgttcacagtaccgtggacctgggtaacaattttctttagtatttttgttgtttctgctgctgctgaattccaagaccatggacacttgcttggagtgtgaaaaaatagacttcaagagcacttccttaaggttattgtcccagcttcactgcttgtcataggatggtggcctgagatcttggttgtcatcttgcctgtcttccgtagatggcgtagagcttaccctgagctcttatggactgggaagccggtttgagagacatgcagatgcagctgtaggagcaaggatgggagagctgggtgcagctgtggaatccttgggcgctttatggttgtgggaagcatgaataacatctccacagacgttacagagtgaataaaggtgccttgtgtgggagaaagcaggcatcctggaaaccggagagaggatggcctccctgtaaactgttggccgggaagaccctggaggtccctacagtgatgacagctgttgcttttgcttgtgtgccaggattggatgctaagactgttgctgaagacagcaagctttggtctgactcttttgggggaccctacagtagtgtgataaccagctcacctgtgctcagggaatgcattgctccttccagactggtcatggtccattggcttgtctcatagctgattttacatcccgtcaggttgataacggctatcacccttctcccctgaagcatggccgtgaggattgttcacatacatttttctagttcttgttgaatttcctttagggtagatgtccatgagctagattgttctgagggttttagtgattctctagtcttactgatacaatgggattcagtcattggttataaagataaaggtgacccacccacctttttagagcactgatggatgctctttcagatctggcttgctctccgtctctgtctctgtctctgtctctctctctctctctgtgtctctctctctgtctttgtctctctctccctgcctctgtctctctttcttcattcacttctttatctatttattttttacatagcgttttataatgtagaagtagtttatcccagtaaatagtttatgtgatcccttgctttcatgtatttacagaagatgagggttgtttgtttgtttgttttgctttgttttgttttgttttgtttttcgcttccagggctgggattgaactgggagcatttacatggtagttggcgcccacctctgagcttcagcacagcccttcttgttccttcttcatagtctgcagaagaaattgacgcctctgccagatacccaaaggcagagtgggccgttcactgggctgactgttgtactggctgctccttctccttgtggtcatgactttttccatcatttaaagcagaaatatcttctcagctaaaaaatttgaggtcaaatttttctgtgtcatgcaggctgctcttagatccctgaccttaagtggtcttccatcctgagccttctcagtagctcggagtcagtctgtactgccacacctagaaatatttatactacagatagtatataaaatatatatatatagctaaaattatttacaatgatagtattaaagtagggattaaaaatatatgtgtgtgtacatatagatatcatacatttcgttgctggaaagaaacttataaggcatcatatcacaatttttgtgtgcttgctggcttgctatctatagagatcactaatattttctgagttttctataatttcttttcatgtaaaaattaccggctagcctatagcttgacatagttccatgacaaggtactgtcatcaaacttttttttttattgttgatttttttgcttttttttgttttgtttttcttttttctttttttttttttcttcatcttgataaggacatgggtttcagcaccttggtggctgacatttgttcctcctctggagctctcagcttgatgaagctcacttctcaccattttcattacaggagtcacataggacagcaccttccgggctgtgttctctcccgaccccacaacagtgtagtgcaaatcatggcttttcttgtcttttgtttgtgttttgagacaggatcttgggtagcccaggctgggcctcccacttgctacatagtagatgactttaaacttctgatcccccctcccccacagcttctacctctggcattctgggattgcaggcctggtttatgcagcactgcggactgtacctagggctccctgcatgctagacaaagcactctgtcagctgagctgcatcccagccaggaatcacatgatttgcttagagctgctatgctgagttcaagcgtcctgcctgctcacacccatcaaggcagcctgtaacacatgcaggagccccaaattattggctggaggatccaggcttccccttcagcctttccagacaagccacagggacatggggtgtgtggtaggatggggggcagacatgaacatgggtaactccatcttgtgttgtactgtaattgattgaacccttttcttggagtccaaagcttggagctagtctagtttcaacagtgtgagtaaggaatcgggtaagcaccgtggactacatgacatttcctttacttggagtgcattgcccctggggtatggtttccaaagtggactctgggtcagaggacaagcctggcagatcttgttacatgggcagactgctccctggagcactgtcaacttaaggtgcagttattaatattattaaatgtgcagccttctcggtaccctgattgccctgggttttgcaactactaattgcttgtggtatcttaaaaccaaaagatttagaaaagttgatattttcttattcagttgagaaaaataagggtgattaactttgtttcctgctttctgaaagtctttttaaaaaaattgattgattgattgattgattgatttattattagatattttctttacttacatttcaaatgctatcccgaaagttccctatcccctccccccgccccgctcccctccccacccactcccacttcctggccctggcttcccctgcactggggtctgaaagtctttattaaaaaaaaaaaaacaaaacaaaaccctcaggcttttgcttttgtctctttggctttatgtgtttttttctcagtaactattttttttttaatcttaaatttcttgggcttttgagatagcgcctcatatatctcaggctgacctaaactttctttgtagccaaagatgaccttgatgattctcctgtctccgcctctggaatgctgggtttacaagagggtaccacatgcttggctttggtagctgttcctggaaacacatctcgtcttcacccggatattaaagcgcaaccgtagaaaagcaaaagcatcagggttctaaggggtaaagggcaagtgcaaaggggaccactgcatccacaggggacctcactgcatccacaggggaccactgcatccacaggggacctcactgcacccacaggggacctcactgcacccacaggggacctcactgcatccacaggggacctcactgcacccacaggggacctcactgcacccacaggggacctcactgcatccacaggggaccactgcatccacaggggacctcactgcacccacaggggacctcactgcacccacaggggacctcactgcatccacaggggacctcactgcacccacaggggacctcactgcacccacaggggacctcactgcacccacaggggacctcactgcatggttgcatcttgtggtttgctcctctcttgcctcgcgcggtatcctttccctccacagcttgcagatttccctttcctttgtggttttcaccaagtcaaaaaacactgcatctgaaaccaagagtgggtttcctacagtgtttgcttgaactgtagatgaactccttttattaccaaccgtgtctctctcttgttctgttttacaagtgtcacattgcctgtcactgtgcctgtctttggcttctacttagaaactggtgaaaacctataaaccttcctcaggggcagctccaggactctgaaaaggaggcaagaacattttcagggcagaccacacccttgccgatcgggagaactggctctctctctctctctgtgtgtgtgtgtccctgtgtatgtggacaactgcttgcacatctgcttgcacatgtgcatgcctgtgctcacgttggggaggaggcaatctgggactcatgtagctcttgtgcctatgacagaactacaaacatctctcacctcatttcacaagggaatgccacagatccttagagctaggactcctttctctgagagcttgtgagctgtgttacatccctgtgggaagcaacccgagtctatctgaacagcagtggttgctgcctgtcaagtggtaactgttagaacatggataagggctaaagaaagagtttgggccgatcgctgggagatccttggagttcagtttctgaagtggattttaattttaattttagttcgttatggataagtcttttctgagattcaggttttttatttttccataatccacactatattgactgacactctgcatgtgtttgtgcatgagtgtctatggatgcatttttctggggactggtaacccagggccttacacacctaaaccatatccctacacctagcaagcattgagagaattctttttgtcatattaccttcctccatgatttctttctttgaattagattttaattttagtttgagattataatacaattacagttcttcctttcttctcttccttccaaactacgcctccttcactggagctcagaacccgagactgcttctgacacctggtagctcgtttggtttcaggcctatgaatgagactgtgacgtagcttcctttagcctgctgtagtcaatcttgtagaatgtgattgctgggattcctggctgcgtatttctgtgaaaattcacttgaatttcattcttgaaatttcttgagtctgcagttgggttagtggtcagagcaaagaagaaacctctgtgtttccatcttaggaaaaacaaaaacaaccctgctacttgggtgtgtgcggggatggggaagaggggtgttattcttgtccaggaaaagacaagcagacaacttaaacagtaacttttggctttgggttgggctagctggtgcacgcctgtagtcccagcactgtgagacaaaggcaggaagatttatgagtttgaggctagcctggtctatagagaaagttccaggatagccaggattacacagagaaaccttggctcataaaacagaatcaaacaaataaaaattgtttgtgctaatagctccctgtgacctctgttccttatgagaaaacaaggctgtagtgtttgtgggttcatgtgacattgggttgggaatgtggctagcgttcaggaggctctggagtctctcctcagcagtacgtgcctgtaatattagcccttgagagactgaagcaggaggctcagaagttcggggtcattctccattgtgaatgacatgagtccctgtgtccctccctcaataaaccctgcaaattttgtggggctatatttttagattgtcctggcattttggatcatgtactgcgcaccagagacagatctaagggacagtacagatactgtgtaactcagcaagtgttcttgggctgccctgcatgcattacctatgtgtcttatctctggcctctttggagggtcatttgtctccttggggaattgcagggccttccctagggtttctgatttcctgatacccactggggcagatttcttacaattacaaataaatcttacattagtttgttttgagagtttcataacttattttgaaataacccgagacgtgtgtgtgtgtgtgtgtgtgtgtgtgtgtgtctgtgtatgtaagtaattctggactggaagtttccactggaaagagaggatgattggttgacagaccagagaagagagaaccttgggagggaagtgagtgacttccccagagaaagcttcagctgagagaagaagatgctatcgagaagtccatctgggaagtttattgtctgtcccaggatgcaggttatgtgtcccttacctgaaatgtttgggatgagaagggtttcttgattgtggaataactttgtatagactttaccaaatgaacatccctaatgtaaaaatctaaagtaaaaaaaaaaaaaaaattcaacatagcacacacctttttttttggtttttcgagacagggtttctctgtgtagnnnnnnnnnnnnnnnnnnnnnnnnnnnnnnnnnnncctgagtgttgggattaaaggcgagcgccaccacgcccagctcagcacacacctttaatcccagcactgaagaggcagaaattggtggatctctgtgagttccaggacagccagggctatgcagagagactctgtctcatgtccatagagccgggctgaggaaagcctgtgcttttgttcagggttaggaaggatgcccagtgatttaacatgtgtcttcattttcaagtcctcaccagctgaagatgatgtccgttacattcgggagcctgtcaagccaagacggagaggtcagaggaagcaagggaggactcagcagcgggcaaacatgcacggggatctttagaaggttaaagtagaggcatgaggcacgagaggtgcacaaggcaaaggagaggatgagggaagggaggaggcgcatgcctccgtgctggccccccacgctggttgaaggacccctcacctgtgatggcatgttctaagtgccaacttgtcacagtatagagtcacccgggaagaattctccacgagggattagttagatcaggttagcctatcggtgtgtcccggtaggggcattgtgttggtttatgacactagttgctgtgggtggcaccattcccagtctgtgtaagtgaaagaactgggctgggtgtcagtcgctgatgcaaggattctccctgcccttgactgtgggtttgaatgcttcaggttccaccagaatggactctgccctggaactctgagataactgggttttgtcagggtgttaccacagagaggacagcacctctgtgctgggaagtacctgtatgtgtcaccaggtactcacggctcatcaggctcctgcccttcaggggctgatctcatctgaaatcatttttcagatctcctttgggtctatgtcttctccggtccccctttccctgcccggtctcagcttaccagcatttaagtgtaatttctatcatccgcaggttcaggaccggcggtggatgctgctgcaggttaagtccttaggaacgccacacagtgtttgtctccacagggggtcacttttgtcacagtgaaactttcactgttttgcattctgcggctctccctcctcttcatttttactttccctgtccagtgtttaaaatagcctagagtcagccaactgtgtttctaagcagcctccttaacatcccaccaattggctcagactcaaggaatgtgggctgctgctgctgctgccgccttctcctcnnnnnnnnnnnnnnnnnnnnccatgtgcaagaagggcatcactcccaccgagattgggtctcagagttgttagagctcatccaacaagcctgaattcaatggttgctaacccaaacatgaaagctgagctgggagcaggttgggggtctctggcctctgtgcttggagaaataccttggcgttccaaagcatgcggactatagcactgagaaggcctctagctgtctacgcaacctaacaggggggctgctctgtgctctgggattcattcctacgacatctgataggacatgttgaggcgaggctctgcagacaggagaaaggtcaagttaagggtttgtcagagatggagccacgaatgggcactgacttgagtgttactgaagcgcggtacattcatgtggccgtataggaaaagcaagacaatgtttttgtaagttttatttatatttgggtttcatgacggcatcaccaatcagtcttatgtggagcaaatactggcgaaatcttgtaaagaatatagtaagatgtctaaagttctcaaatccccgctgaggagccaggcatgtagattagcagtgcagggtttaccagacctgtgcaaggtcaccagcatcgcaaaacaaacaaacaaacaaacaaacaaacgtttagacctggagacacattgccaggtccaagggtattataagccatagtcttaaggtttttcattctaggtttaatgattgagactggtttaggtctggcttccctgctgctctgagcattgaggtgaggttcaccttacccccagccttgcagacaggagacattcttgccttcccactgtgtagcacagagcgctgggagggctgggtaggtaggtggggcattgttaggcagctggttaatggttaacccctgcagtatgccacacacacacacacacacacacacacacctaatctttgttgagagctactactcagggtgaataatgggtttcttctttgactaagaccagttggccttgcatggctcaccccctgaaggttgtttttcttcttttgcaaatagaatttacatagctcagagggttttatgactcatgccttgcaaagaagccaggtggtatccgtgaatagtgtgctgttagagacctgtaggatgatggctgcggactccttagtgaacacagctgtgtggttacagatccacataaagagatcttttcctcggtgggaaactggagaaaagcagtgttcttgttagtggacacagcgtgacactgtttatggggaccctggacaggagagagataaaaagaagcagggtcagggatatggctcagcaagtcaaaagcactgactgctcttgcagaaatcagcctcagtttctagcatccacgtggtggcccacaaccacttgcaattgcaattctgtggtagctgacatcttctggcctcatgggactcttgcacaggggacacacacacacacacacacacacacacacacaccctggnnnnnnnnnnnnnnnnnnnnccccttcccctctctctctctctctctctttctttctttcttttaaatatttatttatgtagtatatgcaagtacactgtagttgtcctcaaacacaccagaaggggcatgagacttcattacagatggttgtgagccaccatgtggttgctgggatttgaactcaggacctccagaagagcagtcagtgctcttaacatctgagccatctctccagccccagagcaccttttcttcaggccatgaacacaccaagcacgtgacaggccttcatctgatgcatggcttttcaatacatgggaaaaaatgcatattttatttttcacatataaactcattgtgtgctagaaatgtcctgaatggcgactctcctagtatgccaggctgcgttggcagaagtggtgtgtttttattgtttttacgtggcagccacagtgttaggtgcccacatcacatctcctcagctttgttttgccacagaaggagctgatgtgcgtggcatgctggctgataacgcttgccttcagcgagttgcccagggaatcactgtaggcacacatctgctctttgtacatttgctgtgacctagctctggaagggaggtgtcttcttattccctcccacagcctccatttgtagactcttacagttcctgctgagagatgacatgtagccctgtggccactgtggattgatttttatcttcaaagcgctagggatgtgtgggtggagtggtggcattgtaaccccagtattgggagaggtggaggcagggggattagaaattcaacagcatccttggccacagagtgaatttggggccatcctgggctacacaaaaccgtattttaaagacagaaagagagagagagagagagagagagagagagaaagagaagagaggaagacagacagacagacaacaagcaggaaagtgtttagcccctttaaggagacactagccttgggcttctagcaaggaatgtttgtgacatgcttgacctcggcctgtgtgacctgcaaagggaggactgtgacagcattccagggacctggtgacacattcatgcttctctgtcaggctccatccaccagggatgctcagggatggagaggtgtgtatggagcgtgtaccacagtaaagtggggacccgaagggctgcagactgcacgacgcctgccaggggctggctgtggaatccttgttggcagctgtggcgggtgaggtggacttgatgaggaatgccagtgtccccacctgaggtgggacccttttgcacagaggctctcatccttcctaatgctgccagcctttaatacagttcctcacactctggtgacccccgatgtaaagttacttttgttgctccttcaaaactaattctgctaccattatgaatcgtaatgtgaatgaatagctgatatgcaggacatctcatatgtaaccccaaaggggtggggaggctcacagttgagaatctctgcttgtgcagtttactctggtttccaggcccctgagctcatgggaatcaggctctgttgcagtctccactcttgttcttgagtcttctctgctgaaaaccgtgggtttttaaacttagtgtataaaggatgtttccttgtgacatttcatacctagatagcagcatagctgtccacgcttggactcccagttcacgagccccttcttccctccaagtactctgctttcatctcacacacacacagacacacacacacacacacacacacacacacacatgcatacacacatatgcacccatgagcacatatgaacagacatacacacattcactcacacatgtatgcacgcacacacacacacacacatccatatacacatgcttgcaggcacacacatacaagcacatacacacatgcacaaacatacacatatgcactcaggtacatatgcatgcatgtatgagtgtaccggcacatacatagacacatgcattcacacatgcatacatatgcatgtaggcacacacatatgcatacacgcgcgcatgcacacacacacatacacacacacacacacacacacacacacacacacacagagttaaatctatgcaatgtctttctcaccctttacccttttgttcctcctccccactttagctccttttcaaccctgtcctaggcgctcctcttctgtcctccatatgcagactcaggacttctttctgcccttactgtctatttggcatttcctgttaagctggactgatttcgtgaattaccgtagtctgttttgaaaggcaggcatctgaaaacctcagcatagttcactgctattgtatttttattgttttagatgcagtttgtagagtcaacaacaagagagacggtgcctgtagaaggagtagccagtgtgtggtgtcctcacaggccacggtggtccctgtctgtggtgctgcatcccttcagctctggctaccttcagcctctcactgctgtgccacagggggacgggcacactcggcttcagttgccctgctatctctttttcattcaagtgttggtgatggagctcaaggctttgtgctgtgcacagttgctcatccactggagctgtcgctctcacagggcttgcattcataactggtgccttagcttttaaagttacttttatctgtatnnnnnnnnnnnnnnnnnnnnnnnnnnnnnnnnnnnnnnnnnnnnnnnnnnnnnnnnnnnnnnnnnnnnnnnnnnnnnnnnnnnnnnnnnnnnnnnnnntgtgtgtatgtttatgtatgtgagtgtctgtatttgtgtcctgtgtttatatgtgactgtatgtgtctgtgtgtcagaagtcaatgccaggtgtcttttatttattatttattatttatttatttatttatttatttgggcagggtctccctccgaatctagaatttgttgttttagcaatgctggtggtgagcgagccctgagagcctccggtctcctcgccacccgtagcacggggttagagacgtgcactgctgtggctgactttacctgtggtgctggacatccacattcaggtcctcttgcttgctcagcaagtactttccctctactgagccatccctccagccccttattttgaatttcaaacgacagctttcctagagtaggagagcgcaggcccctgtggacatttgtcatctggatagagttgaagaatctttcatttaatattagactccaagggtttgtacaagctgtggcctctgccacccagcagacctttatgcaggatgagctgcatgggcgaggagcagcttggttatccaaatgagcatgcccgggcaggaggcgcgaggcggcggccctggcttgtgcgtctctccttccaaactctctctggaatgcatctgtaactgcaggagatctttccagctgtcctggaggctcagtgcactgtaggcacagagccggactgtgggatgaaaagggtctgtccaggtggctgcagactcagaaccttggggtgggagggtgtggagatgtggttgtatctgatgcaggcctcatcttttgttttgttttaacttaaaagcacttaataaaatttctgaagccatagactaaaaccatcatacctaaagtatgaaacagaattaaggcagaccaaggcctttttcctgagagcatcatcttaacctccgtgctactcgaagggaatatttgtgcggtcatttctctagtttacctttctagtttcagttcagctgaagggaactttacttaaaaccaaaaaagatgtttttaaataacagaagtggggatggtagtgtgggcctttaatcccagcacttaggacctgggtgggaggattgctgagttcaagactagcatgtcccatatattgagttcaaggccagcctgggctgtgtttatccaagcctgggctgtattttcagaacacgaagcagcaactgacaaggctgatctctttcctgactctctcccagctgccccaaaccatgcttgttttagaagagtgggttttctatgccacacccacacccgaacccccagataataatttccatggtttggtgctagggcttgcatgcaggtcctcatgcctgccagttaattcttctaccactgaggcaaatcccagccccgaaatttcctagttgtgttttcagttatagagagtggagtgagggagatgggggtggcgaagaggaagaagccagggagagggacagctctagcttactcccttgcactgggaggccagagctctctgttctcagccttagtttttgagaccaggtctctcactgaccctgacatttgtcaattaggaatctctggccgatcaacatacacgctccaggaatccatttgtctttgcccagctcctgcccactgctggtattacaaatgcttgctgccatgctctgatgggacccgggaattgaacttgggccctcatatcaaaaggatgaggatctgagagaacttgacaaagaagtctccatgaaggggagggcgcaggggctgggagcacatgcagaaggcaagccttccagcccagggtgtgctcgagaagtcaggaggaaactaatatgactggtgccccgtgggtggagtggggtaagatgggaattctcttccagctgggatatgagggcaacccacggagcatgtgcgattctggaaataggaggattttcctaggagagacacccaatgcatcctgtcttccagagcttctctttgtgtgtgcgtgtgttttatttctttgtatcggagttaatccagtgttttcaaacaccagaccctgttctatttcccttgaatctgttcccaaggaaagtaaatatttacagccccggtggtaaggtgtgttgcttgggtaagcgttcaggaataggcgacttcacacgcagtttagcaaaccgtgttctgtttttgttttgctccgctgctaatcaggcaagaatgatttcggcaggaaagtccgtatcttacccaaccatctgtcacaggaatgcagcgccctggcagccgtcatcgcctgatgaacactctctgggactgctctcttttacccatgttctaggggaggcagcagtatattttgctggtcactgcctcccttgcaaaggacctttcaaactgtaggccttagaggcaaaagccaaaaaaaaaaaaaaaaaaaaaaccagtacagggagccctttccagcccggtcctttagctgtaaaaggagggtgaagaaattagggggccgagaatgatttactgctgtgtcatgggccttgtcctctgtgcacagcgcggtacagggagtttcccatgagaacctggggatgagggtgtcgggtgcaaatctagctcttggttgggggggtccagtgtgctttctgccgtatgctttggaaagggctcaggagaaccttattaactaactgcacgcagagctttggttgaggccccaaagtttcagtcccttcttagttcagccaggaaaagttgccttttgtcagaggtaactgccagtcacagagagatggcagcgtgtctccggagaggaggaggaaagcccttttacgggattactgatgtactgaacagttttggaatctcgttgactatgtgggttgttccccagatgtcatctaacccctggaagaggtgtgttcccatgggaggtgctcgactagccaggggtccttgaggtgcaccagcctgggatgttagggtgagaaattgctccgtccttagtcaccgctgtaaacgagggcaggtcgcttgttaactggagagactggggtccagacaggcttggggtccaggtgtcttagcaaactgcctgcgtatatacttctagtacctgatttgggcgaggccaggctgagagctctcagatcctgtgtctcattcagggttctaatcagttttgttctgattctgagggaggcatttatggcaaggtcctcggagccctcagttatgtggcgttgtagaactgaattgtggggtgaaggcttgacctggggagagaggacttgatgcatatagtctcattttcagatttgtttggggacagagtctgccctccacccccaaggcattatcgtcatggctccacgggttagggtgcagctcagttattagggtgcctggccagcttttgtgaggctgaggtttccacccccaatatcgtgacgaccgagaacgtgctcagagctgtaatcttagcacttgggagatggaggcaagagttcaaggccagcctatgctacacgacgcccttagctcaaaaacactagttcccccactaaaattaaatgtaaagttcttttgaggggactccaaatttgtgtaatcagactctgttagtatactgtacgggtcccacagacatctgagcagccagctgaactctctccctgtgccacccgacctctgcatcagaatcccacatccaccacaatgaactgtcctgaccttaaccgattaccctctctacctcagtttccctgttggtaagctggggctgggagcagcagcacttattttgtaggattattgtaacacatgcaaaggatttagagcaggtattggtagttagtagggtgcttggtgcaacgtatttgaaggccagccttcaaatcattttaccaaacacccatcaaagggttataccttggaggagaattctaagcccatttggtagttcaggagtcttcctcagacgatccatcagtgggagaacgatccatcagtgggagaacggcccagggaagttctcatgacctacagggctcctttacaaagtaccttaaaattatgaccaccaagcacactgtacagagaggttgaaggctttcagcccccctctttaacgcccttaaataaggggtgctatgcctggactcggacaccctcaggctaattctgcccgccggatctggagactgactgctttctgggagcatggagatggctagaaataagccacgggccctcaggttccctctcagaatcacctgaagctaaagaaagagaaggcacacaagggataatggggagatggctcaaggaggggacgcttccaagattagatgatcgtgaagatggcgctggcaacaatgagtgagcatatccagtcatgctcttaccggctgtaaatccttggcatgcgttacaacaaccttgtgaagtaagtgctgttactgtcagccctggctcaccggcggggaaacggaggtaggggttagttggccgaggctgttgtggtggatgtgggattctgatccagaagtcaggtggcacaggtagagttcagggtgaacccgcagaagatggcattcaaaggagagagagtgctggctctgtatatggatgtcacttagaccctggtcaactgttgctaggcagaaagtaaggccagcgatgttaggtttggctttttaagaactgagaggaatcagtactttttggtgaagtaatttgatgtttaagcggtaggatccctttcaaaaatttgtgaaagatttacttttatataagtttatataagagtttccctacgtgtatgtctgtgcaccgtgtgtgtgcccggtgcccatggaagccagaaggggttgacagacaccctgaacctggagttataaacagtttgagcctcaagggaggtgctgggaattgaacccaggtctctgagaggggcaagtgctctcttgccccagaccttcagatttttaggtgaagctggaccaagtgaaccagtgctcttgagtgggtttttaattcagttgggtttgcagctgtctgtgtagagcctggatgggaggcggcgctaagtgtgcctgtgctcccggctaggctcagggcagcatttgaaccagcctctctcaacggccttttagtcacttcaggctttgctgcttccacttccagattagttttggtttggtgaagtacctaggtcagatacctgtcaaagggtaaattgctttagttttggtgtttactaggccttctggtggggctggtttttttttgttttttgttttctctcctttcctttcttttaatattatctttttgcagattttttgttttgttttgttttgttttgttttgttttgttttgtttttctgagacagggtttctctgtgtagccctggctgtcctggaactcactctagatcaggctggcctcgaactcagaaatccgtctgcctctgcctcccaagtgctgggattaaaagcgtgcgccaccactgcccagttctttttgcagaagtttttaaaaagttaaagttaaggaaacatgtcacataaaatttcctattattgcctggaggttggagagatggctcaaggttgagagctttctctgtttctgtggaggactggggtatggctctcagctcacatccatggcaacccctgttccagatgttcccacactgcctctgtcctctgtaggcaccatcacatgtgcgcatacagacaaggacatgcacactcacttgagcgcacacacagactggtttttaaaagttctgtctaccttgtgtatgtggcatgtgcagtgcacatggaggccagaagacaatctcaggtgtcgactgtccgtccgtccgtctgtccgtccaccttgcttttgagacaaatcttttgctggtatctgaggctccgggtttgagcaaggctggctggccgataagcccagggagctgcctgcctctgcacttaacgatttaggaactctcagcctgagttttaagggctgtgaaatggatttaccactcttagccatgtgcaagaagggcatcactccacaagattgggtctcagagttgttagagctcatccaacaagcctgaattcaatggttgctaacccaacatgaagctgagctgggagcaggttgggggtctctggcctctgtgcttggaaaaataccttggcgttccaaagcatgcggactatagcactgagaaggcctctagctgtctacgcaacctaacaggggggctgctctgtgctctgggattcattcctacgacatctgataggacatgttgaggcgaggctctgcagacaggagaaaggtcaagttaagggtttgtcagagatggagccacgaatgggcactgacttgagtgttactgaagcgcggtacattcatgtggccgtataggaaaagcaagacaatgttttttgtaagttttatttatatttgggtttcatgacggcatcaccaatcagtcttatgtggagcaaatactggcgaaatcttgtaaagaatatagtaagatgtctaaagttctcaaatccccgctgaggagccaggcatgtagattagcagtgcagggtttaccagacctgtgcaaggtcaccagcatcgcaaaacaaacaaacaaacaaacaaacaaacaacaagtttagacctggagacacattgccaggtccaagggtattataagccatagtcttaaggtttttcattctaggtttaatgattgagactggtttaggtctggcttccctgctgctctgagcattgaggtgaggttcaccttacccccagccttgcagacaggagacattcttgccttcccgctgtgtagcacggagcgctgggagggctgggtaggtaggtggggcattgttaggcagctggttaatggttaacccctgcagtatgccacacacacacacacacacacacacacacctaatctttgttgagagctactactcagggtgaataatgggtttcttctttgactaagaccagttggccttgcatggctcaccccctgaaggttgtttttcttcttttgcaaatagaatttacatagctcagagggttttatgactcatgccttgcaaagaagccaggtggtatccgtgaatagtgtgctgttagagacctgtaggatgatggctgcggactccttagtgaacacagctgtgtggttacagatccacataaagagatcttttcctcggtgggaaactggagaaaagcagtgttcttgttagtggacacagcgtgacactgtttatggggaccctggacaggagagagataaaaagaagcagggtcagggatatggctcagcaagtcaaaagcactgactgctcttgcagaaatcagcctcagtttctagcatccacgtggtggcccacaaccacttgcaattgcaattctgtggtagctgacatcttctggcctcatggactcttgcacagggacacacacacacacacacacacacacacacacaccctgcgtcatctgcattcttgttcaaagtggtgaatggttcctgcatcatgaaggaaaaacagtagtttggggatgaccattgactgccccacttaatgttcatagcaaaaaacgtgctctgaacattattagcaatctttataataggcaagcttggtggaaacttgatggttaacaggcttgagggtggtggtgtgtgcagtgctcacgtgaccagtgttgtttcttggagccttttgcctgggctttttgaggcagtctctcactagcctcgaactcagtgagtaggctgactgctcagtgagctccaaggattcacctgtttctgtgtccccagcactgagatgacaggctcgtgctacagcacccgattcatgagggctctggggatcaagcgaaggtccttatccttggatggcaggtacagtaacaacggggctgtctccctcagctcctggttttatggtttttaaagacagagtcttagcttctagctgagctggcactcattatgtagcccaggctggactcatactcaacagcaatcttttctatctcagcctcttaggtgctagaataacaggcaagatccacccctcccagcttcttcccagttttgagaacgacagctggtattgagtctgcctagtgagtgatccaggtcctgttgctctctgtccctaaggggctggcctttctcatagtttctgcctgtgttgtctgtgtagtctaggtagaggaacatggcttccccgactatgtctttctctactacctcagggcttaggtttaccacaggtttgctgcaaacctgttgcaagctgactctttagtcccacctagaataaatacttcatatttataaataataatcattttcttaaagacgactttttattcatgtgtgtgtgtgtgtgcatgtgtgtcctatgtgtgcagggatatgtgccctgtgggaggtcaaaggtctacacggaacaacttccctgattgccttccactggatttctgagacagggtctctcgtgggttctagagctcatggatcctgctgcgtcaccggtgagcccccaagattctcctgtctctgttagggctacagctcggggcttaaagggtgtgctctgtatgtacctggctttttatgtgggtcttgggacccagactcagtggttgtgtggcaaacagtccactgcctcctccttttatagttagctttcttaagaaggtttaaagagccatcaatgtcatgtctcccccccccccccccacacacacacactggctttggtgcagtgaggtgaccctgactctgtagatttccttccctctcattgaggcagcaatcatcctactgcagaggtccatgcttctcggctgtacacacgactacagtaaactctcaaggtcgcaactagtccattggctttcctcataaatctgattctagctttgtaaggctctcctatcaatcagagctaaccaatgagcgtggggcccgatcagccgcagctcattgtcctttgcctttatgtaaagcagagagtccctttctttatgctaaggtcctatagacagggcagtgtcctttatgctagtgtagttaacccagtctagttctacttgctttcaaattcaataggaatgctctccacagctccaggcccagcatctcaccctggaggcaggtccttctcttgatggagctcaacccctattatgccttgttcatcacagcttccccagggctgagcaggcgcctctagactcatgatgtctcctggaagggtctgagcacaggggcataggtgtgctactccccacatctagagagggggccaagatggaaccctggaccttctctcctaagaatcttgatcctagttcctgcctccagatgcaggagagggagagggagagggagaggacatcttacatacagctcagggacagccagaagacaatcgcctcgaggcctggctgtgagctctgggtctagagggtctgctgtggcagtggttctcaggaccttgtgtttggacttccaggggcgggtctagtacttgcatgcaaatatgacagaaacgtttgttccctatcagcacagaagggggtggtggccaccttcctgatactcataccttcctgagtgtcatacaaagggaagcaggcagtgactttgtatttgtttctttgtattatgggatgtagcccagacaacttgaattttcctcctttcctatccggtggtggaagaattgggaagtggagctgtcactggctgggtcctaacagctgtttcactgtctacagggaagggacatttgaggaaggttccagggcttctaaccagttctcacagtcctccatagcaagaaagaggcacgcagtgtatacgagatggtaaacatttctggaaccatctgccctatgtctgtccttgctgaggatgtaggcaagccatcctgggatggagggtgccagccacattttggacaggggatacacacacacacacacacacacatatacacatacacacgcatatctgtatatatgtatatatataattttattgaatattttctttatttacatttcaaatgttatcccctttcccagttttctacccctcccaggaaccctctatcccatcccccattcccctgcctctatgagggtgttcctccacccacccacccacttccacctcccagccctcgattcccctacactggggcatctatcgagccttcatagggccaaggacctctcctcccattgatgcctgacaaggccatcctttgctacatatgcagctggagccatgtgtactttttgattggtggcttagtccctgggagctccggggggtctggttggttgatattgttcttcctatggggctgcaaagccctggagctagatgggagctttttcgttgcacaaaagacagttctgcagtgggactgactatgttagtctcctagggtctccattcttctgttgctaggctgccctatgctctgcttcactcaagccagcagctgatctgctgctaatcaactacaagcctgcaccttgcagtgctggcctggcaggaggaagggaagaacacagcccgggtacacagtccgggtacacagcccaggtatgccaatgtcaaatcaattccaaagttaggctggttttgatttttgtttattttatcaaagatacgcatggataaggcaggtgataatagatgaccactctgtctcctccctgggtttaataagaacttggtgttttgattgctgagattgatttgtgatgtcacagtgggctgaattttagttgtcctctggagatctgtgtgtccaagctgtctccacagcctgtggagcattgaaggtaattagccaaggctgtcctgtagctaagggtgactttgaactgttgatagttttgcttctgccaggcttacatgagccatcatgcccagtgtatgtggtgtcgggattggctttgtgcatgctcttctaactgggctgtatttccagtcccataggcaggggtcctttaagacctcttctcagacgctctccccaccatccttctgagtaaatttatcttgacttcctgtcaaagacaaaggactagaggctcctgtgtcccacagagggaagaccttaggtcatcgcatctgtgggatccaaggtaaccaggtgccttctctctgtgatgtctgagaggcctgtggcaaatggatttattctgtgtgccctcacatctcaggttgttatataccacacaggctactacagctcttcctgtgtaaaccacttgtcctggtcacttcgtattagaagggttgtcttcagctgactagaaggggagaggtctctgcagctttcctctctgttgccaaaaggacgtccctgaaggcagcagcaaacttgccgtcatctctgtctgagacactcctttctgtgtttgagttttctgtcctctgaatgctctgtggatagatgcagtcatgtgtctcttcctaccatctttataaacaaaccactcttttttttttttttaaacaaaacaaaaatattttgcttgcctttaatctcagcactcgggaagcagagttgggtggatctctgtgagttcaaggtcagctggtctgcagatcaagttctaggacagccaggactacacagagagaccctgtcctgaaccatgctgaaccccccccccaagaaataaacaaaaaaaatatttctcagcatcgaatctgtcaatgctagggttgaaatcgtgtgctgctggaacacctttctgactcttgttttaagcacgctcttagtgagtgtctcactaaggaagttatcagccggctttaatcagttggattctgtcatgagttcaggacctggatgcttttgttttcgttactatgaggagcaaagcttgggtggattttgttcttaagtggtgggttgctcacccctctccgaataactgagaattctgctttaaagtcttgcacacacagaagtggcctgtggactgctccaacactggagtgaggcagagggaagggtttattggtttctactttattcatgtcaaatgtatcgttgtaccaccgtgtaagcttcagtaaaagtgtgcttaatttttaaaaaggggagtctagggatgtagctcagttggtagagtgcttgcccagggtgcaagaagctctgcttctatcctcagtgttgcataaaactgcacaaggctgtgcttgcttgtggtccctgcattcaaaagatggaggcaggcaccagatccccctccccaccccacccttccagctacttagggagttggaggccagcctggttgacatgagaaactgtctcaaggagagaacgaggctggcatataagctatgagatcattgatggcttgtttgctctccaagtgtgatgcacgtggtcgtgtttgaaggcggagttttgcaggttgaatgggcgtggcttcccagccctggcgtttgctctgctcttcatattctgtgatgctggaggcaggctatagcatctctaggaaggccgtccttcaagacctttcccttatcttctgtgacacacagacattcatttggccattggcctggtcatctatatggcccgcacccgcctccttccagccacctcaaagaagcctgtctccacttgatagcctgttagcttctaagcccctgcttaacctgccttctaaagcactttgaatccctgtcctgatttagatgccaacactaagtcagtgaatgtctccctgttgctcttctgctcggatgttagtgtttaactcatcttctctaattccagcccggcagcttttgggatctgccatcacatgattctccttctcacttcgctctgtgtctcctactaccctttgtgtagctgggtgtgaatttctcagtaatcagtgccgttatgatgaaccttggaaagcagacaacttaatggactttgtcaaaataacggagctgactagtgaagaccagtgacaatgagtctgcagcaagttgagaaggagacacgtggttgattgtcagtttgggattaacaacttaaacagcataaagcaacttaaaacgtcagcacgcagggtgtaaatggacaggtttgaactctcggagcagcagggtgctagtcgtcattcagctgtggaatgaattcttgtgtgcagcagaagtgcagatacttggatgttgaggcaggaaggaatctgtctgcagttgcagattgcgtcctggaggcttgcctggtcacaaaagcatctcccacaagtccctggcaagacctgaaggctccccctctccagtgagtaatctcactgcgaacccaacactgagggcttcaggcttctttccctgagtaggggtgtgcgtgcatgtgtgcgtgtctgtgtttgtgcactcatgtgcatgtgtgtgtgtgtttgtgcatgtgtgtgcacacatgcatgctgtcgagtgtgcatgctttgggctgctgctgctgctgttaacagctatcaacagtcagctctctgttgctcctttgcatgtggggcttgacactgctggctttcagaaggctccatatcaggggacagagctagccctaaaagtagaactaaagaaaacaagatagtatggagaatctgagcagcaggcagaagcgactgcatgggaaggagcctggcgtgtgtagctcctgagccagcatttcacgtacactgtgctgtgtctgctgaaaggttggttgtccagtgcctaagcgcatggaacttggacactgtttggtttatttttcaaacactgactctcaagattgacctgggctcactgctggggagagcaagggccctgggagggttttgttgtgtgaagctgagaggaagagtaccgatgaatccttggacttgtgcccgggaagcaccgagcacaccgtacatactgaaggacgcagatagctccagcctctactctgctcagctcttttccttcgttcttctctgactctgagctgtcgagcaacttggatcctactgttccaatattcgatatttgggaacctccgacgagtccatttctttaaagtggtgacattcacgctggttttgtgctgacgggcactcagcaagttcgcctctgagcagattgctttatggtatgaagatagatagaggcctccctgcagacagcttgagctccagggtgttacgtcaggtaagggcttagactttttcgatgttgctgtgtgtctgggaagtgaaggaggtggtctgaaacatcaacaagtttgatgtattaggtaggatagtcaatgcagagtttggagctgggaagcgctgcagaaaatggcatctgtaacctctggtaaattagggtgtggctcaagcatttattaattataacttccccacccaccactgtactgaccacaacggcaccagtacacacatatgtctgtaccttaggactggacacttcaagtatggaaggccaggtcttcagcctggtggtcagccccaccatttgcggttgagttcagagtggaggccctggatggcaggcacaccagccttgtgttaccatctcacctttgcaggaatgctggcgttctctgttacggtgctgaaggttgggaatgcaaggcctagctagtcagctgcattctgactagggctcacttctccatcggggtccaccggctcatctttcttcatccgttctcaacaattgcatgaagagtttatctcctggctgctggaggttactctagatgtactcagcttgaatacgccgtcttcatagattccaaaagtgttcagtgatgcctggggggtctttgttgagaagctgcctggctgttgagtccgtggggtgctcagaataaagctgtaacacatggtcagtaccccttaatgcaggtgaggggagttgggggtttatgctcccctcttccctcccagcacccttgcagcccttctgtttcacccagcatcttacattctgctctctgtgtgcacgtgggtattcgtggctaagtggagtgtggtgttcaggcgtggcttcacccttgcttctgcttgcttggctgtttttcttgaacacctaacttcccacccactgcctatgaattcctctcttgtaactccccatgtggctgccttcacctttgttggccctgagcactgcccttttggagccccgtggcttcctgttgccatctgtgctgggagtcctgacacttccctgcgaagttatccaaacaattctcctattctcaagtccttccctgcccaccacctactcacttcccgccccaaaccaaacaatacctgccatcttgcttctccaaaagcccagcttccagaaggtccactcagctcactgggccgggcccttctgaaattctcctgtgtcactgggcgtggaatctctaactaaccgagtatgttttgcttcgcccactgatttgaaatgaattgttaatgagggaaaaaaaaggtggaaatatcttcttaagcccagccagctccaaagtcctagctactgactttaaaataagagagctcctcttaattaattaattaattaatagccctagctagacatcccacgggctggctctggtttctgctgactgagacccccacctctgtgtgttaggttatggaggtaacttgtctcatcgtagcatgtgacccaggagatccttaaggagtgaaaaggtgaccttaaagggagagagtgagccagggagtggggtgtttacactccagcatgttaagttcaagtgagactgttgccatacaccctcttggtttacttttgtgtgtgtggaggcatgtggtgtgtgtgcgtgaaggacagaggtcaacctaggctaatacctccagaaaccctctaccttgtttagaaagacagagctctcacttggacttgaggcttcctgacaaagctagagtagctagttagctccagggatccccctgtctctgtctctgattcccatcttccaatcaaagccaggtcctcaagttctctgagtcatctccccaaaactagaaactcagagagactctaaacataagcagtagccgacacggagcagcaggagacagagcgtgcgtgtctgtgttaccagacattttaaccctgtgaaggtcgtcacagggatgggctgtccagctgaggccacctagaatcacctttctttgtgcgtagccaccatctaaaagctttcagtcagaatggtaagactgggaacttctgtcgtttccccagtcccttcatgggtcctcgagctctgaggagcaggtgacaggatgaagcccaccccacaatgctggcctactgtaatgcagatgcagactcagaatcttcttgccaacccaacatcaggccattgtactctagagacttgatggcttcagtaagtccgaagggttggactaaatggaaccgtttcatgtaatagtggaatagcaagcacccctccatctttgctctcatcctgtattgtttgggctgccattgtttctgtgtcatgtgttaaagtggtgggaagtaagatgagttttgggtgcagaattttacccaaacttctccttcctggaagcttcatttccgtcatgagccacaaccgttgttgcttctttttgactttacccctatggggtgactccgaactttctttgatgcttactttccctctcctgccctcagccccgagtgtgccgggccctcctctgccgtcccgtgagcccgccctgcctcgctcttactcctctctggcatttcactcaacctgctacggagagaaagattgcgcttccagttctttgggaaagcacagggtcctgtgctgtgtgcgtaagtagattttgaggaaacggaaggtgaccatgaggcagttcagtcacttgatgttgctgcgggtctgtctccacgtggaagccatgtcttactttctcagaagctcccgggaggaaaggtgctggagggctggatggctcatcacacccagcatgcaggctggacgtcacacgtatgtttatggcagtagctatgcgtgttggaagccgcttgtgacagtcacagaggatgtgaagacttaggaacccccttcttagggttgagagcttccttcattgaaaccttcctcctgtgttacagagtcatgcctcagctgtgaagagaagaagatcagaatttgaacttggttcttttaactcccaagcttggtcccttccttttcttcccactgaagtacctagaggaagcaaggtgttcagttattttcacagtgaagaaggagaagtggtgacatcttctttttggagacaagatctcacgtagccagaccttgtctcaaactcactgtgcagctctgggtgacttcgttactgggatcctcctgtctctgccattcccacgctggggtcacagacaggtgtctccatgcccactgctggaaaagttgtataggcccactggcctgacatctcagtgtctttgttaggtgtaaacacctgggacaagaggacataggtcaacagcttcagttacattcgggaccagtgagtgctctgagtgctcacagcagtgttccataggagcataggcagtctcggagttagtatggggacagcgggagacaaacctgcctgttgtacaggaaattttaacacagtaaaaagctgtccagctggggtcacctcagctgtaacctttgaatttggcaaattcgggaacagtttaggaatgcctacaaagaggctttgacctgataaacctggtacacaaacagtttctctaagagagccaggccggcagcgcagataggaagagaatgaaaattcctcaagtgctagtggctttaatcagttcagattttgaacaggcgtacgggaagcctagctttaactgtcagcttgatgcacccagaaccacgcggcagagtcacagtgaagggttgtccagatcaggtcggcctgtgggtgtgtctgtgctggctcgccttcaagggggtgccagggcttgtcaaactcatgtcctcatgcttgtgcagcaagcaccttattgagcggcctgcccagctcagaagttttgcgcatctaagtgttcagtgttaaacagctccacttcaaaactgaagtcattgacctttgccctcttttttttttggggggggtgtgttcgagacagggtttctctgtgtagtcctggctgtcctggaactcactctgtagaccaggctggcctcgaactcagaaatccccctgcctctgcctcccaagtgctgggattaaaggtgtgcgccaccacgtctggcttacctttgcccttttgttctgtgcactcacacccagcaatgacagaggtgtcagaccagtggacccacataacttcttacctgcaggggtccaggcttaccctgcactggtccgggcagctgaacagttttccttttgcagtcatccatcgttacagaaatggaatgctcacagattctttagagcattacagctaccgccacaaagagtggcagacaggcttgcttcctctgtggtgttgctgagaatggtatagaacacaggttgtcccatgtttctactgcagtggtgtgcattgtgtgacagaaaaggggacagcagtgacagggccatggtgcatgcgtgtgcagcatctctgtttaccccactgattgacagcaggtcacatcagagggaattgcacagagtctaacagctgacaccagtttatacctgtttgcattttttccctgtgattcagcctcttgcctccggggcagggactgtggcataacaattcagaacctacttgatgagcaatcccaggtctgatctgaaacccaacttgtcacaagctgggctcctcagaatctgtacttgctaattttgctcccttctgataaacccgttaatgtaagagatgtttctgtcccataactgttggcttgccaaaagtagctcagttgtactcagcagtctgtgtgtttcctgcagtactcattgaaataataacaataacaatggttatgtacagtggtcgtgtttgctgctaggaactgacatacaagcttaacatccctagtgtgaaactgggaatggttccagaatccaaaactcccttagtgcaaatgttaaataaatggtgggagttctatacaaagcttggctgcatcactgaatgcatgcacgtgtgcatgggtgggtgcatattcacatgtgtgtgtatatgcatgtgtatgtgtgtacatgtgggatacatgtgtgtggaggccagcggtcagcctcagatgtgttccctcaggagccacctacctttttttttgagacagggcctttcactgggaccttgggcttgacagttaggtcctccagtgctgctattacaggcatttaaccacacccctagcttttcgtgtgagctgtgggaatcaacatcaggtctttatgctttttcggcaagcactttacctactaagctgtttccccagcctctcttgcataaaatcattaaatatattgtactttagttttaggctatagagagaaggcatatatgaaacaaattagttttatgtttatgattaggtctcattccaaaatatttaagtttgtacatgcacatatttaaaaatgatttggaaatcggaaacctgaatgataaggaatccctagcctgtcttcctagtctgtgattgtgacaagtgtgtgtggcatgcacaagtatccccgtgtaagaaatgcagggagggagggagctcataggtagctttgtgtgtacaaatgacttccttaagtgaactcacgaagcagtcagactgagagagagagagacagagagacagagagacagagagacagagagacagagagacagagagagagagagttagagttggcagaacagcttggccattcactggagtttggataggaagtaagagagctctgggtcagggagagagttgagcccagggcaggaaggaaagggaggtgtggaaaactgctgctggaggtcaggggccctgcctttcaccaagagcctgcctgcccactgcctgtgcatctgtccctttaccacaagcctccagaggctggatagatgtgtcgccttcaggcaaggtcccttgctttctcagtgtgcctaggccactgaagctctccagtggcttcagtgattgtgcctttgaagtcacttttgaagaaagttctgatgacttgcttggattttcccagccttcagcagagcggtacggtagacggaaagccatctaggtaagatgctagagttgggatgggcgctcctgatggagacccagggctgttccaggggcccagctgtagggtccctctccacagtgtctcagcatgttcactgtgaatgagcaagactaggtggtggatggtgtcctgcgttcctggaatatgggtgcttgctcttgtttttatgtcgtgtcccagcttcagatccctctctacaaactcgaggtgtaactctgacaccaggtcagagcgagctctgggttctgagcttgtggatcccgagtccctgggtaatcggaagcaggtccttgcaccgctctgctgtccttgcccgtctgtaagttgcatcgatgcagtgggctcctcctgttgatctgctctgtaactagggattgctcgctgctacctgctctgcattctgatacttctggggatcccccattctgggttccagctgtcattagctggggcatttcagtatttgcaccgtagcacacacaatatccaggattggagtagaaaaactgcagatcttcatccttctctcaaaaaaggatgctggggccctagggcacccatcttggaaggaatagagagatggtttttgttgttgttgttgttgtttgtttgtttgtttgtttgtttttgagaaatgtaagaggatcaggtgccctgccacaagtgtgaaaccaacaccatgctctgtcttatgtgctggtggctgtccagatagtgtccccactatattttaaatgttatcctcttgtgtgtataggggggtggtggtgggatgggggcatgctgcagctcctgtgtggtgctcagatgacagcttgttttttgggagtgaggctctctcttgcataggtcttcgggaactcaggtcactggacttggcggtggcaagcaccttacccacagagattcctcatcagtctctgagctgtgttttaaaatgagataaatactaatgttgtcagcttgatctacctaactgaagggattgctgtttacttgtttgttgtttgagacaaagacatcttgtgtggtcgtgatcggcaacaagctcacaattcccctgcctcagcctctggagcactggggttacaagtgtgtgtcactatgcctgacttaaattttattttggaaggaagggcaaagagaaagtttatgttggaaggaaaatgctgggctcctttgtttaaaaaaaaaacttccatccttttactatggaaaaatgtagacataggaaaaattccagagaatggcgtgagccttgacatatcatattttcccatactttgacagctgtggacttatgggcagtattccttcatttgggcacccaccgatctcctttgccacaattttaactgtttacctgtcacccacccgctcgctcgcttgctcactaacttctggagacaggtttcatcatgtagctcaggctagccttgaacttatttggcatcctcctgcctcagcatagggtgttggaattacagatatgtactaccatgcctggttttaccctgtgattttttttttaaaccaaattctagattcttattttacctaaggggcattttggacaccctaagagttcagataagtgaagagtgaagttgtatctctagccacctgaaggtggtagataaatattgaaagcagggtgacagagtgctatggctacttggggggctcctaaagctgtttgttctcccatgggtctctgcttcttccaagctggaaaccacatttccccaatgtttcctgagctggtttgcttctgagtgtgagaaggtagaagatgaacccatcccgaggggaagcagctctggacagtggaggctctgcctctcaggagccttttcatgttactttagccaccaaggacggcacttctttaattgtatctgtttcctgccttctctcagaaatatcttgacagatattgttaatgtgtttgagaaagggtctccttgtgtatcatcacacaggctgtcctcgaacttatgatgccggtgtgccttggtgttgtgcgccccccgtgatgtggtcagtgtgtcatccaggtggcacgggattgtcttgtttgccctggggcagttttggaggctgctttctgtacatggagtgtttgtttctgtgatttatcaccttccttgagatttgaattcctgtggtgtgtgagtctgctgtagtctcttgagaaaccacagggaaccttgctgggaaatgaagcggagaacattggggctctgtaaagctaggaagtaaggtgcaggtaaggtttgacttccttggacacagggttttatagtacctgctgtgcaagggactctgcagctcctctcttggtcttggtcttttctaagaaggctgctgtgtagcccacttctcatacaagaaattggcaatcatggccttctactgttcctccactgtgtccccccactgtgttctccctaattgtgaccccccactgtgtccccagtgtccccaccactgcctctcccctactgtttcctcctagtgtctcccccactatgtctcccactgtatcctcccaccacagtgtcctccaaccacagtgtttccccaccattgtccccctcccgctgtgcccccccccactgtgtccccccaccactatgtcccctccacttcccctcagtgtgtcaacacagtacagcaggtcacctttctcttctttcaaacttggcttgaaaaaagtcttgtaaggtcatttacatggccacaactacacaggaaagttggaaactgtttgtggacaaattctcatctttccgctgaatatttggaaggagctggaatcttaaaatcctttgatgccccgggtgttttctttagcaaccgcgaagaacttgagttttagaccttacaaaaaaggttttcttaaaagtgacttgtttcgagtcccatgaaattcaaacattcatcattctagcttctcaggagcccaagaaaacacagtgagacgccattgtattaaagtacacagaagaaagaggttctcaccaaaccaagcccgttctatcagctgttctttaaagtgtgatgagagaggactgcttgattccctctcaattctctgtctacttcctacagcggcttcccctagggtacatgacaggagtgtgacagtcaagccgtatccccacaggtttgtacacagggtgcacacacaggagtcaggtcagtctgttctctcaccccatcacggttgcatagttctctgaggtatgcttgggagtcttaagactgtggaatgctggagaaattccagaggctattggtaaacacccgagcggttagtatctcttagtgacttcagaactcaggcttaagtgggtggggcagggcagggcaggactggggagtaaagatgtgtatcccatagtatgggaaataaaagaaactgtgctcatgtgtaaggcttgggttttattttctctttgatttccctaaagacttggctggccattcagcgaagctgtatctggttgacactatggagttctctctacttactgccctgtttaaggattcatgtgatcaaccaagtgtagggtcagaaagctgttttggtagtgtgtgtgtgtgtgtgtgtgtgtgtgtgtgtgtgtgcgcgcgcgtgcgtgcgtgcgtgtatgtgtgtgtgtgtgtaaaactttgaagggcttttggtgaaagctttattattgttaaaaataagactgtggcatactggaaaccgtagattagagttggtagcagaagcttccatcttggagcttttaggagagtaatgggctcctgggaagaggattgagttcactctgaagccacttggtgctctctccctctgtatcttgtgcttttaagtctagaaagcgtatttacagagcaataccctaacgaatggctgtgggcccgctaaagtgcgccagcaaatccttttgcaacgtgtgtgaagtgtgccatctctgtggggtcctcaccctcagtaggaccatacaaaagccgggaaggcaagatttgagtggagggcaattccttttggaaacatgagccctatcttgtctttcacccgaagtgccaatgaaccaaataaccccttctgctcttcacaacagggacctctcagagaggcccaaagtcagacccataaggggccaaattccttccatgggcaggtcatagaaccacaatacaggctcctgcgtctgagcatgcaaccctttgccctctgggctcctgctgtgtgcagagctacacttgatggtagacctgagtctcacacacatctttcccttcaggagtccaagggtggagtggagttcttgagagaagactttactgtgttataagcttaaagcccaaagttcttgacggtgagtttccttctggaacataaggaccactggagacactagattctgtgcccatgctcctaactaaagtgcatgtgtgtgtgtgtgtgtctgtctgtctgtctgtctgtctgtctgagagtcatctttccccccactcaggatggctcttaaaaagccacttatgcctgaagtcatgggataacgagatattggtgctgggtggcgggagggggtggggagcccagggctcagctttcatcctgttaaactttgacactttcttctcacttgaaaggactttttctacatggctgttaaggtagtaaattacctatgtgcaaactacaactatgaggctgtgtgtgtgtgcatgtgtgtatgtatgtgtatatatgtgtgtctgtatgtgaacctagcatactgtgagaggagccacgagggatcttgtgcaacctactgaatagtggctttctaagtgcctttatagttgagagagttgatattgaacccaggtctgggggctgaggcaaaccctggctccttgggaactcatccatagctcagatcaaccagtagcctcctgcatcagcacccactatgaatgtctttttcttttccccttctgttcttttttcttctctcccctccctgcctttcctctattccctgactctttgagatagagtctagttattagcccatgctggctatgaactcaccatgtgcagcaggcttgtctccagctttgatcctcccaagtggtatggtcccaggcttgtgctgcctctgcagctcagtttgcggtggcttcactgacacagacttcttcctctttctttgtgttgaatgccttgttttatcagttctgccttttctaggatgctccgaggagtgcaagaggttatcagagtgttctgacataagttactgcttgccttggaagaaattaggagctagctctgttgcttttactgtgattattaagtaaaaaaaaaaaaaaaaaaaaaagttgccatggtatcttgagcccccaccacagcctgcagcagggtactgggtagtacctgggatcataactaactaaagtgatgttttgagtagcactgtgtagccctggatggcctgaaagttaatgaacatgcagatttggatggtctcaaacttaagagagagcctcctgctcaggctggcctcagactgaacagagagccacctatgtctgactcctcctcatttttacttatgtgtgtgtgtgggtttgtgcatgtgagcacagtgtgtgtctctggggaacagaaggcatcagactccctggagctggagtttcaagcacttagctgcccagtgcaggtgcctggaactgaactcgggtcctttgcgagggcagtgtgtgctcttaactgctggaccatttcatgcacctatgaaaacttcccttttcttaagtgactttagtttttaaagtagtttttttgttcccagcaaaattgagcagagagtgcagaactcccctacactggctctgagtctgtagtgtacagtttctctaccccactggtgatatctgtgccacaatggtgtgatttttaaagaatggatgaacttggcattgactgctcattatacccaggaactcatagtttaaatagttacctgcaatttgcatgcatatgtgtgtgcatgtggtgtgtgtgtgtgtgcaggagcatgcatgcggatgtgtgtatgtgcatgcacactcgtgtgtgtgtgtatgtgtgcaggtgtgcatgctggcatgtgtgtaaatgtgtgtttatgcatgtgtgtgtgtatgtgtgttcatgcatattagtgaaggtttgcatatgtacacactagtgtgaataggacagtctcagctattggctctgcctttcaccttgtttggggactctgtggttcagtatgtgccaggctcactgcccaactgcatgtgccagactcgatgcccaagagtgtctagggatagtcctgtcccacctcccatctcatagttagaatttgacagataggcactaccatgcccggctttgcatggattctgctgatttttaactcagatcctcatgcctgtgtggcaaaccctttgcccacagagccacctcctcagtcccccactttattcttaaaaataaataaattagttaaaaggttactttcaatgggataaaaatagttcctattttcttaaaccatttaaatagtgtgagtactctgatcttgcctctctttcttagagcacacatttcagtgcctttgtggtgggttacaaaaggccgttttcatgcaggtgtgcgctgtactttgagcagattctctccccacttccctgagccccttttgttccccctcccccagcagcttggcagctccccccacccccgccccgccctgtaagcacatagttttctgtctgtgtgattatctccagttgccttcatttccctactgacagtataagaaggtaagtttcatttgctatctgatgttggacaccccggtcagccccataactcagctgtagtgaatagctagcactgctgtaaacactgatgtgcaagagtctctgtgacgtgtcaccttaacggtgtcaccttagcgccctcaggccaaatgcccaggagtgatatagatacagctgagtcttacggaggatcaatctattgttagttccttaaagaaacttccacactgaccactagagtgtccaaattagtgtatgttcccattgccacagtgctagggtcccttctgtcacttcactcgtgtgttactcctcctttcttgagtgtgtatatggccctcctgggtttacaatacagcaagcactctcgcacactgagccctttctgtagcccagtggttttcgactgtcctaatgctgtgactcttcagtacagttcctcacgttgtggtgaccacaaccataaaattattttgttgctatgtcgtatctgtacttttgcagctggtatgagttgcaatgtaaatatttttggagatagagctttgccagaggagttgagacccacaggttgagaaccactgacccatttgcttgctttcctaatgacttcctttgagtgtgctgagacggagcctcaatgttgttgttggttttttggttttttgttttttttttctctttctttcttcattttcccctgtctgcatttcatatttttttgaaacagttttattagggaaattgaaagtgtcatagacatgggtctttgtatgtggctttcagttctgggtttatgttttcatgtgataaagcaactgtcatgaagccccagagagccaccctgggaagctgggcaaagcgcctggagccaggctatgggacggaagaggagggtgtgagcgatgtttcctcaggtgaagaatggaggctcgttcactgccgtaaaacactagcacagagtggggttcaagctctcttacatgtcactacagtgtcgggtcacttgggaccatccaggtgtcacacctagaccaggtttggtcagaatcacctgcagttccttctagaagcacggctctgtggctccacactgctaggagtgggtgttaagagcttttcattgaggtgaacagtgtgtgtggaagagagagagcgagagcgcgaaatctatttctggctttgggcagctggggttcggtcaaattgtgctgattagttctgtaaataagctcagatgagaacccccacccccatcaaaccagaaagcctgaggcatgagtatatcatctacacggagctttgtagtgaaagtattgaggttctcggagaagcagagcattgatagcgtctgcctgccgtcgctcacacctaactgctgtccacagtgttccagctctgaatccatgtatatgtgcccatgtgtgtgcaccatgtatctgctctgtgtatacgtatatacatacacacatgcatacaatttaaaaatcacaggtgggcaggagagatggctcagcggtttagatcactgacctctctcctccatgaccgcagtcctaccctcggaagtcatggtgagctgaggctgaggagacgattcagggaagggcttgccttcaggtctacagacatgggtctaatgcctacgcctaggtgagcagatcgtggcccacccaggaggatccctgggcttgctggcctgaagcaaccctgagcgccagtcagtgagaaaacttgtctcaaacaaacagtaaggcagagcgcgactgaggaaggcgcttgacgttgccctctgacctttagagtaagtgaacatctgtgcatgcacacacatgaacgctaaacacaagaaagctaaccgtgatttacaagtattctgtcatttctcttttttatttcagatttccctaattgcctcctatctttcctaggtttccccacccccaccgtgggtcacactgaatttaatcaagagcatcaaaaacattacattttttttttcttgtttaccatttttaaaaagtaacttaattttattttatgtgcattggtgtgagggcgtcagattccctgggaactggagttagagttgttagctgccatgtgggtgctgggaattaaacctaggtcctctggaagagcagccagtgctcttaaccgctgagccatctctccagcctcaaagcatcactttatatttttcctaatctctctactttcggcctgggaggcagcctcccatctggcacttgtttttagttgtcaacttgctgaagaaggttcagactaattttcttggagttattgttgagaccttatcttgcaaatcaaagatcagaatcatttttttaaaaaactgacaagaatattttctagggtccacgatgttaggttgttcattcgctttgactatagacgcgtccaaaggctgtttcggaggtcatctacaaggcggttgaaaagtggtttgaaagatgtagagttctgtccctcgtcaccaggagccagggataatgactgctggactgacagtatttgctgtgtgcgtattctgtccctcctaagaactgcggttatccacacactcggctggggttacttcaccatctgcattgtgtcatgctggagagtatgcggagagattgtttttgctgggataccaagccagccacattctttcataggtgtttaagggagacacacccgaatgtaaagtgcctggcccaggaagagaaatgcagctggtgtctacagagcaaacatttctgtctgtttgaggctttcttaacgtaggcattgaatcttagcctgcctgtcctgtgcttcagtaagtagagggaattcatcagtaaacacttaaggatattctggtgtcccatcttctcccacccccctttgggtggatccttccatattttctgtccctatcaggagatcagactggtgtggcttggaagtaaacatgctactctgccaacataaagtggtttagaaatgttaatctattttaccaagccagcatttctagccatatgtattttaagctaccataaaacatgtacctgctgtgctcaggaatgtgccgagggcaagtatcaaagcctaccgagcgaggctgggagtgtgttttggtgtgttgtagggttataccctgacaaccttcaggaggcctggggttctggcagggagcggcatataaatatcacagacagctcatttatctgttgaacgattcctgcaggtgccactggctcacatttgcccatccaggagtcagtgaagctcaggggtagtgctgctccgtcaggatggatgaagggcttaagcctgcatgcacctgcctgagttaacacagtcagcctggtcggtcatcctctgagcccagtgggagcaggcagctggatggaaaagctcactgcatgctgctgacttttctgaaagacatttcctacgctccctgaacccccgaccagaaccccgctggctcagagtggaccggtaaagctgcttcgcttggtgtgtgatgcttgtgtttgccacattggcgggatgtcagagcgtcactctcattactggtgggttaactgctctgtaatgggtgacaggactttctcaccgagtcatctgtaaagggacggaaccatgtttgggtggttccacacagctgtctaaatatttgtggagaaaagggatacagaggaggattttgaagtacgctagagaacatacataccttagggactagggatatagctcacagggagaaagcgtgcttagatggagcaaggccctgggtttgatcctcggcaccaaaataaaggtggcagtgaggattctgtattttaaattaaggagtagaaagtgtctgtgtcaaacgtaagctaccctctgcattatccgtttaagtaaatggcttcaaagtaagtgttgaaaggtaaacacggctgtgaaacttagcgttgtagggcagaagcaagatgaagtttttatttggttgaggtttcagggtcgccacgttgcttttcacctgtacagtcattgtctactgcgcacatttatttatggtatctgcgtccatgtgctcatgcgtatggcagggcatgcatgtggaggtcagagggcagcatgcgggagggagtcagctctctccttcagctctgtgggctctggggattgaactcaagcacctttcccactgaaccatctcgccagccctccctcagtaccaaagcacatgtggttcctcatgaagtaaagcgagggagtattctgagccgttcaagctctcccaggtgccgctcctcacacagagagaggatggtggtgcaagtgggaagcgggagtgggtactgggtgccctggagtctggagctgctgtgtatcagacgggtttcttcctgctaaggagttctgcttcctgagtctgctccaatgtcaccctgatgagagagggtgagatgcacagcctccaacaagacacccgggagattctccatctgtgtgtgtgtgtgtgtgtgtgtgtgtgtgttgtgtggtgtagtgcaccactgacagctccccatgcagagtgcatgatcagactctgtttcctccacagctgtccggcagagagcctggtgggcatggacatctttatccacataccttagtgtgaccacgccgacagaaaactactaaggccatctcaggggtgcctgtgccaggagaggggggcggtgtccccgggccgcagagccatgcctttcggcctgaagctccgcaggactcggcgctacaacgtcctgagcaagaactgctttgttacccggatccgcctgctggacagcaatgtcatcgagtgcacgctgtcggtggaaagcacggggcaagagtgcctggaggccgtggcccagaggctggagctgagggaggtgagttgagcgcgcatccctgcctgttgtgtggacagggagtgggctcttcagaggaaccagctatctgcttaacgtgttggcacctgctgtgttttcagcctaagcgtgtgtttaaaagaacctgcttttcttagggtgggtgtggcccggggaagttccagcatctccagagaccacttttgcgctcagaagggcctacagctaggtgtggaactgggcttcctcttgtttcccctgtgaggttttaggggggaggcaagaatgagagaccttccccaccaaagctggtttttaattcttgtttaaaacagttgagtgggcagttggcattcgggtttgatggctgcgtcacaaggagaagccgcccacattccggatggctgcagctgcctttgtttgtttctctatttccccctcagaaagaagaggagcaaataacacttaaagtgagaggcacccagagatgttgagaaagcatttgtttttttaaaaagattctttaattcacacgtgcatttgtgtgaccacagaggctggaggacaaccttgggtgtcaccctcaggagtgcggtccacatcctttgagtcagtctctcactaagtccggggctcactgaattgtctactctctgctcctgaactcccaagccctgggactcctggggtgtttgtgtgggttctgggaaatgatctcgcagtcctctgcttgaatggaaagcacttactgccgtagctgtcttcacagcaccgcggagagctgttaagataggcatttgttcctttgggcttcatgcatgccattcgtttgtgttgtctggttatctgaggcagggtttcactgtgggacccaggcagacctcccagccaggatcacagccgtgcaccaccatacctgacaggtcaccattagaaggaacttggtgctgtgtgctgctgctgtcacaagggaagctcacagttttcagcttccaggcattcaggaccagaatcttttgtaaggggcccacacttgtgcattttgaatcttgatggccacgtgaggtgttggctggtgggcagccctaggtgaatcgtagcctcccctgaattcagacatgcctgagcatcaggaatcacctagacccctgggctctcactggggtccaggtgacagtatttccagactagaagaggctgttggtttctctctgctcccgggttccaacccttctcgttacgcttcttcatagagtgcctgttgttctctgggcctctgttctggctgctctttgtgtttagactctggcttcagcgttagggtgggctctatgctcattcatttccctgcgcgcagtcagaagctgtcctcacagaacatgagtagagccgggcctgctcacaggagagcagcccaagaaaaggcccacccttgccgatggcaggtagctggctgtcctttgcttggtggtggcatcttggggtatacatatttaaacatatgtaaattcatgtaaaagttatatatcattggaaaggtagtgaagtgatttttgagcattccaagttacgttacgttaacaggtcattcatatgcattagggacattataatatgcaggtcaatagctataagcataggtagatttgctatcttggttttgatcaggattctggagcttattttctgagtggctgtggagaaatgacagcagctatcagggcctctgtgtcctgatctgggtagagggaatggtgaagctagcttactctgaagccctgttgcccatctgaagtcattctgtctggaagtatagggcactgtgtcccgtaattcattattgctcacacttgaatgtctttaatattgcgtgactcccttaggacttgagggacacttgggagcaggaggttccagcatctcaccaggtgccaggtaaagactgaatgccacctccactaacgcacatcacagagtagggccaccgtggtgcctgcccttagtgggtacacagactcctacagaccgtgggtaacaaaagcctggctgaaaggagagtagagtgctagacagaagactcagtgtgtgaagagcttgctgaacggaggtgagatctgacttcaggtctccagcactcacataaaaggtcagcgtgtgcctgtaaaccagcctgggatagagatgcagatgggcgtgtccccagcagtctagctgaagctgaactacagatttggggagagactctttcaagagtaagactcttggacacactgtgataggttagcctctggcctacgtacacactgcttgtgtgtgatcacatcctgtgtgtgcgcgcacgtgtgtgtgtgtgtgtgtgtgtgtgtgtgtgtgatgtgcatggcctgtgtgtgtgtgtgtgtgtgtgtgtgcatggcctgtgtgtatgtatgnnnnnnnnnnnnnnnnnnnnnnnnnnnnnnnnnnnnnnnnnnnnnnnnnnnnnnnnnnnnnnnnnnnnnnnnnnnnnnnnnnnnnnnnnnnnnnnnnnnnnnnnnnnnnnnnnnnnnnnnnnnnnnnnnnnnnnnnnnnnnnnnnnnnnnnnnnnnnnnnnnnnnnnnnnnnnnnnnnnnnnnnnnnnnnnnnnnnnnnnnnnnnnnnnnnnnnnnnnnnnnnnnnnnnnnnnnnnnnnnnnnnnnnnnnnnnnnnnnnnnnnnnnnnnnnnnnnnnnnnnnnnnnnnnnnnnnnnnnnnnnnnnnnnnnnnnnnnnnnnnnnnnnnnnnnnnnnnnnnnnnnnnnnnnnnnnnnnnnnnnnnnnnnnnnnnnnnnnncaggcatgcgagtggcctttgtactttaaatctggccctgaaggctgattaggcattcaggtagaacagcgctggatttgcagaggaggaagtcaagagcagagagcagctacccatgctgtgttgggtgtgtgtgtgaaggcatctctcctgaccagcaaaaggtcaaagggcaacctcccatgatcctacaactacctcttcagctaggataaaggggctcccgtcaagtgtgcattgttgtgtgattgacagctcactgctaagatggggttcagctttcacgatggctttgtgctgacttgctctcaacgagtttgtcacctccgagcaaatcactttctcttcgggtctcccacttttatcctgtggcagataacattggcagcaagacccttccctttctaatgcagctcctctgaattagggaagaatagagcaagctctgcggatgcctccaatgggaaggtcttccgcacaaagttggaaataggaggggataaacacagggttttcccctcaaactgtagctttgtgttttgtgggttcctggtgcccagtttaatgtctctctttttctgcaaattcatatttcaccgaagctgtttgtcatacttgctaattaattaatcttccatagttgtctattttcaaaatgtgtaagggttttagagacatgaggacttgacatacatttccatcaagggaaggtgagcttacattacaggcaggtgtgtggtttgactgacgttaatctattggcgcttggtaacgactgtgaccttctgtttgattgacaggaaaacctcattccccatcagtggaatttgcctccattctgtaacccgcctaaccacgtccagggagctaaggtgatcaagcgcaggggctgatgagagagaagggttctactttgctttccgttgctgtggtgaaacactgactgaaagtaacttggagaggagcgggtgtatttcgtcttacactttacagtccatcatctgggatagccaaggcaggaacctagggtcagggactgaagcagaggacaccataaggtgctgcttactggcttgctctccgtggcttgctcagcctgttttcttaaatgacctaggaccacctgcccaggagaggcactgcccacagtaggttgatcattaaggaaatgccccacagacatgcccaggagccaagccggtggaaacaagtttctcagttaagttcagctgtgtttaaggttgtgtcaagttggaaaaaaaaaataagtaaaggaaatggcccactgggtaaaggcgcctgccaccgagcctgactgatgaccgcaatttgaaccctgggaccatatagtaggaggagagaactgatggttgcagattgtctcctgcccttcacttgcacaccacggcacatacacagcataactcgtgggtgtgcatttgagtgtgcacgagcatacacacacacacacacacacacacacacacacacacacacacacacagggagggagagagggagggagggagaacaagtaaaataaaacattttgaagatcagtactgagtaagaagctgttgagggtaggggcggatttctggtctctgaattttgtattgatttcttgctttgtgaagattctaactggaaatcttagctagcatcatggtgcccggcctctgctgtaatgataagcgtgccttcacttaagtacggacagagttgattattgctcagccttccctctttagtcttcccactgggtgtgtgtttttcaggaggcacagtgctttgagagaaggtttttctcggctctggtcacgatgggcttcatgggtccccattacaactacagcttgtttccctatatgttcatgaagacattggctataagaatgagcatggctagatgttagatgtgttagttagatgttttctagagtccccagaactacccagtgcagagactgggtgcatacaagatgaccttgcatttctccagctgggggggagtgggggggggcatagcgtgacttattttctagagccactggactgtgacaggaggacctgctcagagctcactttatggctgcgtctgaagtatttctcgtgtttgcacataactcctttcttctctgaggtggaaccataccagctctgcttcttgattgacaactgaaatgctgggtgaggcgggcagcctgttagagcttaatacaagatattctaaacttttgcttctggctgattacctcttcagaatgcctgcattaagatcaaggctttaatcccttgtaattgccagggccgcatgtgcaaccctcacagatggcattaaagccatgccatggctcacgaaactagagcaaccaaagcctcatcaaccttctgccatgaatagtcagtgtgtgcagttacacatcatctcattataaatgaatggagggagggtggagccggagctcaggggtaggttgctcacccgccatgtgcgaggtccgggacttgctccccagcactccaattggaaggaatggtcctgtcagcaatggaagagcaactcaggaaagggcttgcttgggcttctgttgaaagggcttgagtgcacgtacactgggggatgtcatgccagcacccgtgagctggtcacatcgcctccacggccaagcagagagcagccaggaagtgtggcaggccagtaaaacatcaaggcccacccccagtgagccatgccttccctccacggagcttccacaacctcctcaaaggcagtgccatcagctggggaccaggtgttcacacacacaagctggtggaggcattgcacactcaggccacagactgcacactcaggccacagactagctgttttccactctgtttgcaggttttcccgtccctgggatctttccacagtcgttactatgaacactgactctggtacacacccttctgccgctataaacaccagctgacattttagtacatatagatattgacgctcccgttaagatgcagaactccaaattaatcaaggaagtgctcacatgacgatgtcatcctcccgtggcactccctacaacattccatcttagctgcttttaagtaaccgactcagagatacagttcctctttctgggaaccggtttttgctgcctaactcgaggtatcagagctgtgggtttaacactaaaatacaaccggagatttatgcccagagttatcccaagggtcagccaggtccggcttatatttgctgcattaggcaggaagctccagttccgggcctttggtcatggaagaggtggtttctgcttggagtcctctgctgccttccatatcatctgtggcagtgtttagtggtgagacctggggaaccaaactgggctgaacttgaagctgggtgtgcacagctgtgcttggtgagagaagctagccgtagtgagactgtgggttctgatttcatttactgtgatacaacgtgtagagatagggccaaataaacctgggcagtaccatagaccaaagaagagcattattagaagctgggggcagcgcgtttccatgccagtgtggaaacagccaagggaagggtgaaagaggtggatggtaacagaggagccttctttgggtatagctggagatctcaagaatagaatcctccttcctacaagatcaccacgcccaacattttaaattagcatgtcataggaggtgtgcgacaggcaccttcaagaacagcagtttatccctcaccaggaacccatatcttcccaaacctttgagaattcttattaacatgtacagggtgataggagtcatagtgacgttctttggtatgttatgtacatcaactgtgttcacgctccctcaccttctcctgctccctgcactcgagccttccacctgcccagtgctggggctatgtatggcgaccccacccagcttgtcatggtggtgggattggacccagggccttgcacacagcagacaagactcaacgaactcactacatccacagtgcctgtatatcattgtgtatatatatgcacacatatatgtataaacacccatgcatgtatatatgtacacatatagatgtacacaccctgtcatacatgtgtacatggtctgggagtcacatatgaaaacaaagtgacatctgccatatcttgcttaatatgctctctggttctatctggtttctgaaaaagactttctttctttctttctttctttctttctttctttctttctttctttctttctttctttctttctttctttctttctttccttccttccttccttcctttcttccttccttccttccttccttccttccttccttccttccttccttccttccttccttccttctttcttttatgactcagtgaaactccatggtttatgtatacacattttcttgacccatttatcgatttatctattgatctaacaccttggctggagtgagggaagtggaccattgtcagcatctctgtggagtgctggcttccattcctgtggttgtttgtatccctggtcatagggcagtattccctgttttgaggaaccttggtactgatttccatggaggctccatcggtacatctccaccatccgtgtgtatagcctcccctcccttgccagcactgtttcctcctttcagtgcggatgcctgtgaaccccactgtggttctgatttgcatttctgtggcatcaagacagtgttgagcattttcccttgatctgtggactgtctgagttttgtctgttcatgaatgcctgttcatttgcctctttattagagggccccgtttcttgagtagttttataactgtttcatctgataattgtgtcgtgaatcactgggaactactttgtttggaaaaagactgtattgcagcagcagcagcaacgacgacgcatgcttacgccacaaattcagtttccattagaggtgattggctttgttatttagaactccttagattaatacttccagcctcaagcaaaattgttctcgtgtgtgcgttcgtgtgtgtgtgtgtgtgtcttgtgcaggagtacatgctctgtaaaatgtcccttcatagcggtccccccacccatccccgtgtagtgacctcagtgggtgggaatgaaaagaaggagagttagaagaaacaccctgcaagatgtcagtaatacaaagtttaatttcgggctggagagacagctcagtcgttaaaagcaccggctcttcttgcagaaaacctgggtcagattccaagcacccacatgatggtttacaaccatctgtaacgctggttcctgttgcgcgcgctcaacaggccaggaagaacgacgctgctacaggatccttctgcacacgtttattcagtcctgtttcttctttctctatatctcccttgttcatatctcccctgtttatatctcccctgtttttatatctccccttgtttatatctcccttgtttatatctcccaataataacaatcctctctcgaataataatcctctctctaacccgggcctctcactcttatatactctcagttcccatccacgcacagcaggccacgccacctcaccaggcacgcagcttcagctaatcagggcagcaggggcaaatctccaccaaattggattcacctgtatcctggtacacctgcgcagcactcaagatgtttgtgtcttatatgaggaagtcaggtgcaagtcatatgacttagctgcagtccctggcgcctttgggactgccgccacacccgctccccacaattcccccttttttcttttttggcagagagaatgtctgtagatagccccccgcagccatgccccttacccgtccttgggtgacaaacagcattggtttgattccctgtcttaggttggtgacatgcccagggagtcttatcactgactacctctctatcatgccaagccacacctggggagattgtgttttgcttgtggcaggtgcatcaaaaggccaggatgttgattaatctatggccaaatcttaattgctgcaagcaagcctcatgggtgaaggtagaggtctgatccccagtgtgcaagcataggggccctacacaaaaccatcccttaggctcatcacccagagaggtcttggccagctcccgtgtcgtttttcctgggggaagggaactaggacactgaaccttcatgcaatcagacatgccttccacaggatgccaacagcaagctatcctctgtgcagtgcttagccttgcaccccacggcataacgcagcataatttcttttagagcggcaaaccgaatctgaggagattgtcccgcctccactgcagcaaaagcctatgctaccatggcaaaagtgcgggccgcacactctgcacctaacacatgtgccaaacacaaaacacacacacactataacaagcatacatcccagggctctcatccccgctcatcttccctgaagcaagggatagatagccagcggggctatctctttaaggggaattcagggatcaaaaagcgtggaaaaatttgaatgtcatgtcgagctggtatcggcttctggaacaccgaaaggatctcccatctcggctccatcctttgtgcttgtgggatcatccaccacatccacaggggcaactggatcaggagcctcattcttgtagcgtctcaccaatctctccggcacccaaagaggttccgtctggtcctgtggaaacacacaaacagaccctctcgcccacgtcaataccggatctggtcgatccccaggggagatggacacaatacctcgtggtaatgagaccataacctcaatcacctgtgtgtccatctggggagtcaatatgagagtcaagttttcactgctgaggaggcatagggaggaggcacagaagctaattcgccttcctcctccgcctcggctcttttgtttcgtcctttctgttcacctgattttactgtgtcttctttttcctttttctttttaagcccttctcctcttccgacatactttcttgttgctctgtaaggattttctgacctgtcttgactgcctctacacacaaacagtaaacagagtccatatatcagaacaaacaagaccaaaactatnnnnnnnnnnnnnnnnnnnncaccatgctgtgtgtatagcctcccctcccttgccagcactgtttcctcctttcagtgcgggatgcctgtgaaccccactgtggttctgatttgcatttctgtggcatcaagacagtgttgagcattttcccttgatctgtggactgtctgagttttgtctgttcataaatgcctgttcattttgtttgcctctttattagagggtcccgtttcttgagtagttttataactgtttcgttggataattgtgtcgtgaatcactgggaactactttgtactgtttgggaaaagactattgcagaagcagcagcagcagcaacgacgcatgcttacgccacaaattcagtttccattagaggtgattggctttgttatttagaactctttagattaatacttccagcctcaagcaaaattgttctcgtgtgtgcgttcgtgtgtgtgtgtgtgtcttgtgcaggagtacatgctctgtaaaatgtcccttcatagcggtccccccacccatccccgtgtagtgacctcagtgggtgggaatgaaaagaaggagagttagaagaaacaccctgcaagatgtcagtaatacaaagtttaatttcgggctggagagacagctcagtcgttaaaagcaccggctcttcttgcagaaaacctgggtcagattccaagcacccacatgatggtttacaaccatctgtaacgctggttccagagggtccgatggccttttctagcctcggagggtaacaggcccgcatagacacacatgcaggcaaaacaatgagacacgttacacttatacatcttttaaactttttttttttaaagaatcctcctcaaatcactgagttgttcctgtggttattgctacccttcataatttgaatattaaaaatttgaacaagtattatgatttggatgaatcactaaaatatggtgcaaacatcgacactccttctagtggaagaagaagttagttcgccccacagtactgaggcatgagcgtccttctgcctatgctcatgaaaggtctcccacacctctagcgcctcggcttaagtgcttaccgcagtttctatctttaaacactctcagccccccacacacaccgagggaccgttgtatggccgtttcttgggtgtgtgtgtgtgtgtgtgtgtgtgtgtgtgtgtgtgtgagggtggagggttggtacgatgaggaatagcctgggaccctttccaggcaggtaccggatgaagcacagagagaggacctggacttagcctgtgtctcatgtctctggttcctggaggctgtatcgatcggcaggacacaactgttcctccagtgtcccagaggtgcctgggacgagactttcaaagggttgcagaacctcttcctgctttgtggttatgtttcttgtctttttaaggcctttctattatctgtagttaatccagcttccatgagccgtttcttatgttgctgatagcagcctgactccctttcctttcttgtttgtttcggtgtgtggttttattgttgttgcttgtgacagaatctctcgtagctggcttgcgtctcttacatcgctgaacattatcttgaactgatcctgtagcctgccagaaatgtgccctcactactggtttgttctgttctttgttgttttgagctgggatgttgctttgtagcctaggttaacctcaaactcatgatcctctctcctcagcctcccaagtgccaggattagtggtgtgaaccactggcctgtcttctctgcctccctccgtgtgtatttaaagtgtgtgcgtgtggtgagggcatgcacacaggcatgtgtggcccggaagtcttttcttctgctgctccccgctttattatttcttactaactggggtctgtcagtatgcctaggctggctggcttccccagcattagggttacagctgtattctaccatgcctgggtgccagggctccaaatcaaggtcctcacgcctgcgtagccagcgttaccagcaaagtcacctcccagccctccactcgtacctgtcagtgttttctaatgctggggtccagagaaccatcatcagctttctgctactctatgtggtaacctgaagctccatcaatttacaatgggggaaaggttgactttagagtggccttgctgttggccatttgttggttcctttgctctttgcttgcgacaaggcagtgtaccctgccggaagtgtacagaggtgcaaaacaaggcatgacagagttggaaggcaagcgagagaaaaggctcagggtccaatggtctctttgcagggtgtatccgcacctgggaacctggggaccaagcacatgagcctctgggaggtggggtttctagctctaaaccataaaaatattgttgctaaaaagagccagtgaaaacgagtcaggtgacctgccttgtgtcgtgctttctgttggccatggatgtgggtggcagatatcagctgcccagtgttccttgcagcctgtgggtaagaacttcactcactccatcttgaaggcaaatctctgggagtctaggccttcctctgtatatggagagagtgagagtgagagtgagagagcaagagcgagagagcgagagagcaagagagaggaatagatctaggaggatgagcctcagagctcttctgggcagggccctgtgaacctcaattgtgccatctctcatgttggaaacacagacggatccatagaagtcaggacatacacagctgggctagagtgggctcagccagctttgtctgagttgatagagacatcactgagcgcccagtcttgctttttgtagcttgaaaagatgtagacacaaagctgcccttaggagcaccttgggggatgcaaccattttaaccctgctgagaaaaccatctcggccagcctgtgcactccggcttccgtaggccaggggcatgctgggaaaacaggaccgaggcttccctggggatctctgtagggattgttctgcggtgactggaggggtggccagctgcggtgaggatggagaaggaaggaaggaatgcctctggagattaaacctggtagtgagcacactacctcaaggcagagccccaggtgtgctgtaagccagcccaagctgtcacagaacacaaaggcatcttcagaagtgtgtgtgtgtgtgtgtgtgtgtgtgtatctgtttgcactaatcctgacatcttagcacgtgttcaaataaagacaggattgggtgcgtggaggtacatgcttcagtcattcagaatgctgttcatagccgagctggctgaggcttcaatttttagggtgataatcacactttcatctaccaaatgccagagtaatctttcaagagccaccgttggctttgggggacagctggggagaagagaaccttgcagtctcaaaggttggtatgggagaaatttgtaattcatgtataataaaacaatacagagcactgcttttaacataccgactaaggtacagacagagcacacgtctttttttgttaaatgctgatagattgtgtaagtatctacattggcaaagcttacagctgccagggtttgtcttcagatccgaataagaagtgactctatggtggatgccgggtggtgtcagatcagacagggaatcatcgtccttctgaggttaggaaagaagtcagcctgcccctggctggggagacacctcagctggttaagtgcttccttgcaagcatgaggaccagacttcaacacccagcaccccagccaggtgtcctggggaaggtttggaatcccagaactggagaagcaagaccgggggttacctgggcctcactggccagcctgcctagctgccatcaatgaaccccagctctgcgagagaaatcctgtgtgtaaaacagaggtggtgggctcctgaggatggccaccaaggctgaccttggtctctgtgcccaggtgctcatgttcttctgtacaatcagccctgtccccagtctgccccagcccctcctctgacacaggttctcggggacccacatgcataagcagtctagtcgtttggaataccgcttctgtaggtggctgtgtcaatggatgtggtttcttttagcttgtcccacgctgggaaagagaagacgctggctctctgcatgcgggcctacgatctcaggcttctgatgacacagctggggaggcttggtttccgtgtggtctcggactgccgtgggaagcacagactgacaggattgtacccttttatctagacgcactacttcggcctttggtttctcagcaagagccagcaggcgagatgggtagagctggagaagccactgaagaaacatctggacaagtttgctaacgagcctctgcttttcttcggagtcatgttctatgtgccaaatgtgtcacggcttcagcaggaggccacaaggtaggtacaatattccccctcgagttccccataagggtgtggataaccaggaggcttccggcgaagtggagctgctggttgattaagttgtgtgaggaagcagagtgggcgatgtagctgcaggttgtctgcctgttgccatgcgacagtcatattttggttcaatccgtgtagctaatgcccgacattccctgtagccctggtaaaacaggtgagttttgtgtctagcagcaaggaagtatatgttagggatggtcaaatgggtatgctagcatttcagtaaaagctagccacctaattctgtttttatgtaccccacccacccaccccaaactccgttggactctgcacttgagcaatagagtggttctaaagtaaacttggggaggatgatgtggagagggtgagaattttgatcacgtgggttacataagcagaaacaggaagtcagcgccttagcggagactcgggttggccgcgccgtctcctgtcctcgaaggaactgaaagtgttcgtaaagctcggattgcttgtgattccctgagcaaaacgagaccattttgttgatgtcagtgcagtgagcatggtggcaaaagatgtttgccaaagagccttggggtcgcccgtcaagtggacattcctgaaggagcaggaagcccaggagcacttttttgtttttgtttttgtttttttaaacctgttgctcagatttgggccttaggaatgctgctgacatgtgtagagaatgcagagtctgtgcattaattttcaccttgtgggtttcaggattgtaaagttctcaaatgacgacatggttggaaattttatgtttctgttagtctctctcctcctccttttcttcttcctcctcttctttgtcctccttcttctttgtccccccaccccgccttcttcttagtgaatatccgttgttggtagctgtggatatggctttgtgggtaaagcgcctggtgtccaagcatggggacctgagttagtacccgggaaccgtgtgaaagcttcaggtggcagcatggattcggaactcccgctgggagaagggatgggtggagactggtggcccagggttcagcagtcctgaggtccatggctggaaactgtggctttctgaggttagtttgagatcatcccatctcacccactggagatgatggccgactggaggtgaatctcttcatagtggggaggcctgctgagagacactggagaaaacgtggataagtcaggcccaaggttaaggcgacacctgaaaggtctctggaggagagcggcaaggggggctcaagtcccacaaaagcacgggaccagcctgtaattggcagcagtgaatcctggcgctggacagggcagagaggagaagccctggggtctcctggtcagccagcctagtaggaggagtgagctccaggtccagtgagcaagactgtctgaagcatgaagtggacagtgactgtggaaagatacccaacatcaacctcaggcctccgcacacatgtgcacacacacacacacacacacacacacacacacacatacacacacaatgtatcaaagggagaaaacatggaattaaaaaaatcaaaggagggaaaaataaatggcccagtgtgattccagacatgtgcaggaacaggctggcagcggccaggctgctcctagacagatggggatgagtcacgaagccataggagctaagagattaagaagctgggaactttcagcctcgctcccaactggaggatgtgttccgtggactgggaggatgttaactccttgggtcctgctgggacccaccacacttcttcccaggctgtctgtcttctcctcgccttggccgagtttccctcagcaggggctcctgcctgctgggcatcctctccctttatatctttctgaatcaaaggaaagattctttgcagtgtgtttgcatagcaacagactcattgtaaacacgtggttttcatatttgtctgggcccagaaggtgaaaagatggtttgtaagggaggcagaagaaattctttattgggcaacttaaggattgccaggggcagctggagagctgctggatgcctgcgcgtgcaagcacacacacacacacacacacacacacacacacacacacacacgtgcatgctcgtgtgcgtgtgcagtggcaagcttggaattgatgtctgggtcttccccaagtcttcttcaacaaagaagcccctcctcactgattcagtgctaggaacacacttttaaaggagaaggtgatggggattggggggaggggggactcagttggcaaagcgcctgccacacaagtgtgaggacctgagttcaattcccagcatttatgtaaaacacaagacaaggcatgtgctacatttaatccaggggatggggggtgggcagatccttggagccctctgtccaaccagcctagctgaaatggcaagtctcaggtctcagagaggaccctctttcaaaaaaacagttactcctgaggaaccaccacaaagataaatatctgatatataggcaggcaggcactcgcgtgtacacatacaccctaaaccaaggataaatagttttgaagagtgaatgtaagactcatggttcatgcctcatttctggaatttataattaattggtagatgtttttcttcttactggggtctgtgtcccttgcatttgctcactgatgagtggggtacaagtctactacaaaggaactcctattcgcctcagtgaggtcagctggcacatcctcctttgtcacggtagctggcttgcttgggtgggactgtccctctgttagtggtcaacatgccatagaatttgcatagtgttcctacagctgtagccagcccagcccctctcctgccagcggtagtcttagggcactgtggtagtattgagaagagttagggccgtgggagctgtttgaagtgcccccccccttctgagggagctgttgctgtgtcccaaagtgtcctctccttaaagtcatatccctactgcccacctcctctaagtactggatggggaggctgcacccttgtctgcaggtctatggcatattgaggacaaagccaggtcaggccaagcctgccatctttacatgagacaaaatggcactttgggctatggcatgagcgttcatgcggttaccatttttgtgggacagccaggacagccagggctatcatttcttagttccatctaccttttatttcctcatgcatgtgtttatgtgtatatgtgtgttggattacacatgtgtggggtgcatatgtgtgtgcacgtgtatgtgcatgtctgtctgtatgcctgtaaaagctcaaagctgatgttatattttatccccctatggctccctaccttatcctttgaagcagggttctctcagctgaacccagagctcagtgacagggctagtctgcctgctcctccctccaggggtcccagctccaccctctgagctctggagttacaggggggctgccacatgcactagacatctctgtgggttctcaggttctagtcctcatgcatggcatgcctgttcaacactgaaccctctcccaactttgtttgtttgtttgttatgttttttgttttgttttgaagcagcattttattggcccagaacgtagcaatgaggtcaggctgacaggccagtgaagcccaggggtctgggtcgcgggtgtccttgtacttggattttttccacggtctctggagtctgaactgagttcttatgcttttcctggccaggcctcttcccggcctcccccaaagcttgcatcctccttctttgcttggaaatactaccgctctgattagacattgccgtctgtcttgtgtgcactctgagtctatagccagcattcagagtgtctcatttagaagctttactacgactgtgtttccattttcctttaccctttattgtctgttccacagttcttttactgttttataatgtcatctgatgaagacttttaaaaagatttatttttaatcttgagtatgtgtgtgtgagtgtgcacaggagtgcaggtaccacagaggccacaagggggcgtgagcccccagcatgagtgctgggaaccaaactcacatacctggaagaataacaaatgctcttcactgctgagccatccccctgatggagttttaaagtttgccaagggcttggaagtagagactccacgtgcattcccctttggctgatagacttggcagtgctatccctcctgtctgctcccactgcggatgggcactgctctcttggttattgagaacattgtttctgccccacacaccatgtccaggtgcagctggcactggagtggtctcttattctttgagaagtcagtgtgatgagaagagagaagataggcgcctgtaagaagccgtgaccttgggcgggcatttgctttccctagggagaggcttttgtggtacctgggtctgaagtcaggctcttttacagactaaggaggtactctagcaccaagccacatcccccagtctatcttcctttacttgtctgctttcataaagtatccattccatgtcagaggccccgctcggcagttgggatgcaggaatgggcagatctcgatgccttaccaccaagagctgtaactccaggctggtttttatttcatttccatgtgtttgatggatagaaggttgatttgaattttttttacaagtttgtgttgttgactgcgtttacttcctggagactgttgtgtcgctggtctggctctcagaaccaaggttagcatcgtggctgtgcctcctgtagagccagggtcacgtgacttgacgctcagccaggcccggaacttagcttcgtgctctgtgctgccatattgaaatctttgactgacagatcctacattttcactttacaccaaacttcagtgaaggagcctgaacacagcctccactttctcccctggcttctgttcctgttctggcctgtggctcttaggatgggtggatctgagtctactattatgaatgtgatcaaagaaaaaatgcactgtacaaaacccagtagacagaaagcttttatgcaaatagagatgtgcctccggtcaccatttctgctcctggctccgatcctcgctccattctgaactgtagtttcctcatgttaaagagaatactgaagttcacacccttggttcagccagccagatgcctaagtcacagggtcacaggtgctgagctgctgctggcgttctcatctcccagataaaagctaccgtcctcatggtgcgcaggtgggtaggtagctgtttacttaatctgcagaggtggaggcaagctcactggagttcgacttgaccatgaagggcagtttctgagtcctttgtgtctgagggacagaccaaccacgcaaatgatctttagtaataactaatttggtacaatgcatttttttattgataggggaaaaaaaatcaatgtttcaaaagcaaataaatcagaaaccacactcctatttcaaaggggtcttcgtgtgcagtgtgtctacgtgtgtgcccgtgtatgagttcacatgtatttgtagctacatgtgtgtacatgagtgtgcatacaggtggagactcgagcctctgagattgctttctgttttgttcattgaaacagaccctcagctgaccccagagctggccagtgtgcctactttgaataaccagcttgctccaggtataccctacttccaaatgctggaattagagatgactgtgcccacccgtcatgtgtgtgggtcctgggatctgagccttgtccccctgctgcatgtattctaagcaccaagctagctcctcagcccagtctgcgctcctttaagcacacatgctcacctgtgtgctttacccattagtaaaacagtttgaaaaaacaggtataccatccccctaatctctcccttaaaataaaaaaaggaacaatttgattttaacacattaaattctaggttattatgtgtttagtggcctgttatctggaacatctctaaaaacaataaaaagtaatgtgcttttccgagagctatcgtgaaaactagctgaaaaataatctctcaagcaacctttttaaaaaatttttctgaatcccttgactttcaaagacgtgctgtgcattctttgactccacagggcatttagtgtaacactgaaggctgagacgagctcactgtctaactagagagacagcaaggacttgaggtggcgagcaggcgaggaggtggcgagcagctgaggaatgtctgtactgtatttgccttaaaacttgacatgatgacccaccgccatagcgcttacctttagagaaggggcggagaggagagaaacgggagccgtgggaagagatgttccgtcatgtccaggcttaccagctgtgctcgatgaaggtttaaaggactgtcactcctcatgaagaattctttggatctgtaggggagtcattataatggggggggtggtcaggcatggtgtgttgattatagaaagggcttccccaaaatctcaggatggtggaggtgcggggagtccgtcccttagggtcttgtgctctttttgtcttaggacagaatactgggatattgtgttggagtagagacggaggggctgggggagcaaagggcaggtcctctgtgtccacacaggaaaggcacagtagcagagtggtagcagacctggaaagtgtggacttcaaggaggacttccagttctgagaagttgtgcagcttccatctctggctggacgcaggctatcaccaagctattgtgctgtgtgtcacaggggcctgatgagatgggtgtgggtgtttgtctctgaaaacaaaagtgtttcattttatatagagagccttagtacccagcaaatgggcatctgggtcattagatcaagggtatctttcatatgactttgaagctgattacagcatttttgtgcatatggtgtgcttgtggggtggggattgtcagaggacacctgtggagtcagttgcatctttacatgggttcccagaatggagctgaggctaccaggcttgtgtggcaagcatctttacccccacccagccatcctgtcagccctctttcctacccctttgccagagcagaatgtctgtccacacttctcctcatcaaagatgatcaactaagcttaggaaggctgattgattgaaagaccagttctgacagagcaagacacttgtataggcgggcagatgccatcgtggctgaccttgttcctgtcccttgaagttacggtggcagagttattccctcccatgccctccctgggtcctgtaggcatttcagttgtgcctgccaatagttctattttgcacacagtaggaaagtcacaccaaccacatctcactgacccatttgcttccatgaaattaagtgtctgtctgtctgtctgtctgtctgtcttgatgctttaactgcctacaagagattatagtggttgagctgagtgtgcaagtgtttgccttcaaatcctccttcaaagacctcagttgtgtgtaagtgtcacttaagggccagtctgtaggtccttaggctatctgtggagagttgaagctcaaatgtttcagaattcttacatattcatgtcagtgtccgtttcgtctctgactacccgtgaaatttgtttgtaaggaggacattatgttattttttttctcatcagtgatcaaaacttgtgacaagaagcaatttaagggaaaaaagatttactccagcttatggtttgaagggacacagtctgctgtggtgagggagagatgtgagcaggcagctgtgaggaggtgggaatgtgaggccaggactccttcctcttcctcacagggactggaagcagaggtgggggctgagggggtcggggagggggtcagggaggaggagtcaaactataaacctcaaggctctgttctccagtgacctgcttcctccagctaagccctacttcctaagggagccacagtccccaacagcagtaccaccagctggagaccaagcgagcaaacctacaaccctgtgggaacatgccacatctaatgataatggataccattgttttatgtctatctttcccactcacttcccaaatcctgagccaccgtagcctgtttggatcacagtgtagaatctaaacacagtgccccataggaggctgagtcctttatttacagaaccagagtggcagagggatattgctcagccacattgccacttacgacagaagcctggcccttcggccagccccggaatggttttcggtgaagcaggctgtgggtaggagttatttccactccctgagagactttgccagctccacgctctccttcccgagactgcttagacaaaccccagaatggctggcacgggagggatgagctttgtcaaagagaaggaagtagcgtagacagagagacaggcgctcctttgaaggagccttttacatagtgggcattgtgcgctaaaggaaaccaggacgggctttagtttggatttatcagtcatctccagccttgggcacatagtgccaggctttcagatgacaccgaggcctttggaagagcaggaaagtgagacataggaaataagctgtgtcaagttaccaggtgtgtctgggaaacttgaaagagcccaggctgagccatcggagggacatgcgacagctcgctgctgttgatagcccccaactggctccgggtcagcccgccatccacttgcagctggagggaactagaggatgttccgtctgctgtttcccaccagtgccaaggtcggagcaaagtgcagcatagctgacctaaaattagccgaaaccaagccagagacttgatgctttactaggaaatcatgaagatgaaataatcttaggaagaaagcgcctctgaggagcaaacccgtttttgaagatgttacaaacagtgctactaggaagaagaaagcatacgatcatctaagttaaacttgaagtcttcttggctggcgtccctgaagtaaatgacccactgtggaaagatggagacgactgttgtgggtctgatgggacacctgatgtaggtcacttagcttccagaattcccaagtctgtttcagatgactactggagtcagcaaagaactattttggtttaatgttcaaggaaaatgaagcaaaccgcagaaccaaacaacggctgcaatggatgcccttgaccctggaagctggacaccttggccttcggtacttgtttcccattaggtcccacactctcctcagagtttcgtgtgagtacacacagtcagtcaggagacaataggaatgtcgtaagcgcacactgtgtcagaaacatagatgcggtctgggaggaggctcagtgggcatgagcccttgttatgcagtcatgaggccttggaaccccagcaatggaggcaggggggtggagacaggcagatcctgtgagagctcacaggcctaccagccagaaaccaagcttcctgtttagtaagagaccctgtcacaaggcagtgactggcagagcaatgaagaagactcctgaaagtgggcctctgcatgtgcttgccggggcccacatatgtgcacattcacatacacacgtactatgtatgcaaacatatacccccccacacacacacactagcaaaaaggaaacagagaggcatgtttatatatctctgtaatatcaaaatgtactataagctatgtctagtcgactggccacggtttgtcagtggtccaacttccctggtcctttggtagtcacaggctcttttattccaattactaacattagctttcagataatatattatatatacacacacacccatatatgtcagttcacagaggcctcccctttagaaggcagcagagaccagataaatatgagagagagttgtagtaggttgtggagtaagataagaatataataggagaactaatgggataggcacaggcagtgttgatggctgaaagccacaggggcattaataggaccatcaagcccaggttcagtccagaaggaccagtcaggcagtgtggccatgctcagctaaagcatggaggacagttagaagtcctggctgggtccttcgtgcattggcggcggtcagtggtgctgttgctatagcagtggtgagtgtggcttttattcagtccacatcaaggtatgacgccaccattggtccggtgtcttccagaagtccttggccctattttttaaagtgtggttttaatatgctgtgcactccccatatacttgattttatttagagatggtaccttctccattgttatttatcatctatgctgcatggctggtggtgtgcgtgcatgtgtgtgggtgtgcgtctgtctgcctgtctgcctgcctgcctccctgtctgtctgtatgcctgtctgactgtctgcctgcctgcctctctgcctgcctgtctgactgtctgtctgcctttctgcctgcctgcctgtctgtctgtctatctgcctgtctgtctgtctgtgtctctgcctgtctgtgctctcatggaaaccagacatcaacctcagacacctttcctcaggagccacgtatcttgtcttttgagacggagtctctcactgtctcatttttgccggcctgtctaactagcaagcctgtctttctccctagtgccttgattccatgtgttaatagcaaacacccaacaaaaccagtctagaaagagtgagggtttatgtttcgctcccatgttcatgactggttgaccctgttgtcctcctgtggtggctcatgggaatgggagctcatgatagcaaagctctctctctttgtctgagaggagtaaggcagaggaagggctgagtctacagcctcaagccccttcctcactctgtctcctcccaacagagccatcctagggctgttgggcctctgggaatcaaaatattatggcactgcccttaagttcttggttcatggagaacatacttcctgtgttccctctctgaattctaatgtgtagttttcagttcttggtcccaggctgaggaggactgtgactgtagctgtccccttatggactaggagatgagaattacggttctctgcctgacagttcctcatcctgcctacatcttcaacaaagggttgccgtccacttgtgtggagtcaggcctgtgaaatgttggctcatccttttttaatccagtcaatttttttttcctaccctaaaattatctttgtgtctagggttagaaaaaattttggtgccttggggatagttcagtggttaaacccactgtgaaccagacttcagatccccagaaacccacaaaaattttggatggacgtggcggcatgtctgtaattttgactcagaagacaggatccctggaacaagcaggctggcaagacttgccacagttgtgagctctgggttcaattaaaggaccccgactcaaaaagcatccagggagtcatggagaaaatctcaagacaacaattttgggttcccacacacaaatgcagatatgccccacacacatgaccacaggtgaccacgtacttgcatgacacatacacacacaggaggaatttttttaaaagattttgctgttgatactgagacagtgagaaaagtaaatccctaaggatgagaggacacttcgaattactcagaagtccaacagggatttgaaaaacaggattatagggagccatttccgtgctgaaaaaactgagcagagctttgctagaaattacagcatgggagattctcggtccgtgacagattgctggtttggtatttcatctttggcagtcgctgccatgttctccataaccagctacttttgaggattctataagaatccagctctgggaattccatcagtggccagtggattcgtgttgtagtatggctcagacttaaggtagtttttcctcttctttctgttttccccgtgagatctatgctcctagacaatggaagacatagaagtattcactgcgcatgcacagcgtaggacacaggggtctggcaggcggtctctgctgcctgcacctcaaggcccacgtgtgcagagataattcttttaaaattatttttctttacttttctttattcatatgagtacactgtcactgtcttcagagacaccacaagagggcattggatcccattacagatggtcgtgaccacctggttgctgggaattgaactcaggacctccggaagggcaatcagtgctcttaaccactgagccatctctccagcccacaaatagaattcttagtcttaaagggttgcataggtctgagatgatgagatgacatatgagccactctgtaaagccggggacatcgagatcctaagatgactgcggacagcaagagttggggaggggggttctacctatcatcctagacagaatccctttcctatcaagctcaagctgaggtctccacagcagcaggtatcccagggtctggtgtgtcactcgccttctgggcagtgtggaagcttggtctactctacagcatggtttgagggttggaggtccagactggtgcagttactgaaactgggaaaggcttggttcttgggcttttcctgcaggagttggggcgagaggcagaaacctggcattcaatgggctcttccatctccatccacagttccagggtcgctggtcaagagtctggccaaacattatttgcaatggttggaaggtttgtagtttctccttttatcatagattctagggaatatataagtaattaattcttttgcctcatccctccttcaaacatctattaagtcagtagtatttcctcctggcttcagatacatgaattctccgacaggggacagacccctttaagcagtgatgttgctttttgttaaaaattctagataaggaattttaggccagttccctgactctgctgtcgtttttccctacaccgggggccggggggatggggtgggtattgctaacggtccccttctctctccatctgctaaccacatttttaggcatttctgctgacttcttgccatatacctggttgtaaccagaaagacaactccttgggtccttgggcagttgactcacgcttccaaggggtaatttaagctcctgttcccacagtgcatgggagctcatattgtggacacatgatttgcagggcaggcaggtgtgtatttcaagcagatgagtcaagtcatatttattactagcctaagagggatgaaggctccctgctctgcagctgcagttcagaggaggagccagagctggctaatgagtaggctaccttgtgtcttgatctatttccttccttaaggctgctggttccttttctgaactccctccatgggttggcagcccaaactcacattcttcccatttcatgagtgactaatgtttaccctaccatactgttcattgtaaactttaacacacacacacacacacacacacacacacacacacacacagcttgcatcagtaaggattgaattcaaatgtatatacatgctaataagtacttttactattgagccatctctccagcccctaattttcccctcccactccttctccttcccaccccagctccttccccctccacttctatcctcccttttttgtccttcatctttgtatatatttgggggtacatggagaggtcaaaggtcaactttcacgagtatgttttctctttccactttccatcccgctgagccaggctctgccacgctgtacagtctaggctagctgacccactgtcttagggctttactactgtgaacagacaccatgacccaggcagctcttttaaggacaccatttaattgggactggcttacaggttcagaggttcagtccattatcatcaaggcgggaacatgacagcatccaggcagacatggtcctggaggagctgagaattctacatcttcttctggatggtgctagcagaatactggcttccaggcagctatgatgagggtcttatagcacacacccacagtgacacacctactccaacagggccacacctcctaatagtgccactccctgggctaagcatacagaaaccatcacacccattaactcccaggcaattctcctgcctctgccccagtcttgcaggaggaatatgagactgtgcacaccaccacatgagcttcacggatcccagcgacacagttgtcaggttcatatgacaggcacttttgcttttacacaccggttcgccagcccaaactgttttccacctggatttctcagtgttcccctagggtcttgaactcctgttctcaagtgttgctccggctgcaggctcctgagcacagagtctaaacaccacacctagccatttctgcaactcctgcatgcccttgacataacttctgacaacctttgtaggacgtgactcacttccctctctcttccttctgtgtctctcgggagcactttaaggagatggcgcaggaccctgggctatgcaggagggagggagggagggaggagtgctggggatgtggggagcattgagagctggggggggggtgctctgggctggaggatactagagtcttcagaagcactgtgggactgtgacctctgctgttttgtgtgggattggagaagagaaaaattgacctgagcctagagggtcgcttggctgtcacaggtagaaacacctagcggaccttctgatggaggatgaatgcccagcacacaaacagtgtaagcctggtcccggggtcctggaggccagacacagagtcaggcaggtctgtgagcttgagactgtttccttattaggaatcctggatgttttgttcacttgcttttttcctttaagctaaaattcataaaatgttaaaaaaaaaaaaacgatcttgttagttacttaaacatgtgcatccagtgtttttagtgccttcacagagttgggcaaccatctctaccatctaatgtcagaactcccatagctcctttcccccttcgctcctcttcctcttctcctcctcctccttctctttcctgcctcctcttcttctcctcttcctcctcctctttccctcctcctcctcttctcttcctcttctcctccacttccccctcttcctccccctcttttcctcctcttcttctcttcctcctcttcctcctcctaatcttctacttcttctcctgctccttcctaggttctgccatcttcctgtcagtggaatatcaaatgaggtcgctgtgtctggctcttttgcttagcctgcccagagcatggctcccttcagttctccatccttgttctccttaagggacagggctcactggtagcctaggcgggtcctctgtgtgatttcccggggatgtcccagcatgctcagagactccacctcttcctgtggagttgtagcatggtgggatcgcgtgtaatttctttcttcttttgcagttgactttgggaccttttctcttttggtactgtaggttgcggtgctattcatactcaaggtggtgtggtttagtttggtttggtttttccccctgagacagagtctcactctggagccttggctgacctggagcctaggctggccttgaactcacagaaatctacctgcctcttaagtactgggattaaaggtgtacacccccaacccccaccctccaccccctccccctcccggctcataacctgtacatggagtctctgtaatttgttataattaactcaagagttcaagagcagagaggtggatcttgtctgggcttgccttgtttcttatgcaatatttgctgtcatggtcaaggggtttgtagagagtgtatgcttgtccccaagacttcccaagctctgtctctgctctggctgtgggtcttggcatctgcttcagccagctcatactttattttggcgtctacactttacactgtagtttttcaggcttctgtaagcatgtttcatctcagccgaagcagatagggccccccgtgatcctttctagtcctccagataggattggatgggaagggacctgtgcccaccgacatagggcagagaaacagagtctggtcattccctcttgctccgtgatgtgttgtggaaactgagtttctgtttcacacagaaccctggttcaggataggccactattagggcgtttatggtctctatatgctgagcttgtccctgtaatttgttataattaactcaggagttggagagcagagagtgtgaatcaggtctgggcttgccttgtttcttacacagcatttgctgttcctggtgttttcccccagtgctcagagcctgtgtgtgtttgtgtgcatttaaacaaacagtgtcctttttaggaaagaatcacagagacttggagagtcttcctaagaaggtgggtgtctcagggaaggtgactcttggtcaggtgctgctgaaaccttgtggagttgaacacctgccatggaaatcctgtctgtgtatgtttgagaaaatgtgtgtgtgcgcatgtgtgcgtgcgtgcgtgtgtgcgtgcgtgcgtgtgtgtgtgtgtgtgtgcgtgtgtgtgtgcgtgtgcgtgtgtgtgtgtgtgttctcaggagtacacatcagttagctgtgactgtgaggaaggctggaggactttcccttttaaggtcgcccatgtcccttgtagggttagccccttcatcttttctctggggtcattgtgtttcccatagtttgctgctggtgcagttttcattgacggctaactcggacattcattgaacataaaagctttttagctagtgcacagaccgggtaccagacacattattatacatatcaggaatcatgaactcaaataaatccttcccaagggttctgagagctcagggctggggcggagaatggcctgtgtaggactgtctagcgactgtacggcacatggaggacaaaacccgtgtgggccaccctgtccgttctgtccctttgcagctgagagcagtctttggaatgcatgggtgagcttccctcccctgctgctacccagccctgacagtcttagggctcagtttgcttcctcataccccagggtcctaggacagctcgaacctttctcattggaacaggacaacatcaagcagagagcaatgttctgtgatgctttggtacattttccaccatcctgggagaaggttctagtaaattccggaaaggggctttctgatactgctagttgcaaagaaaggtttctgtccaggaggtgtcgttttaaaccttaccctgctcttagtcattaagacagctgatgtccttttcgcactctgatcctccatgcttacgggaaggcctcaaagaccgaatggaaagatgtactacaaattgtgacatttatattggctcttcagatgaggggcattgttggctgagctggatttgagctacggaggaaggatgaacggaaaggaacacatagcgacactgagaatgtagaccagcggtcacagctcagagtattgctacccatctggcttcaggcagcaaaaaacagacctggagagttcctagccatggaagaagcacaccctgagtgcatccccaggctagcctcactgattgtgcatcctaagtacattcccaggctagcctcactgacgttgaggcacacaacttctcctcgtggagaagggccagcttctgcaagcctttctcagaagcatgggccacacacagctctgttagtgatattttcagtttcatttttacttggggatttcatggaaaaggagggctcttcctttttatgtccgtggttggccctgcttggaggtgatgctatctggcttttccattaagaagcaatgtcaccttggacaagtcagtctctcagaacagtttcctgctgtccacatggaggtgttaggcatggatgttaaactctcaactgactttcttgtttagaattaactatccagcatcggttcaaggcccccaaatccgtaatgcgctcatgatcagaggactgtgccccgcactgatcagtggactgtacccaatactgacttgcagagtcaactttgggatataggagcaacacaagtcccttcttgcacactgaagatttcaggacagagggaaataggaaccacatgggctctgaagatgtttgctagagagttgcggccatttgtagtcacactccgtgagcccaacactgttaccagaaaatgaggtcatctagtgttgggggtgggtcctccaaacaagcatctatatacagtaccttaactgtgctccactcccctgcctccatcctgtgggcatgctggtgtacttgcaaggcagtcaggacaaatccaggtctgaaagcttagccatcgtgatgggctcttcccaacttggggatcctctgctgccctagacttggaatgaaggattcagttgggggaggggtgggaaacatactctcaaagctacgtgtcctcagcctttgagttcctggcgcctttctcgtggttctgcggtgaggcaggccctgctttgtaggctaccacaggcgttcctcaaccagaagggacaaccctgcaagtacaacacacagaccggatgttcaggttcctcacatgtgaattaaaatggaactgaggggacctagccaaacatcttgaatgtaatactatgctgtgtagtttcttagggacgtctccatacctctgtcagaatactgagcgcttccttggcttggccaagtttagcgtttaaaaataaacacaaacttcagttcaaaatcctggaggaagaaggaagttggaaaagttgttcatgccgtagaatatggacattcaggatggaggacctcccctcaccccacccccagcctacctcagagcatctgtcagctcccagttaccatgtttagccaaagcaattgttgggacccttgtctgcatcacacagggaaactaccatttcctcgatgaatgaatttttgctttaggctaaaatcaagatgaaaaacgagatgagaaaatttactttgatttaacgtgtagaattatcacccgattcttacagggagagctggcctgtaacctaagactagcccctgggtctccacagccagatgggatgcctcgaggacgtttgagtatgaagaatgttttagcattttctgtgcaagcttagattcaaagcggacctctttggaaacttggctgtgcttcatttcctggcatgacgattggctggctggatttttcctttccacccacagtgctgacagggtggagtgtacttccatgaaattgtatgtttctaaaataggacccacagttttactttactgcagttagaagagttgtatctctaaccaaaacagagaggagcccaacaattctaaaaacagaacgccagctctgctctcggatcctgcagggcgccatttttatattttacaaaggggctttcagtgggaaaataaagctagcacataatttctaaagtagttcaaattttgttcttttttttcctgcagtcttactagtaactgtcgccaaagtctcgtgtggtgactacacatatcagtgcccagaggtctttgtattctggatggcttccaggtagaacatactacatccccgacactgtatccaagcacaggcatatgccagcctacacaggcatgaggagcgtccagtgtcctcactgtagagttggagtcattgtttcctgtcacaggatggtctgaattggagctgacatgtatgtgggctgggatgtggcccagtaggtagagagtttccctaacatgaagcggccctgggatcggtcctcagcagtacgtatcaggcacagtggctcacgcctctagaaggcaaagacaggacgaacagggcttcgaggtcatccttgctcacatagggagttggaggccatcctggcatccgtgagaccctgtctggaaaacggcagcaacaaagagctggatgtcgctgaatagcaagccttgggctcaggagaaatagagttgctggttagctggatcgagtggatttcttggtaactgatccggtccccaaaagaatctactgacagcctcttggctgttccttttcacttccagggtgacatgggagacaacttccgttctgggtcacaggtgacaacacctttacaaacatcccctaccctactccaccctgggtactggaagactgtcccatcagacagcacagcaaagaacttggatggactgacggggtccctgtgaggcagagactgaggtctggtccttcccaggttttgcatttatgtttccaggaagtgctcccaggaagtactcccaggaagtgctcccaggaagtgcttcctaagttcatgctgacacctgcttgcccttctggcttgaaggactgaaaataagtggaagcaaccaacggtagagaaggggtgtcccggggattcagacattgtgtgactagtaggaggaggtgagcttttgcctccttttccagctgaggtccccaccgcaccaccacttgggtcagttttgagaaccctgctgtagctttccttagtaaacctgaaggtgctttctgcctgctcacaggatcttaagaggttttggttttggttttgatgccctgaaacattactggagagagactgtgtggcccacggggcgaagctgacaccttttccttgtctctctttctgctctcatcctctcagttgtgaaagtaggaccctcaggctccaagtggctcgtcttcaaagatgtgcctgcacgtctgctttcacggtgaactcttggcacttaaaaggggttttgataacttaaggaccctcttactggctctgtttcctccctctaagaactgctggggttgcggagatgaaagcctccacaaaagactcccaggcacttcccagggtctcttgaagagaggttacctggagggagtgaggcactgttccctggagaggcagagggcaccgagtgcagagccttgaagggtgggtgtagacgtcatggcggccgtacagtgagtctgagatgagaagcatcctcctggagacatggcccttagcccctcctcagactcacggagctgcctcccaggaggtgcacggcagttagccgtgcttcgttctgttttgatacaaggcctcactctatagcccagggtagcccagagttcactatacagcctgggatggccttggatttatgatctttttgcctgagccccttgagtgctgggattccagattcacactgttagtttttaaacaccagcatctcatgggtttaagtaaggtgatgcaagctttgcctgtcttgaagagggttgtgctcctccaagcagaggggataatgtgaagccttggtgggttcccgcaataaagaagaacagagaaactggggttgtgattgtagcctggctcagaggagagacaggcaagcacagcggctgtggaccatactgcctggggccagcctttgattctccttgggagaggcctgaaaactgggagttaccaattgcggacttggtgctctgcacagagcagagcagaatgccagaggatgtgactgaagcttgccttactgtggccaaccccagggttcttcgtgttgggtgttttgacttactcttatcaagattctaagttcaaaaggtcgtgcttcagggttatttgttcagattatcaggaattaacaagttgtagcttccttttccctctgccatgcggatactgccattaaacaccctaagaatcagtctgtccctccctccgttcttccttccctcccttcctcccttcctccacagactggaggattctgggaccctgttggacagaacactgaacacttcagattcagtgggaggctctgtctcataagaaaaggtcacagaggcaattgagaaaaaccagattggcttcttgtcttcacgtgcacacacatggatgaatttgcacccacacatgcatacagtgccctctctctctgtctctctctgtctctttctccctgtctctctctctcccttcctcccttcctctcccctctcgttctccttcccctttctagctctttccctcttctctctctctcatctccctgctctccgcaatgcccttggtttcactggatttagtattgatcttggcatttcctccctcgatctaagcacttaccagaattggagaaactggcttttgatagccagcaaatgactttggtggtaaattcttgtgtctaattcctttcccatgtggtaggacttgggggtaagaggaatctgaactgtggtgacagttaaggactgaatagtgtccacagaggggtggtggcctctgatgggcaaacagacaaaggttttctgatggactggcctctaaagctcagtaaaggtcattcattgatacaggtcatttattgatagagttattcattgatatgggtcattcatcgataggggtcattcatagataggggtcatttattgatacgggtcattcattgatacaggttattcattgatacaggtcatttattgatagagttattcattgatacagatcattcattggtacagcccaatgataatggtaggtggaagatccctgattgaatggtgaaacttgtaaaatgtttataaatttatcagataaaagatcaggtgggagcaggaaacgaaagttagttttctgttgcatattacaatttgatttaaaataattaattagctaactcccagtgtttgcccttcagatctgaggctagaatcttcccaccagagactaacctgtttttttgtttgtttgttttgttttgtcttgtctattgtctttccctgctctatagtcctgggtgggatgggctggtgtgggcagagagccagtgttttaccctccaggagcctttttcagggtgtcaccacacctgtggtagtgcaggcataccctgccattatcagttctccatgtctagggaaaccaggcttggggtgacctttggggtcccagacagagctgtcaaaggtaagctgtaatacagagcgttcttaccaggagcaaaatggcgccagtatttcagacagcgtagcaggggcagtctggtcggagaggcacctgtgggagccctcgaagcgagcatctgtgtggaggtttttcccgtgggccagtctgaaacagtggttctgtcaggggcagtgcgcactgtccgagcttctgttcctaggaggctgcacggtctgtcgctgacagtttgcttttggaaaaaagtactccgggttggaaagttaaaaccagcgacgttttcatggatcgcaaacatgcgaggctaaacctcactctggaaaagcttcagccgaatttcacgttatttggccaattagtaatctggccgaccagacttttacatttatacgttttttttttaaatgttatttctacctcaattagggcaatcaatataatctgcaccctgacatacgcagagaggcccatctatcgggtgatcctagatttttgtcaaattgctaattaagccatcgaaagagggcattgttgagtgttgccgtgacctttctggtcacgggtcaccctgaggcccacagcaaagtgtctgaagagcgtgttctcacgcacagtgaactggcttcagcacctgctatggaacagagggacccaggggcagaggccactgtccgtcttctgtaggtgacatcccagcatcacccgtacatcctgctgggacggatcccagtgtccctgtttacagttggtcctctcttcctgtaacagatatcagtattacctgcaagtcaaaaaagacgtgcttgaaggacggttgcggtgctccctggaacaagtgatccggctggctggcttagctgtgcaaggtaaggcctcctgtggacttctgtcttctgcttcagtatgttggcccagaacaaacagttagatttggttaagcaacccctggctgaggctccctggccactttgagatgttttgcattaagatgaaaaattagtgatttggggtgacaggaaaagatttctcgaagctgctttcgaatcagtcaatgcttgtttgattctggttctaagtgaagaataatagttttaaaatcctacctgtaattgaagctgtctttcagagtgtggaggacattcccctgtatggtatgatcataccctgatattatgaataatttgctgtcactacttaaagtaccgtagcattaaccaatatttcatacctcctgtaatagagtttacgagagagcgctaagtcaatggaggatgtatgatgagggacaggagttgggtgaacttgtctttcaatctttactacctcgtggagagtgttattatgtgtgcttcctgtttacatttttatttatgtgtacatgtgtgagtgtggtttaggtgtgtgtagaggccaagggagggtgccagccccactggcgctacagttgcaggtggccgtgagttaccacatgtggagaaccaaactcaggtctcctggaagaagagcatgctccaagtcattaaccattctccagatctgtaccatatctgtgtatctccctccctccctctgtctctctctctctctctctgtgtatgcatgtatcaatcatctgtctatctatttatccatctatcattctacctacctatttattgaatgatggtttaaatgcttttgctcatattgaaaataaagagtgtgtgcctacgtgtgtgtatgtactgtgtgtgcaatgcttcaggaggccagaagagggcgtcagatgcactgcaactgtagttacagatatttgtgagccaccacgtgggtgctgggaactaacccatgtcttcttcaagaacagcacatgttcttaactgctgagccatcatctctccaacctcaaatgtcagaggatggagaacatgcagtgtgcccttcaccttcacactgggccatgggtctttgagaggcatttctttctgttttctgtgtgtcctctcctcactgctcgggcatcctgggtgttggtagacccttgaggaagttggtggattcagtctcgattccctttctattaggaccttgaagtgagttattttgtctgtatgatgagactttctttaagtacataatgttaaagcatggttctcttggcctggagagatggttcacaggtaaagtgctagcttgccagggtgagggcctgacttggtccccaagaacccacatagacaggaggcttccgggggcttgctggacagaacactgaatacttcagagtcagtgggagaccccgtctcataagataaggtcgcagaagcaattgagaaagaccagaggttggcttcttgcctccatgtgcacacatgtggatgaatttgcaccctcagacagcacccccccccccattttcctaacagcccctgttggtccattagaaagacagaccatgctcacagagggaaaggaactgtaccaggtgattgaacttgagacaggctcagcaaatccgctgcctgctctgagcacctcacctgctctgtaaggaaagctccacctctctgccctgttgttctttttgtggaacacgcagcctctcttcctctcactttgctgctaagtgcttttccatcgagatccaatctggggttggcttttgtaaaagtgaggcagtgaaagtcaaggtatttctgcagattctatttgcacatgccgcccccccccccataccacagtgagatggcaacgagagaaacatggctcctggcatcttgggacatgtaaatgtgttcaggaggtgtgaagatttttgaggttgcctgccaagggtgatttacagcggggctttccagctgcagatacatttccagccacatttctctgtattaaccttgacttagaaagtccccttggcagacagggataagataccagcctggtacacagtcaacaaacaaacacgggtttgtttgaaagtctttaaatagccattagggcttgcttccaaatttcctcactctttctaaaaatcatctagtggagttcacatgccagtactgacagttgctaggttaaagttgggttcaagtaagataggcactgatgttgtttaatggggcagcaaagagagtgcagtcaaagggggtgtgtgggcactttgctgtgttttactgtctatgtcttcatgtaacgactgccgttgtctccctgactttccttctcagctgacttcggagattataaccagtttgattcccaagagttcctccgagagtatgtgctctttcctatggtgagttcattttgtttctcttggtatctctttcctcagacattttagttttgttttgaaattctctgtgcttcctgggaaggaggtctgcaccctttaacagagggacaagtgttctgaagtaccaggagtagaagggtgcaccctcccacctcaaaatacttcctgaccctccccctccccacaccaaccccaagcagagggttggtagtatggagaggcagcactgagccttgtgggttgatttcaagtttatcagttccagtagtgcttttcttctgttgatggaatctataagttttgtatgcatacagtcacataatcagcaaatgtagactattatacttcttcttttcctctcatccctatctatctatctatctatctatctatctatctatctatctatcactatctatcatatttatcatctatctctctgtctgtctgtcacctatctttcatctatcatctgtcatctgtcatctctatctatctacctatctatctataatctgactgtcatctatctgccaactatctgtctatctaccatctgtctctatttatccatccatcttcctttctatcatttattattgctcaaattactttagttacgctgttagtaccatttgaatgcaagcggtgagagtgggctggccggcagctcagatgtcgatcactctcccagcttgtgtagccatgtattcagtccccagaaccacaagagaggacaagaggtgggggaagtcagggaaatacacagaaatcagtctcgtttgcaggagcacaagaacataggaatgagttcactcaagaagacgaaatgacccattcgctggcaaccgtaaaacactgaagagagaaacgcaagattatacaaacacatgctctagggccgtggcttagaagaatctgtgttaaaatgtccatgcaacccaagcagtctacagacttaatgcaacccctgtcacggtcaaatgtcattcttcacggaaacaggaaagacaaacccaaaattcacttagagctgctacaaaggatcccaagtagccaaggcaatattgagtcaaaggaaaaaacagagccagagacagtgtgcttcctgaacctaagatatgtaacccgtgtgctggtaacaacttgatgtagacatctgagagaagggaaccctgattgagaaaatgccttcatgagatcaggctgtacactactctgtagagcattttcttcattagtgagtgatgggggaggcccatcctattgtgggtggtgtcatctctgggctggtggtcctgggctctataagatagcaggctgagcaagccataaagagtgagccagtaagcagcacccctccatggcctctgcatcagctcctgccctcaggtccctgccctgcttgagttcctgtcctgagttacgtcagtgatggactgtggatgctgaagccaagtaaagacttttctctcaaacttgcttttggtcatagcgttttgttatagcaatagtatcccaaactaagacctcatgtgacgatggctgacccagtagagccctggcttatagacagacacgttgaccactggaatggaatggagcccagaaacagatccacacttgtataaccagttgccttttgacaaggaggccaagtacatggcaaggggaatggcagcttcttccatatgttgtgttgggagagcttggtacccacatgaaatgggggccttcctcaccctgtgtgtatgagtggactaagatgtaggcataaaccctttgactttagaactcttgggaaggcagagaggatgccacaagacctccatcttgcaatggcttctggccattgcatatgacccgtcaagtgcaagtaactaaaaagcatcaaggtcacatcaaacggaagcaaaggtcaaaatttacagagggaaagtatttgcaagtcacactttgcaccagggacttttagccgtatctgtgggagctcaaatgtgactgtaagaaaacacacaaccttattacaaaatgtgtcgtgtcgcctgaagagacatttctcaagagaagataaaaataaaagccaagagccttctcacacagctggatttctggggacaccaggtcttcaagatggcgtcactcgtgctattgaaggagaagaagctcatggaagataaacttggagagatgccgagctggatatcaatgtgggatttcaccgcgtggcattacaggaggctttcggacagggtatgactggtattacaagtatatcaacagtcagaaaggcagcagcatgtgagggactaacatggtgctggcagcctacaaggttttcagctactgcatttcttacaaggagctcaaacaggagcagcaactcaagtaccactgaagatgggtcactatggagggcaactgcatggctgagcatgactgcctgccgtgctccgatccaggaagaattcaacgggctgaaccgtcataccctgactgagaactagtgtccaataaaaggtgactgactgcttaaacaaaaaaagccaagagacacattgaagctgtcatgtagtctacagtggaatgcctgcttccttctggtgggatgactgcggtcaaaggacagtcatcagtgtacctttgtacaccttgtttgtttgttttttgttttgttttgttcaattgttttgtcttaaatcctgacctgggtgatagacagctgggaatgaagttgtacaagaactgagattgtcatgttccccggggtaagatttaccaaatcaggtgccatcccatatacctagaagtacagtcaggagttgacctggggcgggaccacgtgcccctcaggggttaggaaagccttggagatgactggggcaaatcaggacagtgaggagagaacagaatttgggaaagagttgcaggtacttttcctatcccttgtctcttgggagcggaattatgtgcctgagacccacggccccagcggagttagagttcttgggttgtgcatggttggcaccttccgtgtcgaacagagattgttccatgtgtggatgtgggtctaaaggcagagggtgcagctcccaggtccttgtgccgttacagggatggttacaggaaaggagaccgttgattagggaaagacacagaagtgtgctacatcccaacagtggtctgtctcccagaggggctcagcaggtctgcagtgatcctctattgttactaatataatgtaatataacatataatttgtatattatatattatattactctattatataatatatttattatataattacatattgtatgtaataagtatgatataatataatgtgagctcccaaggacttacagacacagatttctcagagcatgcgcccttagctgagtgaagctcgggtggacgaagggtcaccagtctctctacagttgcgcttttccttgtgatggtctctggaacctcctcctccatcgtcgtccatttccctgcctgaagaccttttgctggtgggtgcgcgcatggagtctggataggagatacagtttagataccaagagagacattaaaacacaaaagcagactccaaaagttggttggaataaataaaacccgcttcctctgtcagcatgaaggcctgactttggtctgtaaaacccacaaaaaagctgggtgctatggcatgtgcctgtatcccagcagtgatgcactggggaagcagagacaggcagatctctggaagcttgctggcctggtagcctagccaactcagcaaagctccagggtaggaagagatcgtaaggcaggcaaaaggtggaaggtacctgagtactcgcatgaggttgccttctgacttccacacaacatgcactcccatgcatgtgggtgcacacacacacacaagcacacccatgcatgcatgtatgcgcttgcatacacatgcaagaaaaaaaggcaagaaggcaaagggggtaagagagggaaagagatcagctttggcgctcgggagaaactaagcatgaggtgatgaaacctggaggtttttattctttctggttttggagattggggtttcttatgtccatgatgtcagctcagggatcacagcagactccgagcacgcctagtgcttaccgttgatggagagccttccagaagctttccctctggaccatggctctgtcagtgcctttgcctttgccctgaacaaaatccttctaaggaatcagcgtgccaagtagtgcaaactgcccgctcagccagtaggcccttcttcacagagtcctcgctccacacctgcctgcaggataagggattaatctgggtttaagacatgccagacagtacccagtgatgaaaatatttccctggcctttttgatattgttttattttgaggcaaggtctcacaaaatttcccaagctaacttagaacttaatatgtagcctacgttgaccttgaacatgagattgtcctgcctcagctatcctgactcccagctatcaagattattattcttaggtctaagcttgctctctgcagaatggtttatcattaacttcagtggatgtttatattcaaatttaaattaaagttaaatgaagttagaggttgagttttctgtccacactggctatctcttactgttcagtagccaagtgtgtgtctaggggctgctgtgtaggaaagatcagaagtgtttttatcctcccctaaagtcctctgggaatgctgaataagaagtcggtggattcctgtgtgcatgagtctggaatgggcctaggcttgggctcagccctcatctttcttctctgcgcacatatccccagtccatcctgccatgatctgtcctgggtagtctgtgttctgaaacttcaccacatacttgctgggtggtgctgaggctgtattggggttaacacccctaactggccttatgaccttgagcaaattagctgatggcctcatctgagatgagaataaagccagcaccgttgtgaagatcagggaaaccatccatctgagcttggtccagggcaagttctcagtgaccagtcatttgggtgtgttactattagagtgactctatgatatgcaaatgagttgatcagtgccactgtctgcattttgtaatgcaagcagacagggtaagcagagggatggacaaactaccgttaaccagtttggcataatcaaaacctcttgtctaataatacgaaagtcacatgccgtccaccaagtttagttccgtgatatttattgaccgcttagtttgtcttatgaacttggaagggtcattttggaaaagccctgtgactggcttcccacaggatgggaagaattgctgcccttgaggtagtcatattctgtcagggggatgggggcaaggaaggagctagggtgctgtacagataaccacagtggaaacactgtagaaagaacacccagaagaggtgtggggggtgcccacagcagagagggcatgtccaggtgagggaaggcaccgtggagggagcgatagctgacatggggcatttcccattgcatgatgtactgtgtagttctctccagaagtgtgggcaccagtgtaaataaaaccagtaatggctgtgttaagaacagcagcttgcccgaggctctgcactctcagaggaggcggtttggaaggaaccactgggtcccactgaagaaaggtccagatgccaggcccaggtgtcgatctcattgtgcaagcagcggggagccatggaaagttgtcaaccttcagctaggttctaccggagctttcaaagggaagcatgcattcttcagctgggggagggacgcgggatgaatggccctgtttgatcctgcctagtcactgacttggcagatggcatttcttcagcagagaagagaacaaagtacacagacggcccacaggtgtgtggctgtaccgcactccctgccgtttgttatccagcactgccacactcttacacatctctggggtgtgcaagcctcacctcgccccgcccctccccccacatatgcacagctggagacacggagctgcagatagaagcaggagggtactttggggccctttcaaagtcggaacaggaggtttagtgaagccctttgatcttcaattcattctcttcctttgtgcctcttagaattagccagcacctggtatggctgctgcctgagaggcatgggagcagttagggtgtcaagcacacaagacccctcgagtctcacaacaggaagcctgtttatttccttcctgtcatcccagtggctgtccagaagtcaatcaataccaataataagaaagagccctttggggttcatctacttctctgtttctcgggcgcttagggccttctagaatccacagaacagaacttccagacacagttatgggctcatttcttcaactttcaacaataccagttcctcacgttgttgttttgagatagagtagttctcagccatgtctattttgggtttggtgtaagggttgcacccatgtaggcttatgacattggaagtgaacttctatataaataaatgctatttaagatatgtgtgtgtgtgtgtgtgtgtgtgtgtgtgtgcgcgcgcgcgtgcagaaatcagccctggctatcatttctagagtgctggtccactttgggttttgaagctgggcctcttgtttgcctggaattcactcactaggctgcatcttcagggcagcgagctccaggttccagccttgcagactgtcggcctcccaagccatctgtttcagttgttcccagcacccacgtcaaaccccgtaagacacccaagccatattttctcctcgtggattctaaggctagacctcaggtgttcctgctcacacaacaagcattccctcacactttgtatgaatccgcccgcatttcagaccccgccctgtaccctagacagcaggagcagggagacgccctcagcaggacgtagctggaagatttcttgccgttacctatggagcatagaagccagatgtgcatgctttgccctcttggtgcctgacagtctgggcatatccagtatgccttggctgaggcactaaggaggacatgtacacatgaggtcctgcagacagtcctgtaggtgtcctgaggtgtgttccagcccctcccatgctgagcagcaagtaacaccagaaagagccagctctgccaccacacagtttaaactcattgcctggaattttagaggcaggcaaaaggtcctggcacagcagattccaatgttcaactcttaaaaatgatagcctgcatggatactcattggcttctgccctaatcattaaaaaacacatacccgcaggctgtggagacagatggacagtaatgagcttgtaaggacgtaagtttgattcccagaacccacgtaaaagaaaagctggctgaggaggcagagctgggtgaggcctggagctttctgcctaacgggtcccattggctatggagaagacgtgtgtgcaacagtagggaccatatacctgagcctagtcttctggggagggggcgggtgcatcactggagacacctgtcaagagagccactgtcagacaccacccctgatctgtaatcctgttcttccaggatttggccatggaggaggcggctctggaggagctaacccagaaggtggcccaggaacacaaagctcataggtaaggcaggcggagtccgagagcctgtccggccaacgcagcacacattctgtctcctcccaactcctggttgtgcttcctccctccctcttcctgtccttatcttttcttccttactctcttcctctccctccctgcccctcctctctcttgaaaatttttcctttctaaaattatggaaaatcttcatagtcctgagcaaactggtatcttttcaaagtagacaacactgtccacagaggtgtgtggaatagttagtgcttttaaggctaggtgtcttaattgagtaacttaccttctttttcttatttatttatttatttatttatttatttatttattgttgagtaaaaggcagctgaatgccaatgccacagttgataaggtaccgtcctttctggtggaaaggtttgccatccccagtgccgcagctctagagtttgccgttaggatcctgagggtttccagtcacttttgtactgctaaccgtttcctcccgtggcgctgtttggattgtagcgggatcctgccggctgaagctgaactgatgtacatcaacgaggtagagcgtttggatggatttggacaggagatcttccccgtgaaggtaacaggctgtccctgcccctgcacatgttcagagttagtgccacgggcccgagtggcttcagcttcccagtgtcatgtgacattagttgataaattagttactttttcttctctgtgactggacgagcggcaacttgaaggaggaaggtcaatcttaccttggcctttggtgctggagaaggcactggggcagtgggtcacattgcataagcaaccagtgtgcagaatcagcagggagcagactgctatgatgcctcaggactgtccctggtgacctgtttcctccagcaaggttctgctacctagaaaggttctataattttcccaaacacttctcccagctggtggtgatgttttctaacacgtgagcttgcgggggacatttgtcatcctaaccagcacagcggtgttaagaattcactttagacaaagagaaccccttcttagctcagagacttggggtttgatctttagcagaatatctgcagttctaggacatccatctgaagccatgtactggcactgctcaccttaaagtgtcaaggccagaccttgcctttcttaaagcaggacaagcagcaggcgtcctggggatgtgaacggaggctagcaaggggggttcttgtgctcttctttggatgtggggcgactgctggcaacgcagataaaagcgtctccagtatgcaaccatgtcttatttctccagctctgcagagctgtgtgtggtgggtgttttctggaaaccatgcctaggaaatcatgaaagcacctcacacccactgtaagtgcctcacctcccggagtgggtgtggctggaagcatcatggagcccaggatccaaagtcatttccccctctctactgaccaactcttcaaaggatgggcacgctatcagaaacccattgcagctggccatcccagcgatctggggacgcctgtcatttcagtatttcactccgggccggatctgccggctgctttctacgcatgacctgctccctctctgctgtttgcttgcaatttgccttaatgagaatggcttgtgagcgtcggacagaatcaagcggggtggccgtgtctcatggtgagggctaaatggctctctttttagatttgtttaattttcttttgcttctctaatgccgcccttagtagggctgtaatccattcttcttgcagtaatgcctggcaagcccatctgcagcccgctgtcagcaccccgtagatggtcataacattttgtgtcactgaaaaagcagtaaacttttctctgtttctaccaaaccagcttctctgcctggaagttgggatctcactctgtagccatctgcttgtttgtttttcttgtccgaaccggaggaagggcggccagtgaagccagcactgtagagtttcagtgggtttctgtcagattcttcagtgggttcttctagcaggttctttaggaattagcagccttcctcagagtgggacaaccacagtgttttgtgacaagttgggataacaataccctagttttaaaaaaaatccaatctttaagacagtcaaaaattttcagaaattaaaagtatatcagaagtaggctggagaaggggctccgtggttaagagcacctggtgctcacacagaggacccaggtttggttcccagcttcctgcaagacagctcacaggtgtccttagctatagtcgtagggaatctggtaccctctctgtcttatgtgggaaccaggcatgcatacagagcacagagcaggcaaaagacccataaaatagaaataaatattgaaaagtgatatattagaaacgggagacaacagagagtacaggctgaggcggagggaagtgcatcagagctgtctcatgaaggcgggagccaggagagaaagactagtaggccgcctggaatgtttaccatctgagctattcgagggtctgaaaaggggagcccaggaaacagaggggagcacctagtgggtggggctacccgtgggcctgagggccagcactgaagggtggagaggtagcagggcttgggccccagtggggtgagtaagattttacacaaacccaagcgatgtccagcgcttaagagtatgtgggtaggtagatttttctaagaaagaaagaaagagagagagagagagagagagagagagagagaaggaaaaaagaaagaaagagagaaaggaggaaaactgaaaatttggtagaattcaacatatttgagaaaaatcctacaattggctctaaatagaatgtggtaaagatggatgcatgcggtcagggaatcccgtgacccctgcagtgcagccagctctgctagggtgacctcgggcaggctgcagacagatgcttaaggttggtactgtctcttgccttgtgtctgcatttttaagataacaaattaaatgatgtgtatttattaggtacagactctattgatatctatgttcatgtaggaccgggtgcgcgtgcgccgggtgggggatcaagctaactcacacgtcctttcacggtcatagctttttaaagattcattcactcactcattcattcattcactcactcactcattcattcattcatttgtagcttttgtgttggcctgaacctccccacccctgtagcctctgcaccttgccaccctactctccactctgatgaggtccacactttccaagtgaactgtttgtctccccgtgcctttctcatttcacctagaatcatggcgtcccctgacacatgccagagtatctggtttcaagtgcacatggtagcctgctctgaggtatatgtgcacaccccaccccacatcttcctcactcacctgtctcgggctggacgaccttggcgactgtgagtggtgtgctaagatcactgtggtaacagatgccttctgttgatctgcaggacagtcatggcaacagcgtgcacctcggcatcttcttcatggggatttttgtgaggaacagggtcgggagacaggcagtgatatacaggtaatatcctccccccgtccttcccttcaggggctgcaggccactgatggctgtgcagtgcgctcagagtcacaccagcccggagcgagctgcattttctcagtttaaattaaattcagcatcttcgggattgatggggctagggaaaaaccgatagtgctctttctggtggctcacccttcctgaagaccgggaatgcgcgtttcaagtccactgagtcagtggggcagaccttgagtgtgggaaaagcaggctccgtagtcagtcctgccagttgcctttgttgggaccgtccctgactgtccctggccatttagatccaaaccacattcttcccacagccctgcaccctctgtctgaccatgcgctggacaaccacaaactaaccttcacactaacaaatgggattggtggcctataaaagtgtatctcagagtcactcggtctgtgataacaaattaatcaatttgagtattttttttttccaattacttggaccctttagccttcttttctgtttcgtaagcaaatcctgtgcagagatgtggttactgtctccagccccacacctgcccaccagatggctctctgcatggctgcctataggttctgtcacgtatgctcaaccagggctgtgtggccctgtgttgactgacagaataccattcttgtatgtgcctctgataagtgtggccatgcatctagggcaggtggccaatgacatttgaagcaggcaaaagcccctcctggcctggaagcttccagcacaagctctctggattaggtagagctgggttcttacagttttccatcccaaaccgtcctgattggcagcactcacccaggttccactgtaccgctgttttgtgatgtcaccccttgctcgttgaagctagaatgaggacagagaccttaggacttaaacttttaagggctagggagccataacccagttgttaaaatcttacagggactcaagttctgcccctagaacccggataaaaaaatgctgggcgtggaagcacaggctgtgatcccagagctgggagggtgcaggcgcatccttggggctcgctggctagctaggctaacttccccggcaagttctggaccagagagagagagagacctgtctcaaaaaccaagatggatggtgactgaggaatgacacccaaggttgtctcctagattacacacacacacacacctccccccccccccacgtcacaaatgagcaccctgcacgtacatgagctgctgaaatgaaaccgccacacacagatgtcagaaccggaagctctgtcagggttggttctattccctcaggtgctgttcccagcagggcacagggtgaggactgcctgtagagttttggcagttgttttgaaggaattcctctggaagaatgaagatagctcctatctcttaagatcctagcagagcagtagcttctcagccaggtgtctgtgtcagggagcacctgcagaggggagaggggagcacctggagatgggagaggagagcatctggagaggggagaggactcctagacttgcatgcggagcatggctgtgctggaatgggcagctgactgtgagtaactgaaaaccctagataaagacttcacctgcccctgactcagagactagattcactgagtcaggttctcactagtgtctatgtcgaatctgctccaaggaggggtgaatcagctgatttttctgcctcgggatgtgagaactgaactctgtgaaagaggctgcctcggtgcacaggttacagacctggagacagggagtatctactgggtgaggagcccgtggtcttctggggttttgtgagcgatctaatcccagagtttaaagcttgtgccacagtgtggtgggagtgagcattccagcaggctcgctctctctgggtgcatggtcggaagtgaggaagggcttgccagagcaggagactccagagttgagtcttagagggctgggaatagagcacacagagtatgtatacactgtttgtccacatgcaagaagccaatgtccagcactctgtgtgtgtgtgtgtgtgtgtgtgtgtagtgctgtaagcaggaggaccagaagttcaaattcatcctcagctacgtggtaagtttcacatcagcctggaataccttgtctttaagaaaaggaaggaaggaaagaagggaagagaggggaggaaactcaccagggattggagtgtgatggtggaatgcaaaagagatggtgctgggagctgaagctgagtgctgaggagatgcttgggtcctagctcccagcagactgggaagcaggctctgctttcctggactcaggcacctgcttctgggattacattcctcagaccctggcaggtcacaggccccatacacaggtggacgatctgcgtcttccttcatgcctgtatccacgcaccgagtgagtcccctgtacacccatcgtagccagctctcttacagcaggcaaggaaggcgtgcatgtgtgtgcttagatcacgtgtgtagagacatgtgcagtccttgggcattgttttccaggatggcacagtgagtgtgcacactgtagtacaactttactacacagtgcgggtcgttcaaacattcagggggaagggcctcgtctataggaaacttgggaggaaggtggtaagaactttctagatttttcttttagccacccataaggaaaagcccgtttccctaacgtggctgcacagatataatctaaatcaaattgttgcctgtgtgagtggtacctatttgcatttctttgagaggtggactacttaaactttcgttagaaagaaagaatagttaaatcataattgcaagatgaggcacttctcatggtgaacacatggaccatgtttgagtaagcctcgtcacatttctttggcccaggtggaatgacattgggagtgttactcacagcaaagcagccatcctgttggagctgattgacaaggaggagaccgcgctcttccatacagtgagtacaggggcctgcacagcttgagggggaattagttttttaagctaacaacacgttctctgattctccatgttttaatatgagcctgttcagccttttgatggtgggatacactgttgtcatctatgaagtctatactcaaggactgcataatcaagtcacacacacacacacacaaacacacacacatgcccctcatcatgtcaatgttgggctgcattcctatatatcctgggtcccgtgcaacccatggtggcatgttggacactcctgcactccacatgggactcaatgctgttgaggacattctgatacttgcctggtcccacatgacttcttgcaagtgatgaatattctcactggctttgaaataagattcaagtttgtccagcatgccacggcactctggtcacaggcctcttcctcaagtgactcctaattatgtcagattgcaatttctcttgctagctgacctggatatgtcagtccctcagcctacgctgtctggagtcagttgacccgactctctctgaggaccgtctcaggagccaaggctcttctctcaccacactgtgtctggttggatggtatcagtgttcattgtaggctctgcctcggttcggttgttttgaaagttcttcttagaattattgagaacctgtcaggtcatcactgcagaaccaggaccctttgatgtgaagaattcattatagatggatggtcatttctaccctgtttgctggacaccattgaactcaatggttgaatcactccctggcccgcacttttttgttttcttcacacgataggggacaggatggatgcctgtacggaactatctttgtgacgtgactatctcatccaacacgtgtttattttcccgtctctttcttttcaaggatgatattgaaaatgccaagtacatttctcggttgtttaccactcggcacaaattttacaaacagaacaagatctgcactgagtaagtcgatgtctcgctcaccgtctctccgagtggcgcagtcctattaaattgagtgtttctgcgaggttgctgtccccggtttccattcattctttcccccttgatccttctagaaactgtaggaagagactaaaggcagtcaggagggagagaagtttaagtgcagtcgcctacgtccatctgcctagagagacaatcatcccaaattgactgtaaatgtttaactttccggatgggtgggccacatcagtgcctttctggcgctcggctctgggttcggaagagcctaactgctcccaatttgcccaggtgcccctccgtgttagatgcggacgatattcagaagtggggagcggcgtgatgagcctacttaaaagagaagatgcggtcgccggctcggcccgtttccgctcacagttggctaaccctgcgtgcgctcctgggtcgtgccatctgactgcaaatgagaggccagggtaattagagggggatttggaaggcactctgagatggcacgcatctgtgtgtctttttaatttagttcagaaataaagaggataagtcgagtctgattgagggcacttcctcgtggcctgacctcggagatggcgtgccgggggcccaactctgccattgcctttactttggttgctttcaaaaggcggtcctcagcagagcacatttgccacttgggcccccaaggtgtttaatttttgttcaaagagcgtcagggatgtaaatggcagagagaagctgtctttccactcccacagtgggcatatccacgcagggcagactgctcctgttcagcagatgtggctggagaaggcagctgctcagaactggatccccaggtcaaggcagatttttttcttttgccaggtcccacagcctctttcaaatcaggctctgcagttgttcactgctagggtctaagagtacagcttgtatatctcatagtctaggcctaccagcaaagataggaaagatgtgttagcaggccaagcaagggcacagccttgtcttctacagacacactgtcacaattgccccatgcatagggttctattatgcttttgcctttgaatttggctggtggccttgacaccctcaagaattctgtgcggtggacatgagcccctttcatagctccagtcttctggttcaaccgtttctcagcgaatggatcatttctgtgttggtgctcagtgtgtcttctgtggtctgtgttgacatgtgtgaacatgtgtgacatgtgtgagcagcttttggaaagctgaaaatcgagaaccctgttctgagggaaccctgcaagagaagcacttacccctcctctttcccacacacacattgagctctggaatctcaggtcaagggcattccctccggagttttccaaaacttgagttgtctcaacagccttcttctccatccagggctgtcccctcacgagccacccaggcttgtcctgcagtgtctgctcctgcagagctggtccttgccagctacctgcctcactccagggttgggtggctgcacctttgacctggggaggaagccttagaggaccatgcttaacttgggggtactaacgccgaacctgcccagctgttaaaagctcaacattactgcatttgtctccatggcttcatcagagcaaagatatttatcagcaagctgatagaagagtgaagtctgcaaataaggagagtcttctttgaggaattgtagcccggtgaagttcattttgttttaaataccatgtggtgctgggacctcctgatatctgctttcaggatggctgccctctgtcccagctctgttcacctctctgttattgttgtttaatcgatgtgatgctggagtgctctctctctgtaacagccctgctgggttggggacatatctcagctatggaatatttgcctagtgtcgctggctttgacgccctagcatcagaacagaatttaaagcaaacagataaggcatctggctttgtaaacatttgcagcatgtacatctttatgggatcaaaatgaaaaatattttctctagtttgaaattttatttaaactggaagcattttaaaaatagttttattatacacacaggtacacattggacgctgttctaaaagtccatgtgttgtgatgttttctactctttctctcatgatattgctatagaaatagcctcattcccccaataatggtgaggaaaggattacagaaatatgtgttcagaacattttgaggataaaagaagaatggcaaaagagtttgtagtattggtgtgcaggtgtgaactgtgtatgctgtgtgtgctatgtgtgcaggtgtgaactgtatgtgcaggtgtgaactgagtatgcaggtgtgaactgtacatacatgctatgtgtgctattcgtgcaggtgtgaactgtgcatgctgtgtgctgtgtgtgcaggtgtgaactgtacatgctgtgtgtgctcttcgtgcaggtgtgaactgtgtgctgggaggcagacctcgctggtctagtccttcccctcagcctaccttatctttctgaccttttgttcttttgatcagcaataatgatggttctcatttttaacctttcaaatagacagtcaaattctccacccccaattagacgccagcccacctggagccggtcctcactggtaagtacactcttcagtcagtggtctggctgttggcataaggtttgtgtaacgaagttgaggagcggtgactaagggcaccatgaccaggggagacttgctggacatatagaaggctgtcattcacttgcaggaggtgtggggagcatgtgctgtgtcctgctctcccatgaacaccgccatcctctctatgtggggtttgaggtgttccacaggcttattccaggccagagtaagccttccttcaggctgctgttggctcatctttctggtgacatgtcccagttgtaagtgccgcagatagagctgagcagattgccagaaaatactttttaaatgaacaacgggctcagtatagtgaagagagagcttagatgggacatttcctaatttctgtacttcagtcgatcatccctgactttgactggttttctaaagctgttccctctcctggtgacgtggctgggacgcacagctgtaggcttttcgtgtttgaggattacacaagggggacaggagaggcctgcactttcgtttctgctcctcttgtcacggctctctgaggtgtggctttttacagctagagccaacgagtggccttcctactctgcctcatgtccaggtccctggagttgatagacagaaacaccaaagggaggatatttttgtatccaacatgcacttcgcctgtcttcaacttccctcttagaaagtttggaggacgtttttggtttttccaagaaagcataacacagactcttagaattctagagctgagccacatgggaattcctgagcccgtgtggctgttgctgatgtcggtgtgactgtctctgccttgtggtcctccctctgccttggccatctggatagaccttctgaggcttccctgtgagctcatttgctcatgcactgatcaccactctctccattgttaacattgtcttccttttgtctgcatcttgtttttgtcagtgagatcaagtgtcatttgtacctgtgaactttaatgacagaccccattttctcaggcaatcttgggattacagaacctcccttttttactgggatgaggtggtctacagcggtctggatgctgaagtctctcttcaccctgccctgtaggtctgaagaaaccacagagtcttactggtccttgctgatgagcatcctgacttccttgccaatctgtctttctctctcttttacaatgcttgttttgttggctttttttttggggggggggtcaagttgacacagaccctggttatacctgatatacagagtctcatttgaagacttgcctccatcacattggcttgggcctgtctgcagggcattttctacattgctaattgatgtaggaaggtctaacccactgtgggcggtgccattttgggcaggtggatctgggctatataagaacggtagctgagcaagcccaggcaagccaggaagcagtgttccgccatggtctctgtctcaagctcctgccttgagttcctgccttcatctcctcagtggactgtgacctgtaagcaaacaaatacttctttcccccaagttgctttcggtcatggtgtttttatcacagcaatagaaaccaaactagaacatttgtgttgtggcatttatttctgtataggctaatctgggaaaaatatttaaataaataaataaacaaataaataaaatattagaatagattgggcattgacatagtttggtagaagaacatttgccaaacatgtaaagggtgaccttaggtgactctagcacaacaccctcccctgtcacaaaaaaaggaaaaaaaatgagattaaattagctattgttgttttttcactgtaaacctagcgcacttcataaagccatttcttgatttattttaaaggagcaggaggcggccgtagccatgctcctttgtgcttccacttctgtttctcaccttgcttcgtcctcattctctctcagtaaataaagcggacagttcatgctcaccatgggaaatttggaattatgtgttgaattacgtgttttcaacaaaaggggtgataatactttgaaactgcaagctctaagaccacccaccaggacttgctgggtgtgcaggagttctagctccctccacacctggagttctctcaattcttccccgtgcttctttccactctgaatcctctcgacttttgcatcccttgttctcatgtccttccttggtacccacttggtgccttgaaactcactctagggaccagactggcattgaaggcacaggtatccgctttcctctgcttcccaagtgctaggattaggtgtgtgccgacaagcccagcttctgaatcagttatcttgagaccagagctataaggctaacagagctagaatcacactgtcctctctggtgtcctctctggtgtcctctttggctttatatattttaatctcccgctagcccctgtacaggatgtgtgccgtcttctgcagcagcaagcggttcagagtggcctaaacagccatgtttaagactcagtgggagagattcttcattggcttggagggtgtccttgttgcctggccacatttgcttctttagtgccattgacactgtgggtattacatattggactcctatgtaaaatcgccactgggccaagctggatgtaccctgaccctacaggaacctcctgtggtgctgtaacctgagaccagggctctgctgctgtgtaaggaatgtatgggcctggaagggagctggttttggacagaataaagcaaatttccttttctgtttgtttgtttttttttgtgtttttgtgtttctttttttgatgggtgcatctcttctgattgcatctgttataaaggccaatgcttgagagcatcaaatggctgctcatgactttggatggatagcctctttttctctatggccttgagctgctttttgctgtcctgagcttcaataccagatgggagcttaggtctgtgtaagagggtgggtcagacgggcagcctacagtgatgtaatgtgcttccctgggtgttggggtgacattctggtatctcccaacagtcttcgtggcttccccagctctgttttctctgtttcagccaaggcagcagccgtatatcttgcctcccatgcatgtccagtgcagtgagcactactcggagacccatacttcccaaggtaactgtagctcctctccctgcctcttaaagacaaaaagctgggtcccagggcccagcacagaagcttgcttgaagatgtcagtgatggtttgatggcaacattgtcattgtctgataatggtggctacattgtcattgtctgataatggtggctacattgtcattgtctgataatggtggctacattgtcattgtctgataatggtggcaacattgtcattgtctgatcacttagtggtgaccttcagcacttcagctacctgggaagaaactccctaggcaaagtggagtcttccttattgtttcctcctcttctccccattcttagtgggccagggttggagatagccagcttggtcctcccacacgcacacacgccaccctcagtgtcaatgccagcctcttggagcagccacgtggtgatgagatagatgcctaggagaaactcagcctcatcattcagcgcctttcttagtctcccttctggccctttggactcgtacagggacaagagtgggcatggatccagtgcttgtgaggtgcctgctgctaggctggggacctgatgcatgttgatccccacagtaagcctgagctactactctttccgtacagaaataggaagacagatgttagcattcagatatccaaacacacacatactctgtgtgtgtgtgtctctgtgtgtctgtgtgtctgtgtctgtgtctgcatcagcatggtaagtacacacgcacatctgtgtgtgctcaggtgtgtgtgtgtctgtgtgtgtgtctgtgtgtgtgtctgtgtgtatgtatcagcatggtaggtacacactcacactctctgtctctctgtgtgtctgtgtctctgtgtctgcatcagcatgctagatagacgcacactctctgtatctctctctgtctgtgtgtgtgtgtgtgtgtgtgtgtgtgtctgtgtctgtgtctgtgtatctgcatcagcatggtaggtacacatacacatctctgtgtgtgctcatgtgtgtgcttgtgtgcgcatgtgcctgtgcctgtgtgcgagtgcatcagcacatgtagatacaaagcttgtgtgtgtaggccagaggtccatgctgggtgttttcctccagtcactttcaccttttgagacacgttttggcactgaaactgtcacttaccagttaactagactggcagtgagtggtcctcctgtctcctgtttcccaatcacacaatggtgggattacagacactagtgcacacctagcattttataagtgtgctaaagatccagacccaggccctcacttccagctgagccgcccccctagctaagttcactttatctcttttatcagcaaactgttaaactcttttatccctgagctaactacatctttaaaacgacgatcacaaaccttacatgctggatattttctgagtcacgggtgtctgtgaccctctcctagctattctgaagctgctgcaatttgaaggctggagcatgaaacataaaacaagatcactcagtccgatcgtactttttataaacagcctagcagagctaccccgggtctgtgggaagacaccaaaccccatcagaggtggataaatcctcacaccctgctctccttgtttctcctgccttgattgattttgtctgcacttcctttttcagatagttgttgtttttctttttaagatttgtctatttaattatatatgagtgtctattgtatatgtatatgagtgcttacatgtgtgtaatggtatataaacgtttgaattcagcacccatggaagccagaagaacattacagatcctctaaaactggggttacaacagttgtgagcgtacatatgggttctgggaaccaaacctgtggactccaccgccagtgctcttaactaccgtgccatcgctccagtcccagttagatgctgctggccacagttctcttcttcctctgtcctctgtcttccttacacagaaaggtgtatggacagaatggcttcccagtgtgtttgtgtgtatgtgagaggaactttggatatccaaagtgggcctggcttagaaactggcttttagtagctctcgagttggggaggtgactcagtagttgtcttagttggagtgtctatgataaaacaccacaaccaaaagcaacttggagagaaaagggtttacttcagcttataatcctcaggatagactccatcactgagggaagtcaggacaggaactcaaggcaggagctgacacagaagccatggagggtggggcttgtttctcatggcttacgcagcctgcctctgtagaccaccagtggcacatccaacaggaaactgtgccctcacacactaatcaaaacaatgcctcacagacttgccagtcagtggagacatcttctaggttgccatgtcttctttcccatggataaatttgacataaaagctaggcagtggaacagttaagtcaccggccgagcaagaggagggcctctgaactcacacaagtgctaggtgagggtgctaacccagctgaagtccagcctgggctgcggaggtggcatcccctgagcagccagctagtgagaatagccaatggagagccccgcctgagtgaatgaaatataagagtgaccaaggatgcttcccagcacaaacaacattcctctatgtgaatgcatgctcacgcccccacaaacatgtatgttcccacatacacctatgcccccatgtacatacatgcctccacatacatgcatgccccacatacacacatgcccccacaaacatgcatgcagccacttacacacatgcctccgcataaatgcatgcccccacatacacgcatgtccacacatacatgcatacctccaaacacacatgtacccacaaacacatatgcctccatatacacacatgtctctacatacttgcatactcccacatacacatatacctctgcatgcctccacatatatgtgtgcctccacatacatgcacatatacatgaaaacagcttttgtggccctttactttcttcccgcttttgtttcttttatgggaagcaatcttgatggtggagctagagagaagtttcaggagtacctcgaaaagctcccgattctgactctgccatcctcgggctgctgttcagaaaccatggttgtgctggccatgctgttggtctcgttgctttctgaatacccagcaatccgttaggttaggagcgagcccttttctgatatagtcaaacccagcaattccgagggtggggcagtttcaagtctattgctctattaaacctttgacttcctggcccagatatccggttctgcccctaagctgtgcacaagagaccagttctcccccaacaagtggctcattgtttgaatctaattatagcaaggtcgagactgtgtctaggcgacacccactctgtacactttcttcacagtgtgctctgacatgttctaggcatgttatcccagagaacagtcccttgggacatgtgtggcgggggttaagactctgttctttaggacacgtttcggtaattcactccggggacataggggcgactctgttgaagcaggctggtgtgtgtggtgcttcacgttgctctgtttgacattttgcagacagcattttccccgggaacgaagaagccttgtactgccgttctcacaacagcctggaccttaattacttgaacggcaccgtcaccaatggcagcgtgtgcagcgttcacagcgtcaactccctcagctgctctcagagcttcatccaggcgtctccagtgtcctccaaccttagcatccctgggagtgacatcatgagggccgattacatccccagccaccgccacagcaccatcatcgtgccgtcttacaggccgaccccagattacgagacggtcatgaggcagatgaagaggggtctgatgcacgcagacagccagagccggtctctgcgtaacctcaatatcatcaacacccatgcctataaccagcccgaggaactggtgtacagccagccggagatgcgggagaggcatccctacacggtcccctatgcacaccaggggtgctacggtcacaaacttgtaagtccgtctgaccagatgaacccccaaaattgtgcgatgcctatcaagccaggggccagttccatctcacacacagtgagcactccagaactagccaacatgcagctccaaggagcacaacactatagcacagcccacatgctcaagaactatctattcaggccgccacccccttaccctcggccccgtcctgccaccagcaccccagacctcgccagccaccgccacaagtacgtcagcggcagcagccctgatctggtaactcggaaggtgcagctctccgtaaagaccttccaggaggacagctcacctgtggtccatcagtctctgcaggaggtgagcgaacccctcacagccaccaagcaccatggcggcggcggtggcacggtgaataaacgccacagcctggaggtgatgaacagcatggtgagaggcatggaggccatgacactgaagtcactcaatatccccatggctcgccgcaacacccttcgggagcagggcccttccgaggagacgggcggccacgaagtgcacggtctcccccagtatcaccacaagaagacattctcggatgccaccatgctgatccacagcagtgagagcgaggaagaggaggagaccctggaggctgcacctcaggttcctgtgcttcgagagaaagtagaatacagtgcccagctgcaggctgccctggcccgcatccccaacaggcccccacctgagtacccagggccaagaaaaagtgtcagtaatggggcactgagacaggaccagggaacccctcttcctgccatggccaggtgcagggtgctgagacacggaccatccaaggccctcagtgtctcccgggcagagcagctggctgtcaacggtgcctctctgggtccctccatctctgagcctgacctaaccagcgtgaaggagcgggtcaagaaagagcctgtgaaggaaaggccggtgtcagagatgttctccctggaggacagcattatagagagagagatgatgatcagggtgagtgcccccactccccggtcactgacggtaggaagccccggagctggaggcttggaggagggaggcttcgggaattaagggattgattgtgggcatttcaggcaagagtgatgatgtcaccagatgtcaaggatgctttttcaaataacaccttctctcccacagtcgttcctggcttgtggctggtgtgtacttggtataggaacagcttagtgattgggtgtgttcctgaggagtttaccactgggtactgggctccagtccccatcagatctgctctctgaagcatgggcacgtgcaccatgcatgcacgcatcatgccacatatgaagataccctgctatattgctgttacagataacccatcactgggatgggcccagcctagaaagctagttctcttgttggggtgagatcacatgatgatagatgtgtatatacaagacaataaactcctcttacaatgagaatattgttggattgtagttgctgctgaaaaaaaaaatccccctgttactgcttttcctggaaatcctggcctccttaaaagtcattcagttacgtaactaattgatccaatgggcttcttttccattcatcagggctgtgctgtcaggtagctggcctgtggttaggaactctggaaggctcgtttacattacgtttgctttgttggaggtcattaaactcattgctacttcttctgaactcatatttgggaatcaacccagagggaggacgtgaaggccggttttacagaggccacactgctgggttcagaaatcagatccaaccttgttaccttagaacatcctgaaggaggctcaaccctgaggttctggtggccagcaggatggagacactcagggacagcatggatggacttaatgcttcttccattgtagatggagagggagatggtagagtttgtacctgtgcctctgggattcattaaaaaaaaaaaaaaaaaagcacacagctttggctggggtgaaatgcgggggtgggtaccatgaggagacagctttcccagcttggaaaaaagtaattcattggtgtaaagtgatgtttcaacacttcttggctccaggcctctttagagccaggctcgctcgcttcaggaatccatccctgtgagtattgagccttgaggtcggccctgccaagttgagacttaatgatgtccacatggtcttgtaacctcatcttggtcaaccccgtctacttacccagattaaacaaatagcctgcagccatgaccctggtgccggtcctcacttggaagcatcacacaaactgagaaagagcgaggagctgttttctgctggtcccctcccccagttctgttttattccaggatagtggatcattccggctggcagactacaccagttagcttttagctcaagaacacaactgcccatgtctacactctttcccctgttagactccccctcacccagcctcattcacaggccactcagtccctttgctcagtgtcccaacctcagagaaacgccaggaggtccaacaagaaggccgcccctgccagtggctccaacacccaagatgaatctttgtcttgaagtctgtgtctgtaattcctggcctagggagcgtccacacagcttccatactcctctgtgtatggagaggagaaaagaaggctcctgaagccacaccagacccctttactaagagaacagagagaaacctcaagcccttggggactggagtgggaggggtgggtacaaggagagctcaatggcttcttatgtggtgagtggttcagaatgctgccttagggcttgtccttggcccattgaggacacttcccactttccagtctccagccgggagtcaggtacagagagcacagaaagccagctcaactcaggccttctagtttgatagaaagacaactgatagcttgcgcctaagaggtcggttcactatcactgtgtctagttctccccaggtagcaagggagcctttcccaaggttggcagtccctgccgtctgaaggcacaagtgtgaggattgcttacaggtttaagaacacccagagggacacaatgagaccctgtctcaaaatcagaccacagcaaaacatttgaagcatttcaaaattcaacgacaagagaggacaggagagagttacctttcacaaaactgagctagtacgcaaatatatccaaagtcatcccgagggttcatgtggctccacgaccacccttcagctgcctgtcacatcctcatggctcacacctcctctccaatgcacccttgtatgtctgtgggtcagcctgttacctgagcagttgtaccctagggagcatccctcacaaaggcttcccccactgtaggtaacaccatggtggcaatgaggtccatgcaagattgtccctgccacccactcccaccttctccaacagtatggctccatccatcaagacacctcctccgggagttaattaataaacgataaactaagaaaccaggctgccactccatccataggactcacagacatctacagaccgacattgttttttcagataacatccaaatgttcttttacacattgacccctgaatgtctaagacaaaatgattttcaagagctgtgcccagtagactggcagcaggaaacagaggattctacacccctgctgatgacagggacacgagggtgtccaacagtggacccaacatccagccctgactacacgaggttcagcctaaggatgagggggagatagaacttgccagtccacactccactgttagccctggatgagctcgaaggacaaaggctcaatggttcatcatctggtggtgaccttattaagccctggtagaccttgttctggggctgtcagagcagatgtcttggggacaaggagtaaattataagattaagctctaaagtctgagcccgcagagtggttccccttttgctggtgtgtatggcgctgttaatcaacatggtagctggtgggttttacaccattagttagtgcaaaaggcctgtccttgggagagactcccacgtactcctctgtgttctttctccagtcttcagcctgtatctttctaaagtgtattgtatgaagccctttttgttctcttgcaacttcccctttccccttgtggcaaggtgtatttgttagggagtctgtctttatctttctaacgtatgagttaattaagaataaaagccctggggtcctgtaagaactggcttccctgggcatgatgggaataatgggaaggttgtgtttgaatttgccctgctggtggtgaatgtctgcattccttggctggggagttacagatttggggagattaaaacgcattccagccttcacctggaattataaacaatgagaacgtgtcttttcttgccgaaagaatctagagaagcagaagatgacgggcccgcaggcacagaagagaccgctgatgttggcagcgctgaatgggctctcggtggcccgagtgtcggggcgggaagacggtcaccatgatgccacccgagtccccatagacgagagggtgagttctgggcttgtcaggtgtgaccttttctctctgcttccagattctggaagttcctctttgcctagacctgccagtgctgcttgccgtgggttaagtctttcaatggaagaagacttgatccaagtgtgctgtgttagagctgatcctttccaacatctcctgtttcttcattgtggcctctgcacttttatcaagctggcatattggtgcttgattaaaaagtctagccccagggctggcgaggcagctcagtgagtgtaagggcttgccgccaagtgcgatgacctgagttcagttcctggaactcacgtagtgggaagagcgagccatattcgtcagggtatgctctgacctccccacagcttcctcccctcctccagataagcgtaacaacaaaggaccccctcctccaggctgtgtgagctcattatctgttcgttatctttaattgtaaggaggtgattgatgtgataatcaatccctatatgcatttggtaagattttactatttatttgtaagattttactatttattaaggacaaatgcaaatttgccttatgatgtgattgtcttacttgctttccttgtgcagttgaatccaaatacatactcatttcagacatactgaagactgatgggggaaatgttttttaaaatcatctttattttctacaatgaaaccattaagtttctaaaactacagaaaactcttttttgtaagatgagaaagttagtttctccgagtatcgtactctgtggttttaggttttgggttcctgtggtcccctttgaggactgcaagatgataggacccatagttcttcagttagctattgagagccaccatcctgtgtcgctgtggcggagaaaggggccctgaaactgcctagcttgttatcaggaggcccagaaactgtttttcctaatatttagagcgttagatttttgtcagcagacacttggttttggggtcagaagggacattttaccagttgacaccatgtatttgaaattagtactttggccaaggaagggaaaaggcagggggttttgtgagggttacttcagtgctctaccactgtgaactggtgctgtcctacgggttaattcagtgaaccctgctctgagagtggagaaaaggacacctggacaggtgagggtaacaaggagcttaagcagccaggactaaccgagacacagggtttgactttccacttaagccaggctttgcagtatgtatgtagcatgtagctttgcagtatgtatgtagcatgtagctttgcagtatgtatgtaacatgtagctttgcagtatgtatgtagcatgtagctttgcagtatgtatgtagcatgtagctttactgtattatgtagcatgtagctttgcagtatgtatgtagctgagcgagaagggaaatggctgtcagaccagagacttagcaacgggcagcagtgagggccgtagctgagcatccacccattgactctccatcttgaaaacccctgagagcctgcttgctctgctgagttgagacagctgatgcctccttcccttgcagctcagagccctgaagaagaagctggaagatggaatggtgttcacagaatatgagcagattccaaacaaaaaggccaacggcgtcttcagcaccgccactctgcctgagaatgccgagcgcagccggatccgagaagttgtcccatacgaggagaatcgagtggagctcatcccgaccaaagaaaacaacacaggctatatcaacgcctcccacatcaaggtgaggggcatgtcagaggcatacggcaagacgcctgtatgggctgaactcgttactgcagagagcctttctgatgggcgagccctaagccatggagagtgggattgtcccgttggtttgtgcctcacaggtggtggacgttggaacagtccctacctttcctgttatacctttttactctgttccacagcagcacaaactactgtttcttctttatgatatcacagccaattcacgttagagccaaaatctgatttccagggctgtccatgagagcagagcgatctatacacaaaccacggttggctgccgagcaggtcctcagtcataagtggtggtgtgaggttcatgttttactttttagatttgtttctattttatgcgcttgcctgtgtgcatgcatgtgcgccgtgtgcacgcatgtgcgccgtgtgcattcctagcagccgtagaggcgggaagagggcatcagatcctttggaactggggcttttggaggttgtgaccctccgcgctggggtgaggagccgcaagagcagtccgtgttctccgtctgtcaggcatcttctccagcatgcagtgcgtgggcttctgttaatgtctcagacacttcatgtctcagtatgctgtagcttagctaggccttagacagaattcagagctgtgagttcatgggctcctaagcagctcaccttccccagctttggtaatacccagtttggggtatattgttttagaacacggctctgaactctcaattgggagagtgtttcgaaggctctcgcttggtcagtggatacagggcttttattttatcttagtttagtgtagcttattttattgaagtagagtttttctgtatatccctggctgtcctggaactcgatctgtagaccaggctggcctcgaactcagagatccacctgcctctgcctctctagtgctgggattaaaggtgtgcgccaccactaccgtctagctgggtataagatgtttttaaccaacacagttcgcctgattaatctgtatgatcagtagctttgaactcttacttttcttggatttttcaactctggtggaattgccagaagtctcctttgaccctcctaaggtgtagttaggcatctgggttgtatatcactgaaaaccaatttccatatgggatgtgatggtatggtatagtgtttttatgcatagggcatagataggattgtgtgtgtgtgtgtgtgtgtgtgtgcgcgcgcgcgcgcacgtgtatgtatgcatttataacaaacaggtatttttttggctcgtagttttgagaacaaaactaataaaatgaacaccagggatctcgtaaataaaccaacaatggcatcagttagattaggaaataatgagcagaataacacactcaaagatgaggactccgcagctgcttcccaatgaagtgcctctgaaaaccgtacagagggacactctcctggcctcttcccttggcccagtctccttcccattttccatctgctctttggaaacagctgtcactccgcataaacagcgccctccgagtattgttatccaagatgccatcccttctgcggtattctccgaggcccacatttcatccctcggatccagggtagatgtgggtgcatttcacaggcctggagagcttgcaggaacttgcccttggtttctggaattaagctatatatttccccactgttttctccccctgggttccaagcagcagttagcacagaggagaatggtgtcctccagagggggagtcacatgatgtcctgcagtggggggagtcacatgatattctccagagagggagtcacattggtttcagtgtggcttttaatgctctcctttcaatccttggaagaggcagattctctgcaatgtttatggttactatatgctgggtacctgttagtttaaaggcctagtcccacagacgggccacatctccccaacccccaacaactcagtctgtgggtgttttcacccaccagtatgtgggaagtggatttccttgccagctctgagccaagcatgtcttgtgtaaggagacgatagctgacggtattcttgcctgactcaagtcggtatggagttttgtaaaatcattgagaaggaaagtcaaacggggaccccttcgttgcttctggaaccctccgggggctctgccccgcacaaatgtataaagggacccatctgtgtcatatcaaggcacaggagaggaagagagagacagaaagtgcattgcaccaaagacaccactgcaccgagagtgtaacctcagctctgtgggcccggccttgccaccgggatggttttgcatgtagactttgtttttattaaaagtccgccctataaccctgttcttcagattcggaaccacagccttttagtggttgtaaaactgattttctggttgtaatcatgcatacataaactctaataaaatatagactaaagcatgaaatgtatcagcctacatggtgcagattaacttaggtattgtttctgtaacttaaattctgttcatttattcttttttttttttttaagatttaattatttattatatgtaagtacactgtagctgtcttcagaaaccgcagaagagggagtcagatctcgttacagatggttgtgagccaccatgtggttgctgggatttgaactctggacctttggaagagcagtcgggtgctcttacctgctgagccatctcaccagcccatcatttattcttaagttatgtggatatacccgtctgtacctgtgagtttatatgagttcatgtgtgtgtgtgttttgtatgtgggatatatgtgtgtgtgtacacatgtatgactgtactccctcttctatgcacaaatggaggccaaggtcaacatcagttctcttctgtatcatttgtaaccttatttttaattacatttaacattttcattacatttgttttgtgtgcccagtgtctctctctctctctctctctctctgtgtgtgtgtgtgtgtgtgtgtgtgtgtgtgtgtgtgcaggtcagaggacgactttgctctgggggtcaaacctaggtcatcagagtaaatggtgggcaccttcacccaagaaaccatcccacctagcccctctgccttacttttttgaggtagggtctttgcctaaacctagactcactgtttcggtatgtttggccagcgagccctagggatccattctcttcaaactccctagcattgggatgatggcacacagcaccggcccccaccccagcttgtttgtgggcactgaggatcaggcccaggtctccacgcttacaccgtgggcacttttcccactgcaccatctcctcagccggtatgtgtgttttcagcctgaagttgtttgcctgtatcgtgtgctacatgcagtaaaagatcaggtgagtatgacttcataagcatgacttagcagaaaagtattctggtgccaacatgtgtcgtctgttacttaatggggttttaggatgacatcaacccacttggtccaaaagaagttagagtggaaggtagttccagccgcttggctcccttaccggtgtgttcctcggcttgcaggtggtggtcggcggatcagaatggcactacatcgccacccaggggcccttgccacatacgtgccatgacttctggcagatggtgtgggagcagggggtgaatgtgatcgccatggtcactgcagaggaggtaaggagtggcttacctaacacccttgtcctggggaaggggtggtcagaaggtgggcctggtacccaggactttggctcagcttgctctatgctacagctctgtgttattgagtatccattgcctggtagtgtagcctgtgtgtatgtgtgtatgagtgtgtgtggtatatgtgtgtgtatgagtgtgtgtggtgtgagtgtatgagtgtgtgtggtatgtgtgtgtgtgtgtatgagtgagtgtgtgtgtgtgtgtgtgtgtgtgtgtgtgtgtgtgtgtgtgtgtgctcgcaagcatgtgcgcaagcttccttccccagagatagtttacagtggactctctctctctcttcgaattttcccttgtgacatagttcagtacaatgaaaaccaaacacaggatcaaaaacgaccaaacttgagttcatccagcggacggtgtgtacttcgcagaatagttcagtctgtgctgggtaaacacacagggcctcccaacctcaggcgctgccagccccgcatgccaccatgcttatcagctgaaaggaaaccagagccactgcctaggaactagctttattcttcagggaaaagaaaaagaaaattccttttctttctttgccaaaccaaacacagactctctgttgtagctgtggtgtaggagcctgcacgcacctcccccgtgcatgccacactgcctgcccagagtgcgctgacatcgagggaagggttggatttcccctccgtcgcacgctcaaaacacttaccctccttcctccttttaatcctcatgaaatttcaaattatattttcaaattcaattagggaactggcttcatgcgttttaccaagacctttgatatcatgaggcctggtttcacctgttacttcaggactgggaggggagagaactggggccaaaaaagccaagtcatagccacaccatgattgccagtgaccccaccatgaacgtcagtggctccactatgagcaccaatgactgctccgggcagttcatttctggaacagtctatgaagagcatgtcaagttctctaggtttagatatacctctctctctctctctctctctctctctctctctcacacacacacacacacacacacacacacacacacacacannnnnnnnnnnnnnnnnnnngaataaagcagaatctagtggtccgtgggacagccaaggctgtatcagtttgtaaaatccagaaatgacttggacactgaaataaatgtatgtttacattctcagaacaacccactttaaaaaaaatgtgtgtatgtatgtatgtatgtgttgaatatgaaggcattagatgcccacatacagatggttgtgagccaccatgtggttgctgggatttgaactcagaacctctggaagagcggcttgtacttttaaccactgagccatctctccagccccagaacaacccacttttacaggattggtataaaaggaaaaaaaatactggggacctagggagactcagtaaagcccagtggttccagacagggtgacttgttacgcccctccccccagggatgtgtcaccttacaagcaggcacacttcatttagtcaattatttagttgtctgccttcagacaggatctcaggtagcccaggttgacctcaaacttgcttgctatatagctcaggctaaccttgaagttttgaacctgtgcctccacctcccacgtgctaggatgacggcacacaccacctcacctggtttgttcggtcctatggattgaattcagtgctttatgcatgctatggatgcagcccacccactgagtgcatcctggctcggatgggctcctctaaccatcagctgcgcggagtctctgcacagctccatgctccttacatcttcggacactcagcctcttcacccatccccctcagcctccagcccctccgtgcttcccaccccacaccggggatttctgaactgtgcagtgttgagagggggaaaaaaaggctttgtaaatgttagattgtgcgtggtctcagcaaagatgttaaaagatgggaaggaaaatggcacctaaggggttcttctatgctttagctgtaggttgagctgaaacaagccggagcagctctgggtgacaggggcagtgtgtcagaaagagccctgggctgtcggcagcaggagaagcagcgcctggaatgacccccagcatggtgcttcgtactgaccactcggaagccttaggtggcttctgttctctgtgggtggacacccaagctccctgtggggaggtgaggcctttcctgcctcccagcctgcgtccctctcacctgctcctctcctgccaccctgcaggcctttctcgttctcgctcacatggtggcttttttggacgtctgtacttactgtgttccatctaaatccccccacaaggtaactgtcgttgtaaagggtaacagcctgggcccacatctgaagggtccgccccagcagacactgcccggagccccgtgaagctgtgacttaggaattgctgtccgcgctcctgctcgtgggtcctaacctcagtaggataagagtgcatccctgacttgtttccgttttgcttttgtgtgtgattcaggagggtggacggaccaaaagccatcgatactggcccaaactggggtccaagcatagttctgccacctacggcaagttcaaggtcaccacaaagttccggacagattctggttgctatgcaacgacgggcctaaaggtgaagcacctgctgtccgggcaggagaggaccgtgtggcacttgcagtacacggactggccccaccacggctgtccagaagacgtccaaggatttttgtgtaagttctccccagactgaattttgccaaatgcatcagtagcctgccagttgcgtggactgtggccatgcctactcttaagagacttgcgtgttataatactgaggtcccctcacctctgcataggacagggaagagtaataagtgtctcttgctctgttaacgtcttatgcacgtctgcaagagtgtgataacctaattctgcatggattcagacttttagtgtctcgataatcagtcactgtctaacatgctgtaacatggatgaatcctgaagactgcataccaagtcaaagatggcaggcataaacacataaggatggtaggatttgccctgcatggggaacctgtatcaggcaaatccattacatgtatttttcttttcagggcagggctatttttagatactgattcatgagaatatatgggtgccatgtgtaccaggtagtggcccagggaaggtaaccaacagcaagtggacatactgtgcgcaccacagagacccactgtgtgcagatccactgtgcgcaccacagagacccactgtgcgtaccaaagagaacccactgtgtgcagagacccactgtgtgcatgttggacaacatcagaaccttgggtttatttttgatatgtttagaatctgccatagggtctgagaaggctcacaacacagagacaagaaaagacctaggggaaaaaaaaaaaaccaaaacctgatgctttgacagaaagattacatttaccactaacatggggagcacaaagaacacggagtaggccagcgatggggcaaagaatgcaaagccccagagaggctgagtgaccagttgtctatcccagctgtctgtgaggtggggtgtggcctctccagaacttcccgccctcataacagcactaattattcaatttagagaatcttctgctggtgggcttgttaaagttgtccctaagaagaaaatctgggtaaatacaaatagattggcttgatgattgacagctctgctgacaggtggcgcccacgagacgctctaaagtatagtcagccctttaagtcagaggcagtttgaggaatgaccgtttaagctactggaggacacagggcatccatccctttaaagagtgtgggttgcccaaggttgatgttgtaagagtcttgacgaagtgatgctgtatgacgccatggaaacgctggctgttggagtccaaagaacctattttacttgttacgtgattatggcaaaaaacattcaggatcctgaggctgtttttcctttgtgtccctttgggacagtaagcaaacctttgtgctgggctgggcagctgctagaagctgtgagaacatgtcttgaaccctccacccacaggcttgtcgtccccagaagtgggcttcctattgaatagtcatataacttcatggaagtggattcccccaaagcttttttttttttcatctgaaaatgaattcaaggctccgttgacattcactgattctgtgctgggaaagcgatggggcaggtggctgctctttccccaacaggaattggctctgacaggcgggcatttcaaggggacttagcggatgctctgatcccagtctgttagtggtatgaaatactgtaagtaatgtctagaatcatctgctagggggacttggggatttgcagagagggaaacagaatttaattttttaaaaagaactatttaaagaacaagttctcctgtggactaattgactcccagctggtctcttctggcttcggggtgttgcagcagttaccagccaaatgattagcgtcttataagaattgcaaattattatgactggaaaacaaaagagtcaccctcagccctggtgcctcccccccatcctccccccctggacacaaagacatgtgacacacttgggtgacaagatacacattttatcctgcagcctacttggaggaaatccagtcagtccgacgccacaccaacagcgtgctggaaggcatcaggaccaggcacccccccatcgtggttcactgcagcgcgggtgtgggaaggactggtgtggttatcctctctgagctcatgatctactgcctggaacacaacgaagtgagtcgtccgcctcccccttgccaccttttgattgtgtttgtttttatgggatggaaagtgaacttggacctgtgcatgcgtgtgtggaggccacagttcaacctcagtgggcttcctttaggtaccatcggcgtctctcgtcactaaatagacactaggctgtctggccagtgagccccagggctcctcctgttccacctcccagtgctgggattaagtccacactaccatgtatagttactgctcacaactatggttctttaaaaacttatctcagatcctcacacttctgtggtgagcaatttaccaactgaaccacatccccaggcctgctataccttggttctcaccagaaccatgctcctaccagctttgtggtcgacgcctctccgctgaccagttgttcccagctggagtccagaatctatagctttcctgtctcttactgctcactgctgtgtgtaggctcctaaatacaagaagaaatgagggtgttctagaaacatccagcaaacctgactgccgtgggcattcacttccagaagcaggcagatgagttctgttgtggttgtttgacatggcacgtggctctggcacgtgtagttcaatgtgtcctgcatttctgggatgtgctttggcccaaatcctgtgtgttgatagatgcatctctgtaggacacggttgttgtccttatggtattgttggtattctgtctggactccactcccacagttacctggcaacagccaggtaggcctggcccactataaaaggggctgcttgccccctcttctgtctcttactcctgcttcccacttgattctctcttgctccccatctctccccacttccttccacactccccaccccacgtggtcatggccagcttctacttctctactctctccctctctctgcctttctctgcctctaccaccctcttaactcccctctccatgtcctgaataaaccttattctatactatactgtcgtgtggctgnnnnnnnnnnnnnnnnnnnnnnnnnnnnnnnnnnnnnnnnnnnnnnnnnnnnnnnnnnnnnnnnnnnnnnnnnnnnnnnnnnnnnnnnnnnnnnnnnnnnnnnnnnnnnnnnnnnnnnnnnnnnnnnnnnnnnnnnnnnnnnnnnnnnnnnnnnnnnnnnnnnnnnnnnnnnnnnnnnnnnnnnnnnnnnnnnnnntcaccacacccccatagaacatactcttacacttctttgtctttttataatcacagcaggtatagttttcatctgggggcgtttgcccttgtctggcttggcaatatattgtgtatattggcaatatattgtgctatgtgggccagcattggccattcgttgttttaatcacataggagtgtgttatctcgagctgccatagactctggagttacagtgagagccatcgacaacagctctgctttcattcacataagattgtgtgcagggtgggggcagtggttttggtttctgcttctccgtttgtgtgttggtttgtttatgaaagttctagggagctaacccagaacttcacacctgtcaggaaagtgccctccctaccactgagctgtacgccccccagttctgggtgttttcttgtgcttcttcgtgggtcttgctatgtaacccttacaccaggtcccaaaccctaggctgtaaggtcaatagaggggcatccttacctctgctctatggaaagccaggcccagaggaggaaagccaggcccagagcaatcgtgtgatgatgtagccggtcctgtgtaactttaagcagctgtctgatggcaggaagcaagctctcctcctctgaggtcacttcctgccttcacactgtttcccacaagctgttcaggttccagatcgtgcagcagggaacccttgttctgtgtaatggatgcttcagtgtgttagtacgtgtactcgtagactcagagatttgaaaagcagctttatttaacactgccctgtccttagctctttggagccccatccacagcctctgggaaggctggagatcacgctgctcaccgtgcatcaaagccagcctggcgctgaatgggtgtgaattgggggatgcagccaacggggatccggtgggcttccccccccactgaggctcagtgcccccagcccccgctgtggtatgtttccttcagtacccagctgcatgccagcacattccttgctggtgtgggacagtcctaaaacaacttctgttcccattgatattcagcgataaggtgactcacacagttcatttccttcccccagcgccagcacagccaaccttatctgtccagtttgtttcccagggttgctgttgaccaaggggcaaccagaccggctgctccgccccgtgtgttcttcaggcctggctcctcccactcctgtctccctctcaggagaagggccaacatatttagtttgttctttaaacaaagacttttaacaaatgaatataagaccgttaggcctcctttcctcgcatccctgcttagcctgccttttctaattactgaggtgatttgtgtgttttgtatttttggtttgtgattctagcagcgttcatctttgtcaacgaagaagtggcttttcttttttccccacactttcccccttttgtctcatttaaaatatatttttaatcatgtggagatgctaggttaggcatgtgtgtgagtacaacgcccacagaggccagaggaaagtgtctgcggctctgacgtgtagtcaccgtggttgtgagccacctgatgggggcgcccggagctggtggcgagtgtggagtcctacctcttgagctgtctcttgcccaaccatgctctcgttctcatgactcacagcagttggtcttggggagtgagggagattccaccgctgcgaggtggtggctgtgaggtcaaggttggtctccaggctgctttgcagtgtcagtactgtatggctttccctgctgttcatggtgtgtcaaggaccatgtctgccctgccttgcataatgccaggggcactgtgtaccagtggtagtgggaggtggggatgggggtnnnnnnnnnnnnnnnnnnnnnnnnnnnnnnnnnnnnnnnnnnnnnnnnnnnnnnnnnnnnnnnnnnnnnnnnnnnnnnnnnnnnnnnnnnnnnnnnnnnnnnnnnnnnnnnnnnnnnnnnnnnnnnnnnnnnnnnnnnnnnnnnnnnnnnnnnnnnnnnnnnnnnnnnnnnnnnnnnnnnnnnnnnnnnnnnnnnnnnnnnnnnnnnnnnnnnnnnnnnnnnnnnnnnnnnnnnnnnnnnnnnnnnnnnnnnnnnnnnnnnnnnnnnnnnnnnnnnnnnnnnnnnnnnnnnnnnnnnnnnnnnnnnnnnnnnnnnnnnnnnnnnnnnnnnnnnnnnnnnnnnnnnnnnnnnnnnnnnnnnnnnnnnnnnnnnnnnnnnnnnnnnnnnnnnnnnnnnnnnnnnnnnnnnnnnnnnnnnnnnnnnnnnnnnnnnnnnnnnnnnnnnnnnnnnnnnnnnnnnnnnnnnnnnnnnnnnnnnnnnnnnnnnnnnnnnnnnnnnnnnnnnnnnnnnnnnnnnnnnnnnnnnnnnnnnnnnnnnnnnnnnnnnnnnnnnnnnnnnnnnnnnnnnnnnnnnnnnnnnnnnnnnnnnnnnnnnnnnnnnnnnnnnnnnnnnnnnnnnnnnnnnnnnnnnnnnnnnnnnnnnnnnnnnnnnnnnnnnnnnnnnnnnnnnnnnnnnnnnnnnnnnnnnccatacatgagtatccatgcaccacacaaaggaaatatctggaccagcaagatgggtcagtgggtaaaggtactagacagcaagctttactacctgagtttggtccccaggacacgcacaaataaatgtcataaatttaaaaagaaagaaaggaaggaaggaaggaaggaaggaaggaaggaagaaagaaagaaagaaagaaagaaagaaagaaagaaaggagagagggaaggaaggaaggaaggaaggaagaaaagaaaagaaaagaaaagaaaagaaaagaaaagaaaagaaaagaaaagaaaagaaaagaaatagctaacttgagggggttgaggcaggagcatcatgtgtttgaagtcagcctagactacagagtgagttcctcaaaatttttctcaacctgtatgtaaagggaaggggatggagggagggaaggaatggtatttggcattcgccacagtccactgctttgagaaccttgcactgtaagtgcaaacagctttcagattcactcacacgagtaaacaaacacgggtgaacgataccacaccagaaacaggggtctccaaccgtggcacagagccgattcctaaagccctggagggtcagaacccttagctccgcctccttcctggttgtccgcagtgggcagagtcttagctccgcctccttcctggttgtccacagtgggcagagtcttagctccgcctccttcctggttgtccacagtgggcagagtcttagctccgcctccttcttggttgtccgccttgggcagaggtttccccggcagggaggggagatctcggggaggcattctgtctcagcctgtgtgccctttctgttctcttgcagaaggtggaggtgcccacgatgctgcgattcctcagggagcagaggatgttcatgatccagaccattgcgcagtacaagttcgtctaccaagtcctcgtccagttcctgcagaattccaggctcatttgatctcctccgggatgcagcttctggaggagggacgcagctctgtcctgcagggggcgccacttcgacaacatctgcctcccccagccagaggtggatggctggcagcaggcagaagccagagttactcacaaacatcatgtattattttatataagataatttattttttccctctttggaataagttctgtgagttattatataatgcttcccccccatacacacacacaataatatagtgcttctcatttgaaccacacgttgactgatctgcagtgttagcctccgggagggaaggtggtggcccccatgggacattttagacacagaggcataaagggaaagcatctctagtgaagttgcaggcaaactggtaatgctccagtcaaaagtggcaagagagagaaaccatcctcagctggaagggagagagccaaggtcctggaaagtgatccaaacacactgggttcctgcaccttgctgggtgcttgcttttctctcctgcatttctgtcctctgtcctcgccctcagcaatctttctccggaagcctaggtgaagggtgggattggctggagagcatggtgcctccaagggtggtgatgccgtctttggtcaatgggggcgctgctgtcctttctctcaccccttgttctggctcagaagtctgatacagtgatgggtggcaggctgggtatctgctgctttgtcttgtatactcacaacactgtagtctggtggccctgggccaggcggtctgcacagctcagccctctgcctgattctgactgtgagaagataacccaccagggtgggaatggagttgggtgtggcctcggtgtggcctcttagctacacaatgttgcgtgtggtggatggtgacgtagaagatgaagttcaggtacattccatcttcctatctgttcctaagttgttagaagggtcttaaggaaactcacattggggagctgtcaggcacttagtagggccctgcccgggaggtatacacctgtgtccaactcactgtgtgctgcttggttttaggctgtagctgatgagggctgagttggttcctcttagagcttccttgttgtcctgaggcagagttcctgggtgatcttgagtttgctgtgtagaggatggctcctaatttttcacatcttcccctcccacgtgctggggtttcaggtgtgtcccaccacactatgaatgctgagactgtctactaaaaaaccttccaccgcctccctctcctgtgcagcccagcctgggtcagtgatgatatcgaccgtgttcgatttgaagtccagtttcctgcttatgtccaattttgctcagagtataattttctaaactgtgagtttgtggaactgaatgtgtcaggtcttcctccacagttacatttttccctatttcctgagctgaaaagaccaaacagaaagtgtgtgtctttgtggcttctttctccaccccctagtgagtgcttatgacagcagaatccccatgaactcctctggaaggtgagccaagctgtcttcacactgggcaggggtggtgctggtgctgatgttgatacagcatttgtgggttcagaatctgtagaagaggtgcttccatcctcccttccgccatgcagattgaaccaaggagtctaagtgtgcaagccttgtggatctggtgcactgtgtaaactctgacataggtattttggggaaatgttacagtgttaagggtgggaagtcttgtttcacttcctttgatgatgtttctcctttacattcggtcccacttacggtttcattatgcaatgaagaacgctgctgatcctctcctgttgtctctgagctgtagtcggtcagaatgtatctccctcgggcagcaaggagatatgatgccactttgcacgggtcactcgggggctgtttttaccctgtgttagcagaacaaggtgcagggaagtagcagaacaaggtgcagggaagatgtcggttggctacccaacttcctagtgtgcatggtgagccctaaaggagaacattaagtgtcccgagtacgtatgtgttccattctcagacaccattgcttctggttcttcagtaacattccaaattcctttcccatccctaggaagtccccgtggatctctggttaaattatcatcaggcatataaagtggcatctgcataatgattgcccagagatgctttctatctgggaagtgagccaaggaataaaccttgaagtaaagtgtattaaattagttatctggttaggccttttggaaagatttcctgtgatgcatgggggccagagctggagttgtcagggcccattgccgcagtttggatttgaaggaggggaaaattaaaacaggagccagtaagtcatcccatctcacagcagagcagtggactgcttgctcgatggccctggtttggagttttttccagtggtaccacactcttttacttacactcatcggcctacgtccacctttgtcctggttcaggggtctctgtatcctggctgcttaacgtggtgtcttcatccctgagatcctgagttgtgttaaagatgaagctgcggagtttctggctgggctgtggctggtcttaggtggctctgcagtaacttcaggtggaatcccaggggtcagggggctgcacatccatatattctcctttttcagtaagaagtagaggagaaaacaggattgggcatgtaagtcgctttatggaggtgaagactagtgggttcctctgatcacttggagatgagccgcagatacgatactagggaggctgggggcatctcacgtggaccgtatcgtgtaataagccttgatttaatgcgcttactttgggagacttgtactgttatgagaaagggattactcacgattagaagcaagccgtcatcccgttccccccaacacccactccagtcttgggctctctcagccacctctgcttcaggacatggtcctcatgggacacagccaccagcttctatgcaagccataccctgccctctctcagcttccacttttcagcagctacctcctgaactggttctttgtgaccctgctacctcgctgtgctggccttgcatctggtcaagctgggaggtgcccctggatgctgacaggctgggatgacagatgtgttgccgtgtagtcttctgtcacccccttgaagctcaggccggcctgcttatcgatgagccatttaggctctcccctttttagtggcatgtctgatggagagagcgaatttagttaattgattaatgtttggagatgtgccagttacttgaggtggagaggggaagagtaccaggtcattctagaataaactcaacgaacatgattagccttgacccctgtttgtaataacttattcattttgtctcagtattaggaatgagctgtccacggagtgcgcggtcactgccgtgtggccctcaacttctgcatttaccaaagattctgccgctgctgcatcttgtctgcgctctagccaggcagctggcaaccaggttctcattcagtgttcttctcctcgagtagcagctccggctcactctagcagggagctttgggccttccatggggacggcacgttccctggtgacctacaacttgatgtattggccctggagggtggactcagtcacagttagccccagagggttactacagtctgagcatactggccttcacctcgcttctgtgtccttcggtggcaaatcacctttccggggacatctgctgaatgtagtacccacatgtctggggaaatatgagggtgtgctcagcacatgctgccaacccggcttatccagatgtcagttattctaggggagctgggacagtgtccagcagcttgtccacattcatcctcctgttctcagcttttgcatttccattataaccttcggggaagtgagtgttttcaccgggtgtgtccagtccttcgtaacctttgccgtttagtatggaacatcacctttctcaggctctcgctgacgtgttcctgttagcctgttcatgactgggcactgggggtctggcacccttcaatctcatggatggatagtgtgctgctgtttggagatcggttcttgccgtttggagctgggttcagcctcctcattttagagataaattaaagggcatttggttgtctggcaggggttggagcaaatgccagcctaaatatggttaactgttgcatagaaagtgactcttgggctacactcttgccagcaggaccatcattcactaaaagtgctcagagcttgtccaaggacagtagggagtggttagatcacccctggatttcttaccccaaattttttgggcatataattttttttgaaccctgccacaatgtcagaattggaaactgtgacgcaacgccccaggaagactgtgctccagccttgagggctacttctcctgggctccttgcctgccccctgtatcgggttgtgacgtgtgatctttgctctggggactcctcgcctgatactgcatgcttgtgagcagagagttctgcccattcgtgctactcccatgctcagcactcgcagactctcttgcctgtgagtgcctgtgcaagtcatgtttatacaaacgccgggctgtgcagcggccatgagcatccttgtgcggggatgaggtggtgccccgtgtgtcgtcactgtctgcattcgaggtcactttgtccacccagagtgcctccagctttccttccttgctcacttgctttccagaccagctctctgaagttcatttttaattttaccctacctgtccacaaagctcctataaaagtcaaatctggcaaaggaccatggccttaaacctctctaaaatgtccacagaggaattcttaagaaagaatggttccgtagcttctggggatgggggatgggatctgggaaatgagtgtccaagatgaatcgtgtagaaggcttctcacaaccaggcctccctcctgtcctaagggacaacactgtccctcagtaccagaagaaatgaaaaaaaaaatgacggctattagtgcaaatagaaatgagggcagcaggcttcctgtttgtttccgggtgtccctagcaggatttggggtgaggagagcgctgtggtgacctgcagtctacctacttctggcttgctggactgttcgcttcagtctccctggtcagctgtgggacaggtgcacctcagggcttcccagggagccccacactgctctgacggatagctaatgcatgataagctatctatccaaccccctgccttctttattttttcttctccaacctctacctttagggacacaaactctttggggtagaaagctgagaggggagaggctaagtgttttagatggggtttttccgtgccttggggtgggacctccgctaaaccctcaggaatgccgagtgtagccaggtggctcgtgcttggcgttctcagcatttctttggggctccagcctccttcagtgcagtgttggctaataaataccttcagcattgaactgaaaactgtcctttggagccatttttttagactcaaaggttgtaaagttttattgcaatctcctttgaagttccttgccactattggtagtcctaaaattctgtaaccagattcttttagatacaagctcacacttccttagagatgatctcccttggtggtcagctgacctggctgagggctccctgggggaggttacatatgcagatgactattgaaagtgtaaccttttgtgacgtgttacataataactggctagtttgcttcactagtcagtcacttcagtcagtattttgatgcttgcttttggttgcttctgtctgatgtcagtagttttggtttccttcaaaataattgacatttaatagttttattttgaaatgatgcatagacacccccacccccagcttagaaaccagcttttatttagggttcttgggtcagcccacagaagccctcagacctcagccatcatggctggaatgcagtgctatgccagatgtggttggcttttgtgggctggcctggacatgggctagcacccactacgttgtaaatggtaaaataaataaataagaaaatataaagcattccaggttgggactcggcacccagcctgtggcagctgctctgtcctcggcagagatggctgtcaaatctctctctcctagcaaactgcacctaagggcaggggaaggacagaggagacagaggacattccttcctaagttaccgatgatcatgttgactgctttggcagagactctctgtcacgtgaataacattaaatgccctaaataaagctatgcacactgctccatgggctgttgtctctcggtaacaagcttcgctcgccagcctctcacacagctctgaggtgtagggtgccgacttttgacagtattcctttgcactgttccctctttctacaaagtcttatttagatattggttgtctctgtcctggtcattgctgtgtaagatgtcgcctatgtgcctttacaaatgtgagatctttattctaacccccttttgtttttggtaaaagatatctattgatttctacatgcaataaaccttgttttgagagaaaatacctgtcttttggtaacacacctgcactagttgaattcactggcttctcctattctgtatgtgcacgcttgtgtgggtgtgcattcacatgtgtgtacatgcctgtagagaccagaggtcaaccatgggtatcgttcctcaggaaccattcccctccctcattgttttgaacagggtttctcactggcttgggacttctgatccgagcaagcctggggatatcttatcttttccactgggtttacacgttgccaccaagccgagttcttgagttcaaactcagggcttcacactcacggggccaacacattactgacagggccatcttcccagccttatcgtctcttactttaagatgggttttataggcaaagacctctaggaaaaacttgtctttattttctcctgatgttattttcacctggccttttttgttttgtcttgtttttaatccttgcacgacctggtcttgatgcagattttgtttgcagttcctcatgtcttcattggggagggaacacacaagaagcaaatgccaggatgggtccttttcacacatcagagagaacctgcaggaagcctcccttctgggtcccttctgccaggcaggtaaccaacaagctcctgtgaagagggatgctggaaccaaacccaagccctgtgaaagagcagcactcacccttaaccgcagaaccacttttccagcttaaaaagaaaaaaaattataaagaagctcaaagcaaaagtgcacacacagaaccacgtgctgtgaggaaaaggtacccacgggaaccaatgagtgtgtttgtgagcttacattgtattttctttagctgtaaaacacaaaatctaggactcgagaatgttcgagtgacaaaaccctttcgaggcaaaaatctagacaaattagtgaacctgtcacattcgtgacatcatatctgagtgcacagatcctccctgtgtcactagctatgatgcggacccagaaaagcccctggcagctccctgggtgtgagggaaaaaggaaccaagcctaaaggccttggagttactgggtgtgggcactggagagaaggctccttaaagagtgctctctgctcttcaagaggacggctctgagcatccacaccaggctgtaagctgcctgtaacgccagctccaggggatccaactgacgtcctcttctggcctctggtggcactgtttgtgaggtaagggaacctttaggtcaagccttgctggaggaagtatgtctctggggttgggtgggcctcatgtgctgttcttcctgtcctgggtgcattcgatgtgaccagcctgtcacttgctcctgacactgccttccctgcctactaccaagtcttcccctagtctacaatggacttcaccctctgtaaacccttttccactaagttgcttttctttaaaagatttctttgtttattttattagtacacggtcactgtcttcagacacaccagaagagggcatcggattccattacagatggttgtgagccaccatgtggttgctgggcattgaactcaggacctctggaaaagcagtcagtgctcttaactgctgagccatctctcgagcccacaaatagaattcttagtgtcttaaagacttgcttgggtctaagatgatgtacagatgtatgaggcaccggggagtcactctgtagagcggagcatccagatatccgtctccagccccccccctcccccaccaagttgctttttgtctgggtgttttatcacagcaacagaaaggaaactaaatacatgaaacaatcctgggtagatctcagacagaggtgaaaaagctgttttctccatttaaagatagaaagcaatctgccgctccccatttgtaatgaaaagaacgggggtgcagatattttcaccaatggagatcaacaccccatatacttcagggttggaagtttcagaagacatgggcaaaaaaacggcaatggccagtgaaggatcctagaaaggtgtgtatgatagggagggagggnnnnnnnnnnnnnnnnnnnnggagggagagagagagagagagagagagagagagagagagagagagagagacagagcagttgtgtgcataatgagtttcttgcttctgaaacacagctccaaaacccttggacttccctgaatgaaatgaaagtgctaagtttgaagagggagatggtaagatactgcttttgttccaggcaaacaccacaagaccttccctttccctccacagagagccctgtctcagaaaagaaccaggtaacaccacataccatgaatattcgtcctgagggaatcaggacagctgcacttcaacgctgcaaagaacgggaacaactgctaagtgcagaaaagctggcccctgtcaagccagaaaggcagctcacaaaaccatgtcaggatctgccttgtttgcctgagtgtactgtacatggggtgggcagacagatcttacaaagttccctttacaatggcttccctgccagggtggggcacactcttctaatttactgagaaactgaaatctttgtgagttataaaaatggcagcccaagcttgtgtgaggctcagcagtggcatggacactaaatcagcatgcttaaacactgcctcaacatgaagatcagggctgtctagagtcgtgcactggacaagtgttctgcatagaggagatgctcatgggaagactgcgccctacaggagaaaataattctaccagttaaacccaagtgtgtgcagtaagctgagaactgaccatatataggagagggggaagcacacttgtctatagtcagtcagtcagtcagtcatggtaacatcacagacaggcaggggaccctccattacagtgacaacacaggcaggcaggggatcctccattactgtgacatcatagtcaagcgaggaccctccattactgtgatatcagagacaggaaggggactctccattacagtgacatcacagacaggcagagggacctccattatggttatggtgacatcatagacatgcagagggttcttccattactgtgacatcacagacaagcagagggaccctccattaagtatgacttgtcaccttgtggggaagtcactctctctggagtacagggactgctgatgaagagctccaggccactgctgtccagcctgccagcctggaaggagctggttcctgcaggcgtgggggttagagaccagtgtttgctcacaacacatggttggtaaggaaatttttttttccctcctcaagcttaccctggagcctttccaggagagagccacacagggaatcatccacggaaggagaggggaggtgtcaggaagacaaagctcagccaagcgtctccagaaggttccaaggggaagcctgcgagaggccaagtccagtgccagggaggtgcgcccaggccagcgacctcgccctgcaccttccctcctgcctgctgtcttcctccagtcactgttctgtgacagtaactgcagatggaagatgactaacccgctcccgggcagagaccggggctcgaggagcgatggagaagcccccgcccccacccacagcatcctcacagacatt

SEQ ID NO: 598 - DNA, 4123 bp, Mus musculus
ggcagtctctcactagcctcgaactcagtgagtaggctgactgctcagtgagctccaaggattcacctgtttctgtgtccccagcactgagatgacaggctcgtgctacagcacccgattcatgagggctctggggatcaagcgaaggtccttatccttggatggcagggcagagagcctggtgggcatggacatctttatccacataccttagtgtgaccacgccgacagaaaactactaaggccatctcaggggtgcctgtgccaggagaggggggcggtgtccccgggccgcagagccatgcctttcggcctgaagctccgcaggactcggcgctacaacgtcctgagcaagaactgctttgttacccggatccgcctgctggacagcaatgtcatcgagtgcacgctgtcggtggaaagcacggggcaagagtgcctggaggccgtggcccagaggctggagctgagggagacgcactacttcggcctttggtttctcagcaagagccagcaggcgagatgggtagagctggagaagccactgaagaaacatctggacaagtttgctaacgagcctctgcttttcttcggagtcatgttctatgtgccaaatgtgtcacggcttcagcaggaggccacaagatatcagtattacctgcaagtcaaaaaagacgtgcttgaaggacggttgcggtgctccctggaacaagtgatccggctggctggcttagctgtgcaagctgacttcggagattataaccagtttgattcccaagagttcctccgagagtatgtgctctttcctatggatttggccatggaggaggcggctctggaggagctaacccagaaggtggcccaggaacacaaagctcatagcgggatcctgccggctgaagctgaactgatgtacatcaacgaggtagagcgtttggatggatttggacaggagatcttccccgtgaaggacagtcatggcaacagcgtgcacctcggcatcttcttcatggggatttttgtgaggaacagggtcgggagacaggcagtgatatacaggtggaatgacattgggagtgttactcacagcaaagcagccatcctgttggagctgattgacaaggaggagaccgcgctcttccatacagatgatattgaaaatgccaagtacatttctcggttgtttaccactcggcacaaattttacaaacagaacaagatctgcactgaacagtcaaattctccacccccaattagacgccagcccacctggagccggtcctcactgccaaggcagcagccgtatatcttgcctcccatgcatgtccagtgcagtgagcactactcggagacccatacttcccaagacagcattttccccgggaacgaagaagccttgtactgccgttctcacaacagcctggaccttaattacttgaacggcaccgtcaccaatggcagcgtgtgcagcgttcacagcgtcaactccctcagctgctctcagagcttcatccaggcgtctccagtgtcctccaaccttagcatccctgggagtgacatcatgagggccgattacatccccagccaccgccacagcaccatcatcgtgccgtcttacaggccgaccccagattacgagacggtcatgaggcagatgaagaggggtctgatgcacgcagacagccagagccggtctctgcgtaacctcaatatcatcaacacccatgcctataaccagcccgaggaactggtgtacagccagccggagatgcgggagaggcatccctacacggtcccctatgcacaccaggggtgctacggtcacaaacttgtaagtccgtctgaccagatgaacccccaaaattgtgcgatgcctatcaagccaggggccagttccatctcacacacagtgagcactccagaactagccaacatgcagctccaaggagcacaacactatagcacagcccacatgctcaagaactatctattcaggccgccacccccttaccctcggccccgtcctgccaccagcaccccagacctcgccagccaccgccacaagtacgtcagcggcagcagccctgatctggtaactcggaaggtgcagctctccgtaaagaccttccaggaggacagctcacctgtggtccatcagtctctgcaggaggtgagcgaacccctcacagccaccaagcaccatggcggcggcggtggcacggtgaataaacgccacagcctggaggtgatgaacagcatggtgagaggcatggaggccatgacactgaagtcactcaatatccccatggctcgccgcaacacccttcgggagcagggcccttccgaggagacgggcggccacgaagtgcacggtctcccccagtatcaccacaagaagacattctcggatgccaccatgctgatccacagcagtgagagcgaggaagaggaggagaccctggaggctgcacctcaggttcctgtgcttcgagagaaagtagaatacagtgcccagctgcaggctgccctggcccgcatccccaacaggcccccacctgagtacccagggccaagaaaaagtgtcagtaatggggcactgagacaggaccagggaacccctcttcctgccatggccaggtgcagggtgctgagacacggaccatccaaggccctcagtgtctcccgggcagagcagctggctgtcaacggtgcctctctgggtccctccatctctgagcctgacctaaccagcgtgaaggagcgggtcaagaaagagcctgtgaaggaaaggccggtgtcagagatgttctccctggaggacagcattatagagagagagatgatgatcaggaatctagagaagcagaagatgacgggcccgcaggcacagaagagaccgctgatgttggcagcgctgaatgggctctcggtggcccgagtgtcggggcgggaagacggtcaccatgatgccacccgagtccccatagacgagaggctcagagccctgaagaagaagctggaagatggaatggtgttcacagaatatgagcagattccaaacaaaaaggccaacggcgtcttcagcaccgccactctgcctgagaatgccgagcgcagccggatccgagaagttgtcccatacgaggagaatcgagtggagctcatcccgaccaaagaaaacaacacaggctatatcaacgcctcccacatcaaggtggtggtcggcggatcagaatggcactacatcgccacccaggggcccttgccacatacgtgccatgacttctggcagatggtgtgggagcagggggtgaatgtgatcgccatggtcactgcagaggaggagggtggacggaccaaaagccatcgatactggcccaaactggggtccaagcatagttctgccacctacggcaagttcaaggtcaccacaaagttccggacagattctggttgctatgcaacgacgggcctaaaggtgaagcacctgctgtccgggcaggagaggaccgtgtggcacttgcagtacacggactggccccaccacggctgtccagaagacgtccaaggatttttgtcctacttggaggaaatccagtcagtccgacgccacaccaacagcgtgctggaaggcatcaggaccaggcacccccccatcgtggttcactgcagcgcgggtgtgggaaggactggtgtggttatcctctctgagctcatgatctactgcctggaacacaacgaaaaggtggaggtgcccacgatgctgcgattcctcagggagcagaggatgttcatgatccagaccattgcgcagtacaagttcgtctaccaagtcctcgtccagttcctgcagaattccaggctcatttgatctcctccgggatgcagcttctggaggagggacgcagctctgtcctgcagggggcgccacttcgacaacatctgcctcccccagccagaggtggatggctggcagcaggcagaagccagagttactcacaaacatcatgtattattttatataagataatttattttttccctctttggaataagttctgtgagttattatataatgcttcccccccatacacacacacaataatatagtgcttctcatttg

SEQ ID NO: 599 - protein, 1185 aa, Mus musculus
MPFGLKLRRTRRYNVLSKNCFVTRIRLLDSNVIECTLSVESTGQECLEAVAQRLELRETHYFGLWFLSKSQQARWVELEKPLKKHLDKFANEPLLFFGVMFYVPNVSRLQQEATRYQYYLQVKKDVLEGRLRCSLEQVIRLAGLAVQADFGDYNQFDSQEFLREYVLFPMDLAMEEAALEELTQKVAQEHKAHSGILPAEAELMYINEVERLDGFGQEIFPVKDSHGNSVHLGIFFMGIFVRNRVGRQAVIYRWNDIGSVTHSKAAILLELIDKEETALFHTDDIENAKYISRLFTTRHKFYKQNKICTEQSNSPPPIRRQPTWSRSSLPRQQPYILPPMHVQCSEHYSETHTSQDSIFPGNEEALYCRSHNSLDLNYLNGTVTNGSVCSVHSVNSLSCSQSFIQDVSSNLSIPGSDIMRADYIPSHRHSTIIVPSYRPTPDYETVMRQMKRGLMHADSQSRSLRNLNIINTHAYNQPEELVYSQPEMRERHPYTVPYAHQGCYGHKLVSPSDQMNPQNCAMPIKPGASSISHTVSTPELANMQLQGAQHYSTAHMLKNYLFRPPPPYPRPRPATSTPDLASHRHKYVSGSSPDLVTRKVQLSVKTFQEDSSPVVHQSLQEVSEPLTATKHHGGGGGTVNKRHSLEVMNSMVRGMEAMTLKSLNIPMARRNTLREQGPSEETGGHEVHGLPQYHHKKTFSDATMLIHSSESEEEEETLEAAPQVPVLREKVEYSAQLQAARIPNRPPPEYPGPRKSVSNGALRQDQGTPLPAMARCRVLRHGPSKALSVSRAEQLAVNGASLGPSISEPDLTSVKERVKKEPVKERPVSEMFSLEDSIIEREMMIRNLEKQKMTGPQAQKRPLMLAALNGLSVARVSGREDGHHDATRVPIDERLRALKKKLEDGMVFTEYEQIPNKKANGVFSTATLPENAERSRIREVVPYEENRVELIPTKENNTGYINASHIKVVVGGSEWHYIATQGPLPHTCHDFWQMVWEQGVNVIAMVTAEEEGGRTKSHRYWPKLGSKHSSATYGKFKVTTKFRTDSGCYATTGLKVKHLLSGQERTVWHLQYTDWPHHGCPEDVQGFLSYLEEIQSVRRHTNSVLEGIRTRHPPIVVHCSAGVGRTGVVILSELMIYCLEHNEKVEVPTMLRFLREQRMFMIQTIAQYKFVYQVLVQFLQNSRLI

SEQ ID NO: 600 - DNA, 4226 bp, Mus musculus
cagggcaggtcctcgtggagcatctggtaccaagtggccgctggcggtccctctctgcgccccacctctctgatcgcccgggtcccctcgcgtgggacggcggtgcttaggttcttggccctttctcctccccggtgcgcccggcgcgccggccgctgcgtaaccctccctgcgcccctcctctgccagctcctggaagccagtggtggggacccagactccctgatggtcaacgtgcggcacccggggcactcccgggccatgtaagcagggcagagagcctggtgggcatggacatctttatccacataccttagtgtgaccacgccgacagaaaactactaaggccatctcaggggtgcctgtgccaggagaggggggcggtgtccccgggccgcagagccatgcctttcggcctgaagctccgcaggactcggcgctacaacgtcctgagcaagaactgctttgttacccggatccgcctgctggacagcaatgtcatcgagtgcacgctgtcggtggaaagcacggggcaagagtgcctggaggccgtggcccagaggctggagctgagggagacgcactacttcggcctttggtttctcagcaagagccagcaggcgagatgggtagagctggagaagccactgaagaaacatctggacaagtttgctaacgagcctctgcttttcttcggagtcatgttctatgtgccaaatgtgtcacggcttcagcaggaggccacaagatatcagtattacctgcaagtcaaaaaagacgtgcttgaaggacggttgcggtgctccctggaacaagtgatccggctggctggcttagctgtgcaagctgacttcggagattataaccagtttgattcccaagagttcctccgagagtatgtgctctttcctatggatttggccatggaggaggcggctctggaggagctaacccagaaggtggcccaggaacacaaagctcatagcgggatcctgccggctgaagctgaactgatgtacatcaacgaggtagagcgtttggatggatttggacaggagatcttccccgtgaaggacagtcatggcaacagcgtgcacctcggcatcttcttcatggggatttttgtgaggaacagggtcgggagacaggcagtgatatacaggtggaatgacattgggagtgttactcacagcaaagcagccatcctgttggagctgattgacaaggaggagaccgcgctcttccatacagatgatattgaaaatgccaagtacatttctcggttgtttaccactcggcacaaattttacaaacagaacaagatctgcactgaacagtcaaattctccacccccaattagacgccagcccacctggagccggtcctcactgccaaggcagcagccgtatatcttgcctcccatgcatgtccagtgcagtgagcactactcggagacccatacttcccaagacagcattttccccgggaacgaagaagccttgtactgccgttctcacaacagcctggaccttaattacttgaacggcaccgtcaccaatggcagcgtgtgcagcgttcacagcgtcaactccctcagctgctctcagagcttcatccaggcgtctccagtgtcctccaaccttagcatccctgggagtgacatcatgagggccgattacatccccagccaccgccacagcaccatcatcgtgccgtcttacaggccgaccccagattacgagacggtcatgaggcagatgaagaggggtctgatgcacgcagacagccagagccggtctctgcgtaacctcaatatcatcaacacccatgcctataaccagcccgaggaactggtgtacagccagccggagatgcgggagaggcatccctacacggtcccctatgcacaccaggggtgctacggtcacaaacttgtaagtccgtctgaccagatgaacccccaaaattgtgcgatgcctatcaagccaggggccagttccatctcacacacagtgagcactccagaactagccaacatgcagctccaaggagcacaacactatagcacagcccacatgctcaagaactatctattcaggccgccacccccttaccctcggccccgtcctgccaccagcaccccagacctcgccagccaccgccacaagtacgtcagcggcagcagccctgatctggtaactcggaaggtgcagctctccgtaaagaccttccaggaggacagctcacctgtggtccatcagtctctgcaggaggtgagcgaacccctcacagccaccaagcaccatggcggcggcggtggcacggtgaataaacgccacagcctggaggtgatgaacagcatggtgagaggcatggaggccatgacactgaagtcactcaatatccccatggctcgccgcaacacccttcgggagcagggcccttccgaggagacgggcggccacgaagtgcacggtctcccccagtatcaccacaagaagacattctcggatgccaccatgctgatccacagcagtgagagcgaggaagaggaggagaccctggaggctgcacctcaggttcctgtgcttcgagagaaagtagaatacagtgcccagctgcaggctgccctggcccgcatccccaacaggcccccacctgagtacccagggccaagaaaaagtgtcagtaatggggcactgagacaggaccagggaacccctcttcctgccatggccaggtgcagggtgctgagacacggaccatccaaggccctcagtgtctcccgggcagagcagctggctgtcaacggtgcctctctgggtccctccatctctgagcctgacctaaccagcgtgaaggagcgggtcaagaaagagcctgtgaaggaaaggccggtgtcagagatgttctccctggaggacagcattatagagagagagatgatgatcaggaatctagagaagcagaagatgacgggcccgcaggcacagaagagaccgctgatgttggcagcgctgaatgggctctcggtggcccgagtgtcggggcgggaagacggtcaccatgatgccacccgagtccccatagacgagaggctcagagccctgaagaagaagctggaagatggaatggtgttcacagaatatgagcagattccaaacaaaaaggccaacggcgtcttcagcaccgccactctgcctgagaatgccgagcgcagccggatccgagaagttgtcccatacgaggagaatcgagtggagctcatcccgaccaaagaaaacaacacaggctatatcaacgcctcccacatcaaggtggtggtcggcggatcagaatggcactacatcgccacccaggggcccttgccacatacgtgccatgacttctggcagatggtgtgggagcagggggtgaatgtgatcgccatggtcactgcagaggaggagggtggacggaccaaaagccatcgatactggcccaaactggggtccaagcatagttctgccacctacggcaagttcaaggtcaccacaaagttccggacagattctggttgctatgcaacgacgggcctaaaggtgaagcacctgctgtccgggcaggagaggaccgtgtggcacttgcagtacacggactggccccaccacggctgtccagaagacgtccaaggatttttgtcctacttggaggaaatccagtcagtccgacgccacaccaacagcgtgctggaaggcatcaggaccaggcacccccccatcgtggttcactgcagcgcgggtgtgggaaggactggtgtggttatcctctctgagctcatgatctactgcctggaacacaacgaaaaggtggaggtgcccacgatgctgcgattcctcagggagcagaggatgttcatgatccagaccattgcgcagtacaagttcgtctaccaagtcctcgtccagttcctgcagaattccaggctcatttgatctcctccgggatgcagcttctggaggagggacgcagctctgtcctgcagggggcgccacttcgacaacatctgcctcccccagccagaggtggatggctggcagcaggcagaagccagagttactcacaaacatcatgtattattttatataagataatttattttttccctctttggaataagttctgtgagttattatataatgcttcccccccatacacacacacaataatatagtgcttctcatttg

SEQ ID NO: 601 - protein, 1185 aa, Mus musculus; identical to SEQ ID NO: 599

SEQ ID NO: 602 - DNA, 214165 bp, Homo sapiens
  misc_feature (1)...(214165): n = A,T,C or G
taaaaatacaaaaattagctgggcgtgatagcatgcgcctgcagtcccagctactcaggaggctgaggcaggagaattgcttgaacccgggaggcagaggttgcagtgagccgagatcgcgccacctcactcctgcctaataacagagtgagattccatatattaaaaaaaaaaaaaaaggaagaaaagacaagcagcacagcagcacagactgagagttgtctcctggaggagatgccgcaggaagatagaggagaagatggatcttcaggctgtgctcagcaacaaaccgcagaaatccttggggtagatagaagttgatttggtccactggttagcaggtgaagtgggtctgaggtcacaaatagggaacgggtttgggaaaaattttgttttagttttgccctttcctcatcccctaggcagattccctgtgccactcccaacttggtactgcagaggcaggacattagcagtacaggctagtggcagcatgatagctgcaaggcagtgccatagcttagtgtgcttatgagcagatggcaatgcatgtagttggtttgaccagcccctgagaattaaccccctcaccaccgcacacacacatacatccctgctgtcactaccctgtgggcatccacttatgatagagtggctgtgtccaataaaagattattcagaggttgcttggagaccagttgagcacaatgctatgcccctcacataatcacacacaacaacatagacaccaattcacctggagaagcacacgcttggctagaattgtgcccctttccatggatgcattttactagtaaggcagcaaatggtcccaaaggaacaaggataagctcagagggaaaattctgagaactataagtttgagaaacaacaaaccaatgaaacagcttacaccagagaaagtagaactaatggaaaacagagaaagaatttcaaacaaaaataataacaataatctgtcatatatttcaaaatatctggacgaaagtaatttctagcctaaagaaaagaaatatttggctgggggcagtgactcatgcttgtaatcccacccagcactttgggaggccgaggcgagcagatcacttgaggacaggagttcaagaccagcctggccaacatggtgaaaccttgtttctatcaaaaaatacaaaaaaaaaaaaaaaaattagctggctgtgatggcatgtgtctgttgtcccagctactcaggaggctgaggcaggagaattgcttcaactcgggaggtggaggttgcagtgagccaagattgtgccactgcactccagcctgggcgacagagcaagattgtctcaaaaaaaaaaaaaaaaaaaaagaaagaaagattgatttaaggtgatgaatatttcaatttaactgatttgatctttataaattatatgaatgtattaaattatcacaagtgccatgaaaatatgtacatttattatgtatcaattaaaaataacatttaagaaaagaacaaatatgcttgaaaagttgagagaagatactagaaacatggagtgagaatagacagttcagtaaaagaattagaaatattgagaatgaatcctgcagttattgaataaagaatttgatggattgcttcaatattcaaggtatctagtaaagacatgatctggaagattaagtcaaggagttaccctgggatgcactaggaaaggataaggatagagaatggaaaaaaaagagagagaaaatgaaggaatttgataatcaggtgtccaagtctattagaaataccggaagaaaaaacaaaatggtgggaagcaaatggttcaagtaataatgacagagaacttcctaatgtcacacagctagtaaactgcaaaacaaggaggtctgcccaggcaatctagcttgagtatactatatgtgattaactgttatttactgccttagctgcactacctcagaagccgggctgcagggggagaattcagttaggaataggaaataaagggggaggaattataaaataaacagaagagaggcagtgcttgaagtgaggaagagaatgtgttaggaatgaggataaagtgtgggtgtctcaactctatgtgacgagatcctaaataaacaaacaaatatcaaaatcctgaaaatatggaaagccacaatctaaaatagcaacaaaaagagacaagttacttcatctctttaatccttagtttccttatctataaacagaagcgattgtaacacctatctcctagggttgttataaagattaaataacagaatagatgtagaattcagagaacaggaaaataactggcagttagttatttttatgtgagaagagactctaataaaaataataaaaattttattttttcatttaatagatatttgttgggttgggtgcagtggcacgtactgcaatcccagcattttgggggtccgaggcaagtggatcacttgagttcaggagtttgagaccagcctggccaacatggtgaaacccagtctctactaaaaacatgaaaatcagccaggcgtggtgcacgcctgtaaccccagctacttgggaggctgaggcaggagaattgctagaagctgggaagcagaggctgcagtgagctgagaatgcaccactgcactccagcctgggcaacagagcaagtctctattaaaaaaaaaaaaaaagtcagttcctctttcaccatttgaaaatttttgtcttgcacgtcacatgaaatcagaggtgtccatcatggagtgaagtccagcgtttgccttcatatgttaatctgctttttctggcttctaagatttattattttagaagacacatctgcctcacagttgaggcagaagacatcttaaaactgagtttcccagacaatttgccttttctctgctggccacaggaagtatctttcaatcctcagtggtcattccaaaccagtcccctaattgcccttgtccaggtctgtgggagttactcagacatgtttgaagtaccagagtcagtcacactctgagtcaccccctcattctaggggaggcagccaggaagcagccggtcttgggggaggttttgatttagtgctgttggattctcttacacaaccctgcccataccccgtgggtaaccctatctcaccccttcaggctggggtggccatgttctttagaaaggcatcccaaacacaactcgatccttcctcccccagtgaaggttgttccttgtcactaatcacagcagaagattcctttcaggtcccatacctctcagagaggtgttctggtcacagctgctgatatcggaaacaaatgcatccctgttcttatttgactttccagacacctctgaatttgtaaccagtctggaagcctatccagtttgcatcttcatgaatctggtttgcattattatttgttgacagctttatctaggtgtttaaagtacattaaaaaaaaacattaagtctcatagtccatgcataaaattttttaaaaagcccagaactagggatataaaagacaaatgaatgaattgccacctatttagggctttatttaaatttggcatctaggactactataaggagaagagtcagtggcccataagacttaaatctggccgggtgtggtggctcatgcctgtaatcccagcactttgggaagccaaggccggtggatcagaggtcaggagatggagaccatcctggctaacacggtgaaacccatctctactaaaaatacaaaaaattagcctggcgtggtgacaggctcctgtagtcccagctactggagaggctgaggcaggagaactgcttgaaccccagaggcagaggttgcagtgagccgagatcgcgccactgcactccggcctggtgacagagtgagactctgtctcaaaagaaaaaaaaaaaagacttaaattcagctttctcaggcttttccttcaaataagatacagtttcagaaagtcagtgcagctacaaatattaccagagacagtgtcagcaagagggctacatctggactggcccctttgatctaaacatcatcattatgagaagggaaagactcctagcttcaaataattttcttccaagtttggtgggaaaggactaaaaaaaatgtacatattggaggaggggtatctgttgactatttaagtcagaaatgtcctggctaacttgactttttacaacatcatcactttatctcctatgaacaatgatttcacctaatatctattctcactatcatgccacaaaatggcagcaagtaggtattttggagagtactaaatggggctaattacagatatcatttacctgctctcattcaactccgtgaaggtgttattggctccttggccactcacagtgaattctatagctgtgtaccttcctaggagttggcccaggtagagatataaacagcacgaagaacagtttagctcagttcatgaatgagaaattaataactaactattcttagaaattagggtatttctgacttttggagattgatgtcacgaacaaaaactattccacattctgagaaagtcaagaaaatgtgacttcaggcccgccagaggcagcctcctgtgtgctagaaggacccttcacccaacctgacgcctcttggactccacgtggctaataggtgaggacattaactcataggaatcttggaaactaacaaaataaatagtacctaggtatcaaagtccttcgaaaggacttgttctctgatcttacagtagcagcttccactcccctttgtaatggctgcgctcagaagaacgtgaaaaaagaaggatttaaaacaactggagacacgtactccagacatgtcttttcccattaccccaatttgatatcagcgaagtaccagctgtcccctggtaaactttggtgatggagaattttaaacacacacactatcttgctaatgcttttattttctgttttcaccatatactttctgctacttcctaatgctattcctgacatacagcagtgctgaataatctgtacagcaacaaggtggaatagaaagaacacaaactggaatgagaaaggtccaggtttgaatcttggctctatcatgtacttaggtactgcatggcctggtacacatataaatacagggcacttgaagtctcaagtttatttccatgttaaagcagacacacacacacacacacacacacacacacacacacacacacacacttaccccgcaaccacttacctcggtgtattagtctgactgagctgcaataacgaaacagtaacaaaataccacaggctatgtagcttacacaacagaaattaattttctcacagttctggaggctgaaagtccaagattaggtgctgtaagggttggtttctggtgagatctctctccttggcttgcaggcttctcattgtgttctcacatgtgtagagaggaggagctctggtgtttcctcctcctccaaatttatatgtattacacaccacaccacacacacacacacacacacacacaaatatgattccatttatatgaagtttaataaccagcaaaacaaatccatggtggtagaagggtgatactgactaaaaagtcacacaagggaatttcctgaggagatggacgttttctatatcttgacctgggtggtggccccatgcatgtatacacatgaaaaggtcttcaagctgcatctacacttaagagttgtgctttttattgaatgtgaattgtatcttcctaaaacactgtctaaaaatattacactcctcccaactcccaccataacccatctctaccctagacccagggcataagatacagaagcagaggattcagagaggatgtatatttgaaaaagcttcccacttctctccattactccaagttgctaaacatccttttaggaattggaattaagctggactatatacatacatgtacatataaaacttaaaaatttgtaaaaggcccctagagatcatcagagttttcttaacaaagcaggcttactttccagttggctttgatttggggaacttgttctgctttcagtggcttcagcatctttgaaggtgtaaaatgaatgcattaatgagaggaacacattggggctgggaggaattgtggaagcccacgggattcttctttgtatttgtagtttgaattgggcttataagaatctggtaattgctttgagaaatgtaatattgataagttcttacaattgcaaagctttaaagcaaacatgtagtgatgtgttcaggacctattccatgagtcgaattccttttcaccctgatgtagtataaggagacttgagtgtgacaaagatttaggaaatgggtttcttttttctttttgaaagaaacttgaaactagcttttatatatttatcctgagaatgaaaggtttttgtcacttcaagctgtactttctatttagaaaatattctttttttttttttttgagacgaagccttgctctgtcgcccaggctggagtgccatggcgcgatctcgggtcactgcaagctccacctcctgggttcacgccattctcctgcctcagcctcccaagtagatgggactgcaggcgcccaccaccacgcctggctaattttgtatttttagtagagaaggggtttcactgtggtctcgatctcctgacctcgtgatccacccgcctcggcctcccaaagtgctgggattataggtgtgagccaccgcgcccggccttagaaaatattcttatttgtattgcctttctgtgatctattctaaagaaaaagaaatatggctagtcagatacactctataggcttttaagttaataacgcatattttttttctttttcaagagaggatctcactctgtcacccaggctggagtgcagtggtgtgatctcagctctgtgcagcctcggtctctcaggctcatgcaatcctcccacctcagcctctctagtagctgggactacaagcctcgagctaccatacctgactaatttttgtattttgtgtagagttggggtttcgccatgttgcccagactgtcttcctgtaagtaaaattatctaaatttttaaaatgtgtccacagggttagtgctaaatcttagctttacttatcattgaacactcagccacattcattggagtctcaacattcattctcatctgaaggtggtgtgaaaacagtcctgtccccagacactggctttatccactggctttattgcttagcttcctccacaggcatgccatctatctggagaagagtactttgatggaagtttagtcctgggaaagacctcagagatgaactattccaaccaagctctgccctctttgccacactctacttagaaaataaattcaggcctagaggtgaagtgccttgatcagggtcccaaggctggtcagaggcagaaccggaacccttgtgtctgcccaagaaggacaacaagtcctttgctgcttcttttatgccacaacagcctcagggtgctgtgctcagtttggtagcacagtgatgttagagcaacacaatatatttcctagtgtcttttcactagaaaagacaccaagcaagaggtctcccatctcccaggaaagagcaaaagccagagttttacattgagatcctgaaggcattttcttatctttaatcctaatcctgtttgggtccaatttcaaagagatgaagagcatgcactttaggcctgacagactagggccctgatcatatcttcctagttgtatgaccctcagtgagacaggtaatttcttcatgcctcactttcctcatctaggaatgggggagtgctttccacactttctggaacacagtcaggcactgcctaatgttttctttggaaacccagcacgtctgtacagctatttcctttaaaatgtgagaaagttgatttcccttcaaccttttctttccatcacttttgcattgcactcggcgttttctctaatttacagttctagagattggcagatgctcgaagaaaatcagagtcactacggatttatttattttattttattttattttattttatttttttgagaggagtctggccctgtagcccaggctggagtgcagtggcgcgatctcggctcactgcaacctccgcctcccaagttcaagcaattaacctgcctcagccccagagtagctgggactacaggcgcacgccgccacccccgaaacattttttgaattttagtagagacggggtttcaccgtgttgcccgggctggtgtcgaacttctgagctcagccaatcccccagctttggcttcccaaagtgctgggattacaggtgtgagccaccgcgctttttggtttccaattctcttccccaagaggccaggaatttttgcatgagttgccggacactgaagtgatttgggacaatacattgtgtgccaacgacttcaaggtcccttttcaacaaaggactggaatcttaccgagataaatcccaagacatgtttgtagcaatgcaaaggaccacagaaatctagacaaattatttaattttgcagctacagaaacctaggatctcaggggctgggatactcctcagttatccaatcgggcagggcctaaaacccaggttcagtcgcctggctccgagctttttccatcataccagctgcgtctcattaactccacctccgaaagtgctaaggaagttccctcccagtgcctacccaggcagggtggggcgattctgtggcatggaacaaaccgggaaaacgacattttccaactctcagcacacaggctgctttttatcattcctacggggcgggagggggcagggagagaaggctaagacaccgggtccagtacccagagattctagggagagatctctgagattgcctacttggtgaggccaccttactttctcctggtctgttttcccctgtggggtggctgcatgaaacgtcctgcttggagggttccccaatataaggtggactattctgaatgtaggtcggggtgagcaagttcctgccgccgccccgtctctgcggtcctcggaagtctaggtgggctcttccttgccttgcctctttctccccaacggcgggagcagcccagggttggggtggctgcggtcgccttgctctctccacttccacgtctcttactccagggagtttcatccggtcctccgtcctcggcccccaccttttaaaacattttccaaaactaccccattaaaagtgtgcgacttctccgggcctgcagaaggagctcctgcagcccggcattcctcggattccagcgctgtgacgtccccaaggacggcgcgcctccagctcgggagctcgggagctggggctccacgtttcagcgcgcgcccgcggcgcccccggcgcgcgccctcccgggccgcattcctccccgcccccggccgcgcgcccagcgctccctccgcctcccggcccccagggccgcggagcccggctctggggtgggggagccgtggccgccggcgcctgctccgtcccctcccactcgcacggccccttcctccctcctctcccggccgctcgcatttcctgccgctctggctctcccggcccctcaaagttctttccaactttttctcggcggagtgagcgcagcgggcgcagactcgggggcaggttgctgtgcttctccgggctcagccgcctgctctcctggctcaggtcctcggggagccctagacagacatcaagtggccactggcgctccttcccctcccagctgagccatcctccccggcctcctcgggcgggacagccccgtgcttaggtttttctccttttctcccccggtgcgcctctgctcggactctcgcgccgggatcgcggcggaaacctccctcccctttcgcctcctgcggctccttcccttcgcccctcctccgccagtcactggaatcaattccgtggggaatcggctccgccgccgcgaaggacagcctttccgcgcgggactccggggcgccacgggggccatgtaagcaggtaagccccgtccaagccgggagttgggcccgaggttggaggccgccttggcgctccgggcgccctgcagatgacttgggcagacgctggcaacgccaacttgagattggcggcccgggacgcctggcagggcagcctggggcgcggggtggccgggccgcaggggtgttatctcgcggtgggagctgcccgcggtgaggcgcaaagctggtcccgggagcgagctggaaggtgagcgcagtctggggagtttgtggttaaacccacaccctggtcccctctctccattcccttctgcgttttgggaacgagagagggcctcggaagggcaactagagatacctagaccttgggggctagaggatgaaagacgaacgacgtcgcggtcgctgcagcggtagggggatgcagctgcccgacgctcccaatcacaccccaccaccaccgggaaggaatcttgaggggagcggagttttcctgccctctcactaggccccagtggtgccaccgaactcctgggcgtcgaggctcctacttgggtggtcgagctggctcgtagaaaaaaagctgtggccaaacaatttcagatcaggtcttcacctcaaacttccaaagttgtaggtattaacagcctctccttccccacgtgacccccagatctcaggtttgaatacttgtaaatggggtttacaccttttcgtttggagagagcagtgaggtaacgctgcccctatctccctttccctctcacttccttgggttcttgttctccaaccttctcatccccacctacaatttcagaaattgtggggtttccgcttaagtctagggactggctgtcgcaggttctttgtgaaggtgaggaatctctagactgcaggtgcgggcagttacagagtttccaccaatgtgttaacttcttgaaatggattagtttactcattcatccaacaaacccagcttctactctgctaggaacagaggatagaaagatgctaaatgagatcacagggcaggagtctgcagcctagtggaggaaacttgaaggccggtgaagaatgataatacatggaagaggggttctgtgagagtctgaggcgagcttggtcctggtgaagggtgcactacacttagaggatagaggttgtgctcctctggagggtgtattccaggcagaggaaacagctcgtgcagagtgaacacaagaaggacagaaagtttccctagccatctgggggcctgaggggcatttatggccatgttggtgcagtgttgctgggatagcattctctccacccccaatatcagaaataaatctagaagcacgttagccacttatgggaaccacaagtagcttacagaggagccaaggcctccctaattggatacacctccatgcctgctgctgttttaccacaagcagctgttgtatgatcatctacattttaattggcccatgctcggtttcattaaaatggtattgattcttcttttttgtcccccacattcaagcaatgattccttttttaaaaaggctgtttgacagccgtaggtgtggtaataccgcagcattacggaccttgtattataaagttagctaattgtttggtgatgaggttgaagcttgtgccatagaaatgacagccttaatgagcgggagctgaatggcatgatgccctttttgcccagtctgaatgggtggccatgaggtgcaaaattcgttcatctgtatgtcactaagtttgttatacttttctctgcttttaagtcattactattgctttagcacagttgtgctaaagtcgttcttttctctgaaactttatgaaaatagaaaacactatcttgcacatttttgtagactaatggcccaggattcagcaaatcctgcctagaaaagtttcttacaatgcagtagcattctgtacgtggtttgcctttcaagggtgtctcttcactggactgaagtggtgttgtagtattgttcatagtggctgagtcctggctgaggtggcagacatccagcttttggtgacctcaggccagtacatcagagtgggaagaacacactgacttcctacaactttgggtgtttatccaagcccctctaccagcatcttttcttatctcaggaacagccccttcacagaagttttcctgaaggtgtagggacctgcatgagagaaatggctgaagagaagcccactcccactaatcccagacatttgcccagtttccatcattggcttaaacatgtaattattattaacacttgagttattcagatttgtgcatactgtgtcatgctggtagctgtaatagaaaggacagttaggcttttaatagggaagcaccataaggaattcagagaaaaatcagaatttttagaataattcttatttgccctgaacggatgggctaagtgtcaagaactatgaggattttttattttccagtgccttccttccttattagaggtttaaatttgctccggggaagcaaacatcaaccctttgattacatattatagcccccctgggttccatattcttgtcatttttgaacaaggatttcatcaaattcttgcatttgagcttcattacttagtcaccaaatgctgtgtttttaaaaaattcattttaagcctgagaacagtgctgtgagctttgttagagataaggcatgagaaagacaagatgaaatacttaattagccaattaaggaatgagggaaaacaaacacgaaagctttggtagggaggaggttcaagttaatgttaaaatacgcttttggatctccccttacggatttaaattgatttaatttacgcttcctctgtatgcatcccatggagggcttattgagtggtccaaggggtatgtgtggcaaattctgtagcttttcctggctgtcagtgtgctggagcaggcggtccaggtttgggagtttgaaatatagctaggttggaattctagcgctgccattttttagctgtgtgatgttggatggacgtcatagcccttctgagcctcagtttcttcatctgcaaaatggatctggtaacatttggcctctcaggatatgtatggagaattcagtgtcatgctgtataacagtacctcacacagaataggtcaaggatggctatttatatgttcaaggacttgtatgtggccatgaatgtgctctttgtgtgtgatttttttcagcagcctgaattcacatgtgtgtcaacatacacataaagctttgtttttgacttttttttttttttcagtctattggctcaaaataaacatgttggctggcagctgccatgtggctcctcctacaagaggaaattgagaggtgggggaccaggcagtagagaagtttgaggagggaaagccactgagagattagaagggcagagaacaagatccttttccttgtatacttcttactgtaatgatggtccagtgttttatataaggatccttgtatttctaatgttgaaatctagttgattaaagaatgttaggataactctgtctgcctttaactagagtacaaaagctagctgctgtatctttgcagccttgatttccctttttgaagcccaaatataaacagtaaactgcaacacttctagtgtaatgccagccactggttatttgaactttaatgttgtctttcatctgagaagcctagagtatttgacaaacgttaaatcatagatcttcgtatcaacctcaaagcggaagggaatgttagaaggaatgaacaatgttagaacaatgttagaaaaaagggcaggtatgcagcgtgtgttcttgaaacaggatggcaaagaattggttaaatcttttctgcaggattgcgtgcagggctggagatcatatgaaggtatcctacccctttggggaatcggggagagagcccaggaaaatgcaggcctgacctggacttttgtaataggaggggagaggaaatgtatcttgcccagaccagcagtgcctttgccatatattgcatgcatgctgattatgaaaataaataatcttataattatttataattctgaattaaaggatatgatgcaatgcttgtggatgaaggacacagagtagctgtgtaaaaggtaatagtgactaagtgcctttttgtgtgataagggtagttctggctctaggttgggttataaatgacatattaacattgttttactttcctttcctttttcctgttggttctgtgtttcttgacttttcttcccccctcaagcttttgtttgattttcttcaggatccttgcaattggaaaaaacatttcatagccattcttagatcaaccttacatgtaaaatttgatatgtagttgatttagcttagtttccttaggggctaaattaggcccaggtcaagagtttcatcttgagcctcgtcaattagtttgaccccgaggactactgcatatccagagagccgtaaccctagctggccatcccgtaaatgctttatgttggtcaatagggaggagtctggtgagaaaatgagaaagggatcctttggtgatgtagcatcgtctctaagtagaaaaatatcctcttcacgtttagattgtttgagattttagtgctgaactgtattcctaagttaggaagccataccatgtgggccactgacttgatctactttgccttacaagttttgcgttcacagggaaaaattactcacagttgaaaattagccacagttcctaatgcatattttcgtatgaaatgtgtactttatttctacttaatttccttgtgtctttggaaattcacctctgggggttaatttgttcacactacattcctcaagtaattggggcattagccaaggcagtagattgtcaacctccagtgagcatcacctgcagggcttcttaaacaaaggttgccgttccccatgcctacctcggtttctggattcagcacgtttaaggtaggcctgagaatttccatttccaaagagctcctgggtgatgctcttggtcctgaccaactgcattttgagaagcactgagctaagaagtcttgcttggttcacccacccctgttcctcaggcttggtatggtggtcactttttcactgcaccagtttgaatgattccattcctggttgctttagagctgcagagaggcttggttaatggcctcgtatccctagccaggttcatgtaaagcactaattagatgtttccatgttgctggatctccttggctatcgtctccagtccagacctctctgcttgctaccaaacagttgggtttatctggtgcttagatccatctgagtgtctgctatacatgccacatcctacctgtcccaacttgaactctccagtttcttgtcacaaaatgtgctgcttccaaattacctatctcagtgacattgctatctattgagttagctgctcaagccaggcatttggagttttcttcaacctgtcattcttagcaccctcaatccctttctcaaaccccagtaacaaatcccatcagtcattaggtcccttcgagtttgagtctgtaaaagtattttccatttgctcctttccctccatccttactggcctcttgagattgttccaagagcattgctgtggtttgaatgtcccctccaaaactcatggtaaaatttgattgccattgtaaacagtgttaaaaggtgggacctttacgaggtgattaggaggagccttcatgaagggattaatgtcagatttgttatctcaagagtagattgtgataaagggagtctggcccctggtacctttctccatgttctgtgcttgcctctaccttccacctttgcaccataggatgaccctggccaaataccagcaccatgcttttggacttttccagcctccagaactgtgagccaaataaacttctgctctttataaattacctaatctgtgatattctgttatagcagcagaaaattatttttactctttcagcgctgcagaaagggtttttgatctcaaatttttgaagattttacttttttgagtactatttaattgtttttccccttatgatatggattcctatcttctcatacccatctgctgctctttctctctatctgtgctagcgcccctaacacttagtggtgtttaattctcttctcctttgttacattcagacccagagtggtcttaccccttcctgcctgcttaacctctttgtggtcaactaaggctccaccttcactctgctcctccccactgaagccttcctttcctttcctttcttttctctttctcacctccccttccctcctcttttttctctctcacctcctcttccctcctcttttttctctcttacctcctcttccctcctcttttttctctctgtctctttcttctgttcccttcttttttttctttctcgttttgagatggagtctcgctctgtcttccaggctggagtgcagtggtgctatctcggctcactgcaacctccacctcccaggttcaagcgattctcctacctcagcctcctgagtagctgggattacaggcatacagccaccacacctggctaatttttaaatttttagtagagatggggttttgctgtgttggccaggctggtctcgaactcctgacctcaggtgatcctcccaccttggcctcccaaagggttgggattacaggcgtgagccactgagcccagcctttcttttctttctcgttcttttcttttccttctttctttgacagggttttaccctgtcaccaaggctggagtgcagtggggtgatcatggcttactgtaccttgacctcctggatttaagtgatcctcctacctcagcctctcaagtagctgggaccacaggtgccagccaccttgcctggctaatttttaaaaaatttttgtacagatggagtctccctatgttcaaacccaggctggtcctgaactcctgggctcaagcgatcctcctactttggcttcccaaagtattgggattccaggcgtgggcccctgtgcccagcccattcttttctttatagtcccatagcactttgaaattaccagcattagtaagtttaccatattatgcttgtttaccttcctatctcctctactaagttacaagcctctctggtagggatcttattcagttcatcttaggtggaggttgggtagccatagccatgatgacgatgatgttgccattttgcagataatgaattggagttgattattttttaaaagtgtggccgggcgcagtggctcacgcctgtaatcccaggattttgggaggctgaggcaaggggataatgaggtcaagagatcgagaccatcctggccaacatagtaataacccccgtctctactaaaagtacaaaaattagctgggcatggtggcgtgcacctgtagtcccagctactcaggagaatcacttgaacccaggaggcggaggttgcagtgagctgagatggcaccactgcacaccagcctgggagacagagcgagactccatctaaaaaaaaaaaacgtgttatagaatcagtgaatgaatgcatttctgaaatgctgacctgagggataagagctcagcctagtttgtgatttattatttattctttgataaataattactatgctctgggaaaattacatcttgttaatgactatatgtaatttttaaaaattaaacagatatcagtatgtattatacatatcttattatctttgttcatttgaggagacaaattccatttttaagctattttctgaagttactcatactatggttcttaatattttgctatacttggatacttaaaaaacatggtaatttttcctctcattttcaagtctaggaaatgttgtagatcatgggagaataaatatcactgaagggttaggaaggaggaacatctcagggttaagatataaacctttcaggtttggatttaccgattagaatatgcttagtttccgtcctatgcattattgtcttttgtatcatatagaaaagagaaaaaggcagaataccccattattcaaactcaaagttactagtttttacagtgagagaaagttggagagaccctatgacaccatgtcaaggcagatttgccagctcacgcatatccaagacagcctgttctacttatggaactataataagcagcagtgatatcattgatattcccccccaaatcacaagcttggctctcaccgttattttagctcctaagtcaacgggattaaggcagatttcatggtcatgaaagtgaatttgtcatgaattacgtatatacttcagcttgatgtttaaggttctccacaaatgattcccacgtgggcgtctgatttcttcagatttatgtcccactattcctcagggttatgccaaactgcaggtgtttcctgaacaggcccagtcattttccacctaatgttgtgctgtttccttgcctaaaaatcctaacactcatcattgcctatcaaaaccatccctccaagccctccttcaataccactttctctgggcagccttccctaatctctctctgggtcaggccctcttgccattctggccttggcattgacctcactgtgccctgtgtcctggttaacctacctcaccccctcactggcctgtcagctgcctgggaactgccactgcttcactcccccatgtccctgcctgtaactgtccatgcaggtctgccttccccttgcccaagaatgccctgtgaggctgaggctgcccccccgcgtcattatgacagacacctgttgtggcaccactttgtgtatgctgtcccctctcttggtgcgggcaccagtctcccttctatgctagagtcttttctaaggtatgtctgatattttcgctctcctgcttaaaatctttcttgccaccatatattgtttacacatatacacaggcacacacatacacattttctttatacctttactacatatatacatgcatactatatgtgtgtgtacatataacatacatactatatgtgtgtgtacatataacatacatacatatatatgtgtgtgtgtgtagtaaaagtataaggaaataccagaaggataaacacaaaagacagggtatggtgagcaggggtggaggtgaggacagacatgtgatactgttttgtttcctaagctgagtgatggaaacgtgtgtttattacattctcccttctaaaatatttcatttaaaaactgcttatgattaaagtacacactctctagcagagcactcaaggctctgcacagctcttttttaaaaatgtaaacagaaagtctcatttatttttgtctgaagcacacaggagctcactcagcacaatacaataagcgaatcatacaaatattgagaaaaaatattcccatgaatacatatgtatatattcttaagagcagcaatcaggagtttaacaacaatgtaaagtggttttctctaaataatgctttctgatgggcttttgggtaggaaatggacaggtaaatcaccatcacgtaacagatgagctaagaataacatctgttacccaagtcactggaaccctgtggcctgcgaaagccctcttggagtttacatttaattccgtcattggcctggttgacttccacatttcactaaatttggacaagatcaagaaactaacccctcaactctcaatctctcatactcagggatgtgggagggaagggcaggtgagatcaggtgtgaacacagtcagggctctgcatagctcttgatcacacctaacttcctagccttgtctggcctctcccctaaacatctcttggctccctgtgaaccttctccaaacatttctcagggttgaaaccttgttgctttgacttatgctgttattgttactttctgcccccactgcaattcttttttacatctgatcacataatctctttctgattctttaatgtgtatatgatttttatgtcctttttggaggttttatctgatgttccctttttattattagggataataatatccctaataatagttatattatcattgccatcttctctgccttcctataatactgtactgtttgcttattttcacacctttggagacatattttgtaatttatttatacttgggtttatggcatctgatgcagagtacatgttcaataaatgtttagggaattgatgagtaatagatgtaagagaaatgtttctaattgaagtaatttttttaagagtgtgtccaaaaaaacttcaaaacaaattgaaaggaatatttcttgggttcaatatctgaaattttgtttgtaaatctaatggatttacacatggatttcctagctctaacccatgatttgtattagatactcttcttctgcttttcccatttgctttatggtggtggattttttttttaaataaataaatagctgttcacgctcctcgtcctttcttttcccccatcaccatggagtagcttcatggttgctgtagtagtatctgtggacgtgtgtgagtcccagttgggaagtagctctaggctgtgaagtggtaccacttgtacagagtgatttctgccatcagcgctgcttgctctggggtggagaagtgacacctccatttagaggagaagctgcagtttatttttgtggcagatgtgtcccactgaagagctgtaataaccataataaaggaggattatgccgtattaggtttatgaagggtgcaccagtctgtttctagggtcagtggtgacagctcaagccagcaattaggtttcatttaagactccaggaggcaattagcattcccttctgcccaggaaatactgtgatctattaggcctattcttttgcattatacattttgtaaaatgtgctttaaatgatgaaggtacacattttttgacacataagcaagtcttcaatttatcatttgaaaaatggggctgacttttagactccctgtgtgtttaaatccgtgggttataatgactaacatcctgggtggattgtgctttttaaatcagtacatttttaaaagatcatatatattcttttattcaaaggtaaggaatttcttatggaatattatataattatgtgatttatgaggggaaaaatgggactgatgtgaaacaaattaaaactccaaaataatgaaatgacatctaccagtcttaattatattctttagaaaattattgttttacctaagaagtgtctaaaaataaaggctggggaggatgatttgtgcagtgcttctgctgagcagctgtttggttgttcctaaaatgaggcacgttttctgagtgccaggttaggtatgagtgtgtactttgtgccccttcatccttatgaatgtgtttaggaattttagctttgcccgtgaatatgcactaatatttagtagttattcaaactgctttcctccctcctcctctcttccctcctccctcttctttattgcctttctcactcctccctcctccttcttcccttccttcctttggaataaattagctcaaataatagtaaattattcctttggaataaattagtttggaggattctgatagattaattaccgtatatgtattcaacattaatatctttttgggtatgataaaagagaatgcacagtgagcagcacatcaggccagaagtgcaaagaccacctatttccatggggcaattaggctatctccttattgtttggttcttggtttacatttttttctcatttgtagatgataaaactataatagtgactgagctcagtactttgaaatctgtgtgtgttgacattaaaggctctgagaagtcttgcagtaaatgaaaatgtttcaaagctaaattcattttagtaagaatcttttaaaaaaaatctatgttatggaacacctgtaatatggaagggcactaatagtaaatggaatacctaccagagaaatcttggtttagaagttacctggatagagaagacatgtttgtggtctttaagaaactcaacatctaatttagaccatgtagtggcttggatcgttaaaatgattaaacatttaaagtcatcattagcagaccagaactaactttaattttttaaatagctagacttttgtgttttgtagcacataacaagagcaaattcaaagcaaaatatcaggaattattcacaaaatcaattttcaagaaaagtttaaagagcagtaggcatttagtttaatgtctttatagtacattgaagagtaacgttcagtttaaatttgagacactgagaatctcatccttcaaagaaaaattcagatatatccatttggcttatggaggctagaaaatgtggttaatattaatatatacagtacggaaaaatctttgttctgcaaattctggccttctgccctctgtctcccccacttacttagttagaatactgccaagaagcaagcaagcaagcaggctggggagttgtaagccactgagagctttagaaatgccattgcaattattttattaatagctgcctctgttcaaattgttttgtgtaattgggcacgtaacaggcattgtgaatataaataatatgaacagcttttctccaccatggcctctttacttatgtcaagctaatttgctcagtattctcttcatcggttttccccactcctatctttggccttttatacagcagagctttatgtatagaaaccccctttctgctataacctttaaacttgtaacaacattatgaaggagatgttatttttatctatagtttatccttgagaaatgtgagaattaaagaagttatttgctcagctctcacagctagtaagtggagtaagtggcatgtgaacccgttctctctgattccacagcccaagttcttaaccaccacgttaggctcagaagtctgtgtaggtcaagtacatgtgttccttcctccttccattcattctttccttttgtctatccaccagcttgtttaataaatgcattttgatgttttcgaaagtggagatgtttttctgtggtcataatcttgaaaagaatcagcaactaataacgtagcctttagccccatgtggctgtttagcatttgaaatgtggctagtctgagttgggatattgctgtcagtgtcaaatacacatgggaccttgaagacttgttatcaaaaaaaagtaaaatatctcataattttttatttattatatgttgacataatattttgtgtatattgagataaatctgttgtcaaaattaatttcacctgtcttgatttacttttgtatgtgactacaagggaatcaacaattacataggtggcttgcatttatggatcacattatatttcttttggacagcaccgtcatagatggttatcaaactactcttaggagccctagttcttcagtgatgcctaagaggactgaaggaaaagtagttagagacagaaagtaaaagtagttataggtgatggtaaaatgtaagcctgatgacaccttagatgaccagcagagagagactgatattaattggcctttagttagtatagtacttaccgtgtgcaagtgctttgtccagtggattatctttcttgatccttacggcaaccctgtgaagtaagcactatctttggcctattgtagatgagacaactcgggcttagaaaggctaagtaacttgcacaagatcctacagctggtaaataaatactggtttactatgtaacatcatggcatgcaaatactagtgaatgatggagcctagtgtcaaatctgggcatgaatccagagcttgtgcttgtatccactcttcatcaccacttctcaaaggcaaaaaggaaaacgttacctagacctgatctgcagcagcccttctgctcattagtatctaccgggggtacccattattttccctagcagtgaaaggtatcatctttaaactagggaatatagtaaaaaccattgatgttccaggaatgagctcaagttatcaggaaatgataaaaatcaaactggatgtgcttcgtttactaactcaaggttgtcctaattagaaagatatttaaaataaattgtttttagaaacttgaagcataccagattcttttgtaactgagagacgtgggtatatttcatagcaagtacagattttgtaaatacaaatattagacattttttctctcagtgtaccaacatgtttaaaaaattggtataaacttagccacaaacctatgaccagctatttaaaaattttttgatgttttttataggttggcgcaaaagtaatcacagtttttgctattaaaagtaatggcaaaacccacaattactttgacatcaacctaatagttaatgttcatgtgtagacataatttcatacttgtaattttatatactccttcataatctatacataatttctgtatttttttatttttttgagacaagatcttgagatcttcctacctcagcctcctgagtagctaggaatacaggcatgtggtaccatgcccagctaattttttatttttttgtagagacagggtatcactaggttacgcaagctggtctcgaactcttgggctcaagtgatcctcccgcctcagcttcccaaagtgctgggattataggtgtgagccaccatgcccagctaacttgtagtcttaataactaatatttgtagtatctttacaattgatatactataaatcctcttaatattttttaaaaaactaattaattttttaaagacaaggtcttgctctgttgcccaggctggagtgcagtggtgtgattatagctcactgcaaccttgaattcctgggctcaagcaatccttccacctcagcctcctaagtagctaagaccataggtgtatgccaacatcctgtgccaaatttttttatttttcatagttatgggtttcatcatgttgcccaggctggtctcgaactcctggccccaagttatctcccccacccccaccccaccccggccttggccttccaaaattctgggattataggtgtgagctactgtacctggcctttttttgttgttgttattattgaaagcatgcacattttacatttcttgctatcgcatagaagatgatagtgaaaatgattcacattaatactttttttgctgttgaatttattttaggattaattatgagtgagattgatatagtgaacatttttgtgattcttgaatcatacagatgcaatggaatttctaatgtaggtcataaagataaattcagtggtaacacagctttaccctcatataggtgagggtctttgagatcttgctttcacacaatgtttgatgacaaggaagtggattatctcagcaaatccttttttttttttttgagatggagtcttgctctgttgcccagactggagtgcaatggcatgatcttggctcactgcaacctccgcttcccaggttcaagcaattctcctgcctcaacctcctaagtagctgggattaccggcatgcgccaccaggcccggctaatttttgtattttttagtagagatggggtttcactatattggccaggctggtctccaatttctgacatcaggtgatctgccctcctcagcctcccaaagttctgggattacaggtgtgagccaccatgcccagcccagcaaacactttcttctaactcttgcttttgtctgttttttacagttgccttctttataatctgacaaaagaattgttgaaccctaaatcgtacatgtgaaaggttgaataataacctttgcactagatttacttttgccataagtgttcactaatctttatgtcattgaagcagacaaagcgtgttggatagaaatatttctgttatgaatatggtatgtacagaattgttgaaaaatatatttataaagaggtagcatctaaatgagaatgaaaagatgtggcgatatagatgtaggtgcagatgaagtataaacagatacttcattgacaaaaataattataaatgattatatcattttcaattaatttctggtactcattggcttgccttatatcgatatcttttgtgtctacctattttttatttactttttcatgaccttttttcaaatatatgtttgctatatccgctactatataacttgtcatgttttgatgagaagttattgtcatcaaagagtggtagtgtaatgagaagcatgtaacgtcattgaaagctgttgtgcgaggggatggtgaataggttgtctcttcacatcccattggccaaagtatatcacatgaccaagccaagactcactgggttgaggacttccactcatcccacatgattcccaggcaagtcacagggaactggatgggatatcttataggaagggagcaaagattcgggatcaataattccgtcttttatttatttatttatttatttatttatttatttatttattgagaaggagtcttgctttgttgcccaggctggagtgcagtggcgcggtcttggctcactgcaagctccgcctcccacattcacgccattctcctgcctcagccacccaagtagctgggaccacaggcacccaccaccatgcccggctagttttttgtatttttagtagagacggggtttcaccgtgttagccaggatggtctcgatctcctgacctcgtgatccgcccgcctcggcctcccaaagtgctgggattacaggcttgagccaccgcgcccggccaataacgtcttttattataccacgattggttatttaaccattctcttgtggcttgatactcagattttccccaattttaactattacaaaaagtatcactataaacatagatgaacaaattacatttattttacttggagagttcttcattagggtttagtttccaaggtaggttctgtgggttagaggcaagaattgcttgtagatcttgttacatatggccagattgctccctggaaaaactatcagcttatagcagcatcatcaatctttaagtttacaactttcctcacatcctgctagtgctgggttttgaaattttcattttgttgatttcataattgcttaccatttaatttttgtaattacgaatgatggtatttaaaaaatatttagaactaattctattgttattgatctattacattgagtaaaacaagagccacttataattttcttaccttgttttgaaagtcattaaaaaatacaaaaacacaactcattttcatcctccttgttttcttggccccatatttttctcagtatactacttttttttttctttttctctctcttttttttttttttgttttttgagacggagtctcactctgtcgcccaggctggagtgcagtgggacaatctcggctcactgcaagctccgcctcccgggttcacgccattctcccgcctcagtctccagattatttgggactacaggcgcccgccaccacgcccggctaattttttgtttttgtatttttagtagagatggggtttcaccgtgttagccaggatggtcttgatttcctgacctcgtgatctgcccgcctcggcctcccaaagtgctgggattacaggcgtgagccaccgcacccagcctttttttttttttttatttaaaccgctgaactttttattggcctcctgctccccaaagggtaccctgcttctgctggcttaatgtctcagaactttagtgtcgttggactgagacaccactttgccactcactttgcggcaggtggtggtcttttgaatggtttgcgtggagttgctgctgtccatcaccaagattgaagattgaagtcctcaccgtcttccagcaggcagcggtaggtggtgaccctagcctccagcttggccttgatgttcagcagggcctcgcactcctgggcttggtgttgcgcctcttcctgggtctgggccagccctgacgccaggtgcagcaggatctcgttgagctgctccatctgcagggtgtagcggacctccacctccctcaggctgttctccaagctggccttcagatttttcatggagtccaggtcgatctccaaggactggaccgtacgtcccagctccgtgagtgtcatctcagcagctccaacctgggcggactgggtggtgaccactgtggtgctctcctcagtccgctcagaccagcacttgtccagctcctctcggttcttccgagccagcttgtcatattgggcccagatgtctgccatgatcgtggcgaggtcctgagatttgggggcatcaacctccatggtcaacccagagctggcaatctgggcttgtaggccttttagttcatctttgtggttcttcatgaagagcagctcctccttgagagcctcgatctctgtctccagctgtggccaagtgacattggtgtcatcagtgaccttgcagagcccgtaatgctgctctccacagactggcgcctgagagtctgtctcatacttgactctaaagtcatcagcagcaagatgggcattgtcagtctgcagaacgatgcaggcattgtccacagtatttgctaagatctgagccctcaggtcctcgatgatcttgaagtaatggcccccagtctctgacctggggtcccttcttctccaggtgctcccagattttgctctccagcctccagttctcgatctccaggctcctcagtctgtccaggtaggaggccaggtggtctttcaggctttgcatggtctccttctcgttctggatgcctcctattcctgccaggcccccagccatccctgcggccaggccccgggaccccaagccatcccagaagctggtgtagcaggacacggagatctggaaaccagagcccctggcacgtgcataggctctggccacgctgttgaccagctgggcggctggacagagcccagggaccagtaattggtggagaagttggagcaagtggtgaaactcatgctgtctggggaggagaacgagaggacaggacccaggctttgccaacgacctcagtatactactacttcaatacatatttattctgacattaaaataagacagtgaaaaagtaaaaacaaaacatacttgatacaaggttttataacttttatctcaatcaaatcatagtaattatcactacagaattgaacaagtggtcaaacctgctcagattgctgagttttgtttcatattttaaagtcttaggagggaatttatttattgccctgttgcctaatattggatggctttaattccatggttttcagaattgcctattgccatatggtttacatacaaaataccacctgaaacataagaacgggtctttcctacggctttccccccacaaactgtaaatgaaaactttttattactgactgtatcctctcatttggtttaacttacaagtgtcatgttgcctgctgttacacttgtctttggcgtctgctcagaaataatggtgtctagacagacccataaatatcctgggttatagttcctcatttaaggctctgagacttcacagcaggggcaagaagacttgcagggcagatacgagaaatcttcaggccacttaattcagagtccattggcagaataggcagagaatgtgtgtgtgtgtgtgtgtgtgtgtgtgtgtgtgtgtgtgtgttaggctgggttgtagagatgggttttggaaatgatagttgggtcttgaaactactattggagtgcaaatgcctcctccctcatttggcggagaaacgtcaaaaatcctcagaacggaagaatccattctctttattttgggacacagcctggtaaaacttgtaagaaattatgacagctctgtgggaagcaagtgcaagtgtgggagaagcaagttgatgtgtgaagcagacatcagtgtgtgaaccagagtttatttgaacagtagtagttgctggtggcagaatgttaaaaatgtgagtattaagagtattaatgatgtgactattaagacttggattagtgttgaagaaatgtgaacttgaatagatttgctatgaaagtcttcggattttttttcctgtaatggattttatttcaatttcagttcactttatatgagtctccctggaattcattgcaaatttcttttgaaaggtaaggacccgtttgtttatgaagttttgattttttaggaggtaaatatttgaggcaaagttggtactgaggttcagagtaaatgggaatgaggatgttttatattaatatagaagttaagtaattacagagaaaagcttttaaaaattagtgcagtaaaatagggtgcttgtttatattgaattgttagatatcttggctgaatttataaaaagaaggttactactgaactcttaaaaggttatcgtactcgtcgtaaatattttcgtaaactgctaatagttttgacaacaaaaggagtgcttatctttggaatatattctccttcactgaattatttattttggaagagttgaggctaagggtgtaaaatatattatagagccaggcatcatggtgcacgcctgtgattccagcacttagggaggtcagtgtgggtggattgcttgagcccaggagttcgagaccagcctgggcaacatggtgaaaccccgtctctacaaaaaatacaaaaagtagccaggcatggtggtgcacccctgtagtcccagcttctttggagactgaggtgggaggattgcttgagccttggaggcagaggttgctataagctgagatcctaccactgatgcacaccagcctgggtgaccgaaggagaccctgtctcaaaaaaaaaaaaaaaaaaagaaaagaaaagaaaaaagaaagtattatagatttttagagctttttggttaggggttgatcacttatgggaccccacactgtgttgccctcaaagagttactgttaccatgttcactccctaatactttctccttgcattttccttccattccttttttcttccctcctagcctgaatgttggcctactagtgaaatctgcttatggcctaacctgatgggtaattaacagacaatatgttgtagttgttgacctaagaaggcctgagactattagtctgttttaacatacctgcatctatgaggtatctgtagtcagctctgtttttcttaagtagaggtttatccattaccaacagtgaatgttcaatgcaaggaatagctttttaaaacatatggcaaatttgtggttctttagaatccattgtcatatagtggttaatatatatatatatttttttgagacacactctttcgcccaggctagagtgcagtggtgccacttcggctcactgcaacctccacctcccaggttcaagcgattctcatgcttcagccttccaagtagttgagactacaggcatgtgccaccatgcccggctaatttttatattcttagtagagatggggttttgccatgttggccaggctggtctcaaactcctggcgtcaagtgatctgcctgcctcagtctcccaaagtgctgggactacaggcatgagccaccgtccccagcacatgtttgttgatgtccacaagttgttagaggttgtttataaggaggatggtagccaaaactgttaatttctcccatgtctctgtagaaggaaaacctgtgcagcacgctctattttgctagtgtactcagttgtcaaatagatagccaacttgtgtgtgaccaatcgtcttttctccttcactctgctgctttgaagaccttggtctctgaaacacatacttttggtcaggtatctatgaccatagagattaggacccatcttcttgactttttttggcagagagacagtgtctcactctgtcatgcccaggctagagtatagtggtgtgatcacagttcactgcagcctcaaactcctgggcttaagtgatcctcccacctcagcttcctgtgtatctggggctacagacatgcgccaccacacacagctaaattttttaattttaatttttattttttggtagagatgaagatcttgctatatccccaggctggtctcaaactcctggcttcaagtaattttcccaccttggcctcccaaagtcttagagctacaggtgtgagccaccatacccggccccatcttcttgacttacataggctgtgggtatcatcaagctaaagcccattttttaaaacaaccatacctcaattcttttttttttttttgagatggagtcttgctctgtcacccaggctggagtgcagtggcatgatctcggctcactgcaacctccacctcccagatttaagtgattcttgtgcctcagtctcctgagtagctgggattataggcatataccaccatgcctggctaatttttgtatttttagtagagatggagtttcaccatattggccaaactggtcttgaactcctgacctccagtgatccgcccacctcggcctctcaaagtgctggcattagaggcgtgagccactgcgcccagcccccatacctcagttcttaaagtatctcaagaatattaaaaccaattaccctaccactcaagtatatccactgtgtttttatatattatttctaaactttctattaattatataactgtaatcatgttatatatttagaataatagtcacatagagcaatatattgtgagaatactttttctgcttttcttcccatttatctttttagtcacacttttctctgttgccacatattcttaatatacttagaatgttaatggatgtatagctcattgagtagtatgttataattaacaatttccatttgttgactatttgggttatttccaggtgtttgtttggctactataaataaaataccattaacgtctttgtacatatagtgtctttttttctttccagttattcctttgggttgaattcccaggagtaggtttaatgcatgaaataaaataacatatacatttttatgttcttcgttgccaaaacttctcttccaaggattgcccagtttacatactgccagattttataatttgtaaggctgtatttagtcactgttttgttttatacatgaatattaaatatttattaagatatcgatgacttaaagttagagtgtcttattgcaatattgatccttggtaggtgctcagtaacttttgactttagagaggagtgactttagagagaagctgtcgagagaagtgcttatcagtgttactattttcaatattgtaaccattcttctttctgtgtatcttactgatgcttaaacattccttacagacttttagtaaaaaagctatgaagagaaaaacattttaaaaccaccagactgcatttggctgataggctgcaagttcagcttacctactttctctaccaccttacagatttttctacttcattgtgtttgactaggcatgtgttcctcagcatgcatttctgccttagtctgagatccagtccatgttttagccacatgaccgttcagaatcttggaagcaagaggaaacactgttatgtcaatagaagtttttggttaatagaaaggaatgctaaataggaaattattaaaaaatatataattaatttttagagaagactctgaaatagcagtggaattactgatgcatgcttcaagcctatcctcctttcattataatggttagggtgattaaatccctttattcagaatttttgaattctgaagtgatttccccagatactaggccttttgggttaagaatgagctgagtccccttgagaattagggcttcgcagtataaatttctaagttggcattggttactcctgatcgaatgcataagatcaagttctggaacagggagagcaaaagtatagacccaatatattctgtagaaacctctgcctgcacgcagacagaaacctacaaatgtcctttaccatctggtctaatgtgtatgtcttgaccggagctttcctctgcagaaggtgggggctttcctgccaaggctctgagatccgcaccttcttgccttatcaccttctgtttttttttttttcttttttggagatggagttttgctgttgttgcccaggctggagtgcaatgacgtgatcttggctcatcgcaacctctgtctcccgggttcaagtgattctcctgactcagcctccccagtagctgggattacaggcatgtgccaccatgcccagctaattttatatttttagtagagacagggtttctcaatattggtcaggctggtctcaaactaccaacctcaggtgatccccccgcgttggcctccgaaagtgctgggattacaggcgtgagccaccgcgcccggcccacctgctctctttaccacttcatgactttctttcctctcctctggttttctaatttttcctcttttctgtctcatcacttcttccacacatctcaaacctaaactaaacctggatttttcaaacactgataatcagaatgcctattcttctctgctgtgtttgggccagtcagtacttggatataatcttgggttcctttcattgctgtggttgtggtgatctaagaactgtttttttttctaccagagctacctctctttttctattttttttttcttttaaccatctggggaccttgagtccttacttaacagattctaagggtagtcagtctccttggagtgtatattttattggcaattgaatatattcaaatggcatttttcctttaattcctatctgacctttagaaaatcagatagtgacttttggaatggtatttgaattactgttggtatgtgtatactctgactccaaattaatgttagtcactttattgtctaaaaacgctacccaggcaccattagaagtgactctagcttggccgggcgtggtggctcacgcctgtaatcccagcactttgggaggtggaagcaggcggatcacctgaagtcaggagttcgagaccagcctggccaacatggtgaaaacccctgtctactaaaaatataaaaattagctgggcgtggtggtgtgcgcctgtaatcccagctacccaggaggctgaggcaggagaatcgctggaacccaggagacaggggctgcagcgagctgaaatcatgccactgcactccagcctgggtgacagcgcaagcctccgtcttaaaaaaaaaaaaaaaaaaaaagttgactttagcttgttccttgagagtcccttaggccatgtaagatgaaactactctgggcagatgtgtaacgggccaagtccattttgaatttttgcacctcctcctaccatcccccatcctcacccatgtggtctagtggaaagtgcacgcctgtggaatttcagaaacctgagtcccaagtcactaattagctattttggttttaggcaagttacttagccacccatgactcagtttctttgtctttgttgacttagttgatctagtagaatatgattcctaagcttcccagctgaacacctctgtacagattcatgaattctagaaaactttttgttttaactctgtggttgaatttgcggtcagagtgaaagaggaaacttctgtgctgtttactcttcagaagaaactagttgccaggtttgtttttgtccaggaaagattcaagtagcaaatttaaatagtaaatttaaacttttgttttgctgtgataagtcatgttatttgaatgatcttagcattcgcagctgacccttcccatgagaaatgggactataacgtatgcagtatacttgtttttacatttgtttacattacaattaattttgtttggatatattttcagaggttcaccaggtttgttgggatcattttagaaaagtgtcccgtcagaggttggaagtggttggggtaagaggtttagtagaatttagccgaagttttgctccactgtggaaaaagatacatattctgttgtacctccactgccctctgcaaaacattgccttctgtcacagtgctggcaccgacttctgaatcttcgcagagatttagtgctgattctgtgtagttctttaaagtgtttgtgggactgctatatgttacatatatacctccttggcctctcctgagctgtggtttgcttccttttgggaattgcaacatgatctccagggttttgggtttcctgacaccctccatggcagattcctttatagtgtacacttactacattaatttgttttgaaagtttcataacttattttgaaataatttgagacacttggggtgtttcaaattctgggctggaaatctctagagaacaggatgtgatagacaagagagagaagagaagattgggaggtgggtgaaggattttgaaataggaagccatagctgatatgttagagattgctggagaggagcatagtctgaaaaaataaatttcacaggagatatgttgtctttccattgatcctattatattttgaatccttctccactcgccccctcccgccttttttttaagagatagggtctctctttgttgtccaggctggaatgcagtggcacgatcatagcccactgcagccttgacctcctgggctcaagggatcctcttgcctcagccttccgaggagctgggactacaggtgtgcagcatcctgcctagctaatttttacatttttgttagagacagagtcttgtttttttgcccaggctggtcttgaactcctggactcaagcagtcctactgcctcagcctcccaagtagctgggattacaggcatgagccaccacgcccagccctcttcacttttactgccttgatacgtgcatactgtttcctcttctaggcccacttcatatagaagtagtttcaaaaacttgtaaatcagcttgcaatgaggaattgattttcttataagaaaatcgttctatagaacgatgtgaaaattggtgctttagttctcagctgtctggcaaaagccttcttgcctcttatgtagcatactatagaatctagtcagccagacgtggtggctcatgcctgtaatcccagcactttgggaggccgaggcaggtagatcacccgaggtgaggagtttgagaccagcctggccaacatggtgaaaccctgcctctactaaaaatacaaaaattagccaggcgtgttggtgcatgcctataatcctagctacttgggaggctgaggcaggagaatcacttgaacccaggaggcagaggttgcagagagccgagattgtaccactgcactccagcctgggtgacagagcaagactctatctcaaaaaaaaaaaaaaaaagaatctgattactctcaaatactatttcagtgcaaaaatagattcccagccccagtgttcagtgacaggaactcaaggatcctggtcagccaccgcaggaggaggagggactccaggccttgtgttggtggccagtactcctggggccagcagcccagatacctccggaagtggggtcactgaaactgcactcagggcccctagttgtcaaatctgtggttgcttaacaagggggtatgttctgagaattgacttattaggcaatttagtcgttgagcaaacattatagaatatatttacacaaacctagatggtagagcctactacacacctaggctagatggtgtagcctattgctcctaggctacagacctgtatagcatgttactgtactgaatactgtagacagttgtaacataatggtaagtatctgtgtatcgaaacatagagcacagtaaaaatatggtattataatcttctggggctactgtcgtgtatgtggtccgtcattaattgagatgtcatgtagtgcatgacagattgctctgggttcattcttggttaggaaggacttccagtaagaggtatataagaaaaatgggatgatatggggatatgtggggaagtggatgtgtttctgcgagagactgtgttgacctcgggatgccaggttcaagggcactgcctctataaagatggatctgacctgtccttgtagatcctatattgtgacaatgtaaggattgtccaaggatgaatagcacattaatctcccataaccttaggtgcctcactaagtatgattaagtcttaggagtgagaataattttcattattttggtctgtagtcagcttctgatcaccaccacaatttcaaaagatctcgatttagtgtttccctgcttctgaataggccgagtgactgccttctttctcctcagtcttatcttgccagcattttaaatgtaattgatatcacctgcaattttatgccgtcctaaacaaggagttgcccacattaagtcttttaaaacaccatggcatttattttcacaattggttgtcttttgtttataagtaaagcttttactgcttgcggtctttacttttgccctctggtggtcttcattttcacttttcttgtcctttatttaaaacggccttgaattggttaactgcacttctcagcaacctcctccacttaccaccatttggtgtaggctcaatgaatgttaactgttttttacgctggtttaaactgaatataattaggacagcgaatttgtttcagaacctgatggaaaacaggtattgcatatatatttagtggttacgttctgcgggcttggatgtttgtatcctgcttgttccttttctgaacacagatagttatttgagttgaattagctatttgttgactggccattttgcaagttactgtttttgaaaacaagatattaatttaatcaaagcttactttggtagtgattgtacctacttccaaacttgccgtaggtttccatattccattgaagctacttttgatccttaagatgctacatgactggtatgaaatctctcatagttgtggggaaaagatgatataagaagcttcaggctggacatagtggctcacacctgtaatctcagcactttgggaggctgagggggacagatcacttgaggccaggagttcaagatcagcctggccgacatggcgaaactgtctctactaaaaatacaaaaactagccgggtgtgacggtgcacacctctaattccagctactagggaggctgaggcaggagaactgcttgaacctgggaagtggaggttgcagtgagccgagatcgtgccactgcattccagcctgggcaacagagcaagactccatctcaaaaaaaaaaaaaaaaaagcttcagatttatattttgttgaagattaagtaaaaaaaaaaacaacaaaaatcttatgaaacatggttttaggtaccttctgacaaacaactgggggatgtgctgcatcagttctgcccatacttttcctaactgcgtattttcctacctttagttgtttttcttattgaagtcttctagttcttttgttcgtgtgtgtgtgtgtgtgtgggtgtgctttgagatggagcttcgctcttgttgcccaagctggaatgcagtggcgctatctcggctcactgcaacctccgcctccctggttcaggcggttctcctgtctcagcctcctgagtagctgggattacaggcacacgccaccacgcccacctaattttttgtattttttagtagaaatggggtttcaccatgttagccaggctggtttcaaactcctgacctcaggtgatccacccattttggtctcccaaagtgctgggattataggcgtgagccaccacgcctggccgttctttcttgtttctgtttatactgtcacatttagtatttatacatctttttctctcaaggaaggcatctgccgttttaattggatgattatatcagagggctcttttctatatcttagctagagcaggtatctgagaagtcctttttgccattaactaaggggccgtcaagtactttgtgaaaacagcatactcgtgtatgcatttatatgagaaatatttttataaagcgattaacatgccatgtgggccatggatctctcactgattcatgtgttttcaagaaaacatgtttttattttttaaattgcattgagcttcctttaaaaaaactgttatttctccaaagataaatttcattttctacttaggaaaacagatgactctttttccctcaaatgccttctgtgaaatgacatgtggagctgttaggcattgtgaatctgttttatttaccccagtgttacagaaagacggaaggcaattttagcttctttaaagagacactggcctggggtaaataacaatttagtccaggtgggtagaaaagaatgcttatgacattcttttcatcagctccatgtgtaacctccaagcaggaggtcaggcagtaaaacatttgagtgaactggtgaaatgttttgtatttatttacaaggcacttaaacacaagactgatcccaataaactcaacaagtcagagtgatggaggaaagtatatggtgcatgcagaacagtaaaagcggggactggaggggggcctgtagattgcatttagcctgctcctctcttcctaccgtggagagatgaccatcagtgcagtggttatgggtgagtttcatgaggaaggtaatgagcccctttctgttcccacctgctgctgaactacttgacattttcttttagattccaggcatcctgaagtatttaaattctgttttgctgaaaattcttcattctttttgtgtaactttcttgaatcaaaacttctgttccaccattcttagtgttgtatctgttatgctggagttgatgacttgattccattgcttaccacagtctaatttaaaacaaaagcattctaaaaccttctcagtttcgtcatttttattgttactatatatttattggtttagatgtagtttgtagagaatcaaaagaaaagaggacagtttctttggataagacgttcataaccttttctcctcaagaaagcctgccacatagtaagctctggggtcagtaagtcattgccggcttagctgttgttcattttctcattgcatctctaccaaatgatgggcagacagactgattcatacctgactgttctgcatatattctgcatatatatatatatatatattttttttttttttttttgagacagggtttttttctgtcactcaggctggagtgcagtggcatgatcatagcttactgtggcctcgaaccccgcgggctcaagggatcctcccacctcaccctcccaagtagctggtactataggcgctagccaccatgcccagctaattttttattttttgtagagacagaactttctttgttgcccaggtggttttgaactcctgggctaaagccgtccgccccccttggcctcccaaagtgctaggatgacaagcgtgagccacgacacccagcctgcttgcttatattttgaataaaagatttcatggggcgggagggttaaaactctttgtgaatattaataatccagattaatttgaaagaactttcatgtaatatgctactcaaaaaacagtatatgcaagcgattatctctatcacctagcagaaggctaggcaggattggtttaacaagtaaataagaataatttagtgttagcctgctatacaaataagagtgctttagtatctgaaactgtccctggaatgtatcaatgtatattaggaagttacttcagtatattatggaccagcaggcattattgagaactcactgtgttgcaagtttggggcagtaactctgaaaataaataaggtgcttctagttggagatgggggtgggggaacagactcaatcagatcatttttggagtggtgagggctttgatacaggaatgcaatgctgtataaaggtgcttccctcttgattgttgagttttgttttgttttgttttttgagacagtcttgctctgtcacccaggctggagtgcggtgtcatgatctcagctcactgcaacctccatctcccaggttcaagcaattctcctccctcagcctcccaagtagctgggattacaggtgcccaccaccatgcctggctgatttttgtatttttagtggaggtggggtttcaccatgttggccaggctggtcttgaactcctgacctcaggtgatctgcttgccttggactcccaaagtgctaggattacaggcatgagctgctgtgcctggcctgtttcgttttgttctttttaattaaaggcaatgatcaaattatctaggaaattagtttaaagccaacatacctaaaatataaaacagaacacaaggcagatattcttaggacattttcctcaaactaacatttatttatcttgctgcctgaacataaagacttttttttgggtagcgtagttacttaattttacctctttttttgtttcagtttagctgaatataactttatctaaaataaagtgaatagctgttgtatttagaagtagcacaaataatagggtaactgtaccccttccttgttctgtcccacttgcacccagccaacccatctgcccagtgggattttaaatggtttcagtccttgggctcaagagaacccagaggaagttcatttttgaagtctcatcctctctgtatgaataaattccttggtcattatctactgtttttcattctttgtgaaatagatcatctaccacagtggataatagaggataatactattcaagacaaaagcctatatttggaatagtttatgtaatgtaacatatttaatatgcttaatgaccttaatgaaatgaagatgtgaaaaataaactattgtcattctggggatatcatttatcagattctaaaagggctgtttctgaatctggttagggagtttcttttattagtagtggcgaatagagagtagtggtttggatatattggtgtcatattttagttgggtagaaatatctctgacatttttacatgatgtgttttcccatcttctccaaaacaataatttcatcctcgggaagagaaattcatcccatccatggtggattttcggatacagtacccagttcaatcttttgacaaacatttattgtttaccatgtgctaggtgaaataaatatggtagctcaggggttatgaaaagataccaacgcattgttccttctggggaggattttataagttttttatattttaagtaccttctttagaggtctttatattataagctttctatattttattttatttttagagattgagtctctctctgtcacccaggctggagtgcagtggcacaatcttggctcactgcaacccttgcctcccaggctcaagtgatactcccaccttagcctctagagtagctgggattacaggcatgtgccacgactcctggataatttttgtattttttatagagacacagtttcgctatgttggccaggctggtctcaaactcctgagctcaagcaatccacctgcctcagatcatggatataaagctttgtatagtctagagggactagggaagggtccctttccctccctactcctcctgcctcctgttatatttttctttccatgtcatctcagaagaaaggtaagtttcactttgctgatgtgttcctgcatattttcatttatggcctctggctagtgctatgattagatttttgggtatttcttactttatgttttttttttttttaatattatgctcattaaatttggtgagttgacctagcagtaccatctcaagcttctttagattcaatgtgcactttgtcttgagttaatcttaaccttggtggttagtgtgccaaggagacatacttgaaggcttttcccttctccatttaggatccttaagttttgatgcagtaattatttcagaaaggaagacatatcatgcattttgtcatacatacataaagtttgtttatgtggaaattttatagtacactgaccatgccttcacagaaatggaggtgaccatgtccttgaggcagaaggaggtagctgtgcagggctggcagttgccctgtaaaagatgtggacacgacattgtaaaggcttagaggtaggaccgattacatttgcctggatgacaggtgacagccttaggagcggaggagatagctgggcctggaaggttggataggacatatttggtgggaagatgagaaagaatttctccaggaggaaagagggaacatgaactgtgagagaggagagcaggtgccttaaagttcaaggcatagtccagaagccaggaggagtatgcctggtgcgtagcgtaggtggagtggggtggggtggggaacaggaattgctatcaagtggggatatgatagtagcaaaggaatgtgtgtgccttttctgtttgtaaagattagaatttccctaggtggaacacttagcacctgcctgcctctctgagtttttttttaatatcaaaattaattcagtgttttcaaacaaacattgcctttctatttcctttgaatctatacccaaggaaaataaatatttacagtcctggtaatactatgtattgctgcggtaagctgttagtagtaggtaacttcaaacaaactttaccaaccacattttgtgtttgttttgctctggtgctaatctggcaagaatgatgtccagcaggaaagtcaacatatcttaataaactgtctgcttttataggaatgctagctttctggcagatgtcatatcagcccagcatatgctgcacagtgatgactcttttaaatatatttcagtgggaacagcaatgtctctcactggtcactgccatccttgcaaaggatactctgaagggctgtgaattacttttcaattcatatatggtaccttggcctcttgcattgttggcactgaaaacaaaaccaaaacacacaaggcatcatagagaaattattcctaccccttcaatagtgtggcttcaactgtgaaaaaaggaagggtgaagacactgtagaagcaaaaatttgttttattttaatattgggctcatcagctatgcaggtgccaatacagagaaattttcttgagaacctggcagtggcagggttaatctagctcctctggggtgaggtggaggtgtacttcctgcttttatgttatcgaaagaggagtgcaggaaattatacctaggtattaagagctttgaaaagttgagtacaaagctctttatcagatatagcaggcctaactgagaatatcagcccaattgcagtttttccaggaaaattgtactttgccaaaggtaacttttccagggtcagtgaaatagcaagatatttctcaagagaaggaagtagaaaggaaaatcccttttatgggattaaaaattcagtaagtatcctgaactcagttttttttttcttttcttcacatttgagaatcatttgtttttatgctagcaatagagaatgctaagacgaaattcagaaaacaattcctgttgcaatagcactaaaaatgttgaaatatttagaaacaaatttctctaaggaggcacactgaaaaaccacaaaacgtcaatgacagaaatatcagatttaaataaatgaaaagatattccctacttatgaattggaagctgttattaacatgatagcactacacaaagcaatatatagattcagtgcaatctttactaaaaccctactggcttatttttttttcttaaatagagaagctgatcctaaaatatatatagaattacaatatacccttagtagtcaaacagtcttggaaaaaaataggaagactcacattttctaatttcaaaactcactacaaatctccaataaacaaaagagtgtggtgctggcaggaagatagacatattatcgttaaaaaaaaaataagtgcctagtggatagtggatacttttacatctaagagtattttttctcccaaatgctgaactcagtttttaaaaactccattaactaatgtgtaaatttttcattgtctttaatcactgaaataaggcttttttctacttacggagggatttctctcctgatttattgatagttgactggtcaaaaggcatggaaaagctgccattccctgggctctgttgccatttgatttatttagaagatgtaataggaggaagaatttctgttcttgctgttagtcctgctcggtcacggcagtggatgatggagagagatggatgcttgtttattgtcggctacaggaggggagctgccaggcgaccgaacaaagttctgcttagtatgtgacttgtaccgatgcctccagtgcctgctctggtccacatgctgggtttaggggctctcagattctctgctttgttcaattctctcaacagttcttatttcccttctaaagaggaaggactggagggcacactgcaagtctcttttgcagccttaaatgtgtggtgttgcacaaagtggtttgagctggggtcatggggtgaaggcttgtttggatgatggaggagttggcacacatcctcagtattattttcagtagtatggggactgcctgagtcagccccgcccgcctgcccgggagcacattaaaactcaggcaccagcaccatcgaggggggaccccaggctcagggaatcagactgtctagtagagagagtctgggaatctgttggcaatctgcacctttacaaattccctggtgccttttcagttgtaaaaccactggttcatactttcctatccatagaggactgctctaagtctatatggcaaatttggaaaatcttccctcaaatgctgcatctacgggatggtgggtgagtggcccagagcaattcttatgcatcagtaggacccatacatgcggcatgtcttaaaatcatagtcgtggcttcatgatatctttgtagagcgtttgagggctttcaagcactaggtttattgccttttaaaatagggtgttttatcctgtttgaggactacctcagactgttaattttgccccctgaggttatatgttgactctgcccgctgctctggaatttgtagcctgggagcatccagatggtaaaagaccccctggagttactgagtcaactttcaaaattatcctggatttaaaaaaagacaaggagagaaaaaaggaaaattgagggagggggaggaatggtacaagaaggggacctttcacaattgggcaggccctgaaattctgtccctattttaagtatttttcttgcaatcctgctgctgctgctgctggttctaatgatggtgatggtgaacaagagtaataacacagcaaccaaaaataataaaaatatcaggaatttaatgagaatcgacttttgccaagcactgtgctacccaccttgcacacattatctcatttaatctttatgacaacgctatgaaatagataccattattattgcccccattttaccgatcgagaaaccgagacagaaaaaatatagctcaactgacacagctagcagtagcagatgtgggattcgaactttgtgaaatctgacttggaagcccaggcacaagatggaatgcaggttaaaaatccaaatgcctatggggctaggcaggaagagtaaatgagtaaagcacacccgtagcacacagagagtggtgggactgtggccaagaagagaatgcttgccctgtcaatgagggtagtcagttaagtcctagataattgtgcctagactgaaattcaggccagtgctatcagattttttttttttgaagaactaatggaaatcagtatttttatgtgagatattttgatgtttaaatggtggcaacatgttcaaatttttaaagaacactgagccaaacaaacatcagattgtaagcggggtcttaaatctgttttgtttacttccacttgcacagcatctaaaacagtgcttggcacatagtaggtactaagtacatgcttgttgaacagatgattgaatgaatatttgtggactgcattacacttacaggcagccagtttccaactttcctactgcttcccccaactatcttttaggtttttctgctgcttcctatcccagaccagatcatttttcatttttcagctaagtatatagaccatgtgtacttcaaaggttacatccttctagtttgaattggtgtttggaccaggattcttggtggggattttaaaattgatttaaaaacttattttttggctgggtgcggtagctcatgcctgtaatctcagtattttgggaggctgaggcgggcagatcgcatgagtctaggagttcaagaccagcctggccaacgtggcaaaaacttgtctctacaaaaaaacacaaaaattaaccgggcatgatgatgtgcgcctgtggtcccagctacttgagaggttgaggtgggaggattgcttgagcctggagagagaggttgcagtgagccaagattgcattactgcactctagcctgggcaacagagcgagatgctgtctcaaaaaataatacgtatttttttagcatctaaaaacattgtagtgaaaaacacataaaattttttaagtgtgcaactcattagttgtgctgcaatctccagaaattttcatcttgcaaaactgaaactccacccattaaacaacacctctccattttctcctgccctcagcccctggtaacccccattctgctctgtttccatgaacttgactactttagatagttcatataaatggaatcatacagaatgtggctttttgtgactgactgattgtgtcagttgtacccaagggattttaattttattaaatttcctaagaagaaggagcatgccaaaccctatagggccacatggagaagcagcaggattggttaggaggcagaaggagtgaggggacagcctaggccaaacccttattttgttttccttaggaaaggtgaggtaggacagggtgagcagctaagactggcaagtttgagtaaatctggtaggctgtggggtacagcagtctggtgggtggccctgggtggatttaaggcaagatggaacactggcttttgataaaggagatggttgggggtgtgggcactgagttggtgagtttgcctgtggaagatgtgctggggcaggggcctcagaatttactagccctctaagaattgactagccctgggagatgcagcctttccccagtcagcaaggccacaaatctaagaccatcgagaaggcagaaaataatacaatgtagtttatagcaactggccctgtgatggatgccaaacagagaattatagaatctaaaaaaagacagaacacttaatccactcagcataatatcctcaaggttcatccatgttgtagcatgtatcaggatttccttccattgtatgtatagaccacaagttgtttatccaaccattcatgtgttgatggacacttgggttgcttccaccttttgcctgccatgaataatgctgctgtgacatgggtgtgcaaatatctcttcaagactctgttttaaattcttttgggtctatactcagaaagagaatccatagatcctaagggaattctgtttttaatttgttaaaggtactgctgaactgttttctgtagcagctgcaccattctgtattcccaccaacagtgcacaagagttccaatttttcccacatcctcgccaacacttgttattttcttttctttctatttttttttttttgataagggccatcctgtgaggtgatacctcattgtctcactgtggctttgatttctactgatgattagtgttgctaagcatctttcatgtgcttattagtgatgcttttgtattttacaatttggtagtctgtgtttttaaattgagtcacacaatttaagtgtgagttttgaagagttataaaaacgtattttttattagtaccttttgtagtacgggaaagtcttctcaaggtgattgcttttttgcacagagaggcaaaaggttatccattcagcctaacttcagaagctgttaaagaatcagcaactagcagtggcttatgccttgtaatcctagtgacttggaaagcaggaggatcacttgacaccaggagtttgagatcagcttgggcaacacagcgagatgtggttttaaaaataaaaaaaaaaaaccaaagacttagtttggcctggtggcatgtgtgcctgtagtcacggatactcaggagctgaggtgggagacttgcttgagcccagcagttcgaggctgcagtgagttgtgattgtgccactgcacttcagcctaggtgacagagcaagacctcatctcttaaaaaaaaaacaaaacaaaaaacaaattgataactatacctggggactctggcctctggctttaagccagatcttggaggacagatcattcattcacagaggacctactgtgtggtagccaaggcatagaactgcccagaccaagtccaaacatatggagatggtctctagctatgtgtccaaagtagagggattgccttacctcctgagagcacttctctatggaagctgattaaactttttggggtgagattgggagggcaaatcaggtgaaggagaagtagaactgagtgtgagtttttattcagaaagctgaaccatctgataatggcagagtttagtgtattcagaaaggattgaaaaactaaagtggacctataggaaaagtaaataagtgatctttgtatttcattgcaatgtcattacaggcatacaccattttattgcgtttcacaggtattgctgttttcttgtatagatggaaggtttgtgacaaccatgcattgagcaagtctgtttttccaacggcacgtgcttacttcaagtctctgtgtcacattttggcatttctcacaatatgtcagacgctttcattatcttgatatctgttaaagtgatctgtgatcagggatctttgatgttaatgttgtagttgttttggggtgtcacaaactgtgccacataagatggcaaactaaattgataaaagttgtgtgtgttttgactgttctatggcccagccactccctcccttatctctccctctcctcccgcctccctattccctgagacacaacaatattgaaattaggccaattaagaaccctacagttacctcagcaacatctagaaatgattaaatttagtgagggagacattgaaagccaagatagcctgaaagctacctgaaaggccccggtgtgtgatgttccccaccctgtgtccaagtgttcacattgttcaattcccacctacgagtgagaacatgtggtgtttggttttctgtccttgcaatagtttgctcagaatgatagtttccagcttcatccatgtccctacaaaggacgtgaactcatccttttttatggctgcatagtattccatggtgtatatgtgccacattttcttaatccagtctatcattgatggacatttgggttggttccaagtctttgctattgtgaatagtgctgcaataaacatacatgtgcatgtgtctttatagtagcatgatttataatcctcttgtgccagtttgctaagttgtgactgaaaggaaaagttcttgaaagaaataaaaattgccactccagtgaaccacatgaatgataacatgtgcaacagcaacagcaaaacagccttattgctaatagggagaaaaattgagtggtctggatagattgaaccaaccacaaactttccttaagccaaagcctaatcccgagctaagccctaactctcttcaattctgtgaagactgagagaggtgaggaagctgcagaagaaaagctggagctagcagaggttgactgatgaagtttaaggaaagaagctgtttccataacatgaaagtgcaagtttaagcagcaagtgctgatgtagaagctgcagcaagttatccagaagatctagctaagatcactgatgaaggtggctacactaaataacagattttcaatgtggatgaaacagccttttctagaaatttcatagctagggagaagtcagtgcctggcttcaaaacttcaagggacaggctgactttcttcttaggggctattgcagctgatgactttaagttgaagtaagtgctcattgatcattccccaaatcctagagtctttaagaattatgctaaatctactctacctgtgctctgtaaatggaacaacaaagcctggatgatagcacatctgttttcagcatggtttactgaatattttaagctcactgttgagacctacggctctaacaaaatttctttcaaaatgttattgctcattgacaatgcatcttgtcacccaagagttctgatggagatgtataagaagatgaacgttgctttcatgcttgttaacacagcatccattcagcaacccatggatcaaggagtaatttcgactttcaagtcttattatttaagaactacattttttaaggctatagctgccgtagatagtgtttcctgtgatggatctgggcagagtaaattgcaaacctggaatggatttaccattctcagtgccattaacaacattcccaattcacgagaggaggttaaaataataataacaggagtttggaagacattgattccaagtctcatgaatgattttgaggggttcaaactttagcagaggaagtaactgcagaggtggtggaaatagcaagagaactagaattagaagtggagcctgaatatgggactgaattgctgcggtctcatgataaaacttgaaaggatgagggttactttttatggatgagcaaaaaaagtggtttcctgagatggaatctactcctggtgatgatgctgtgaacattgttaaaacgacaagaaaggatttagaatataacatatacttagttgataaagcagtggcagagtgtgagaggattgactccaatttggaaagatactctactgtgggtaaaatgctgtcaaacagcattgggttctccagagaaatctttcatgaaaggaagagtcaactgatgtggcaaacttcattgtctttattttaagaaatggccatagccacccaacttccagcagccaccatgctgatcagcagccatcaacatcaaggcaagaccctccaccagcaaaaacattaggacttgctgaaggcttagatgatccttagccttttttagcaatacagtatttttttttttcttagagatagagtctcattatgttgcgcaggctggtgtgctgtgactattgacaggttcaatcatagctcactgcagcctggaacttctgggctcaatggatccttccgcctcagcctcctgagtagtggggactacaataaagcattttaaaattaaggtaacattggctttttagacatgatgcttttgcacactttatagactaatagtgtaaaacaaacataacttttatatgcactgggaaagcaaaaagtttgtgtgacttgctttattgtgagattcgttttatcgcagtggtatggagccaaacccacaatgtctccgagatatgcctgtaattgatattgactggaacaaaagaaagttgattacatcagtttggtgcaaacagtggtcatgtctactgtccccaaatcctagagaagaataaatttaactctgtgacagctgatttgtagtttcattgttaaaaggtgttctatatatgtcttgaaagtgttcttctaggatgagctatactgactcaggattaattataaaaaggtatatatgctgtgtcttgacttctgagatgtcctttactgatagagcatggatgcaggattaatcaaatctgtagccttagagacaggaggcattcctgcctttctggtttgcagacatggagggctgaaaaggatgggggtggggcatggtagtggagattgttagccagtgggttaatggttaatccctgcaacatgccagagatacacctaatctttgatgagacctactgctcagaatgaataatggttaaccattccttacctttgactaagaccatatacctttcatagtttgttttttaaagtatgtggaactgtgaagtttttttttcttttgcaaataacatttgcatatcacagaagttttatgactcattcttggtaaagaaagcaggtgatatccatgaatggtttgtcatcttttagagacgagtagaatgattgctatcgaattttcatttaacttaaacacagctgtgtagagacaatataaagtggtcctttcctcagtacaaaacatggaaaaaaaaaaaaacccgcgctcttgttagcagatgttagtgtgttatgctgcacatgccaccgagacattcttgtttatgaggaccagtcatctggactggaaaaagatttttgaaagaaaataaagggagcaaagaaaaattcgaggtctccctcccctcacaggggctgttttgtgctgggtgcagcgtcagttatgtgatggctgactccagggagagagccacctgtatccctggttaatgagcattggccacctggcagaaccccactaccacgaagatacagtttcacttttaccgtttgtcacatccaattaaaggttttggcattcttgcctacttaaaaaacattctgtaaacattagaaatagtttttatatttatttatttatttattttcttcttttagacacaggatctctatcttccaggttggagtgcagtggcaccatcacaacttactgcagccctgaactctgcaactcaggtggtccttccgtctcagcctcgggagtagctggaattataggcacatgccaccaacacccagctcatttaaaaaattttaaaaaaaaaaatttaagagacggggcctcctgtgttgcccaatctggtctcgaattcctgacctcgagcaatcctcccactgtggcctcccatagcattgaggttacagggtgtgagccaccgtgcctggccagtttttatatttaggaaaaaagctagcggaaattggctcttcccagttctgagaagtttttcgattaatgctattgatgattcctaacttgttatcagtcttagtttcctttccttagtaatcgaaggaattgtccttggcttcccttcttcatagtaatctcactgctgcctaagcagtggatgcatggttacgtggccagtgtctctctgtctctgtgtctgggcttaggtttaccctgagagagttcattgtaaatctgtgctgaactgactattcgctctgagttggaatattttctgcttattacaaactcgatttttttgagacaaagtctaactctgttgtccaggcaggagtccagtggcacaatcataacttactgcagcctcaaactcccagactcaagtgatcctcctgcctcagcctccccagtagctgggactacagacacatgccaccacctcggctaattttaaaaagttttgggagaggtgacgtcttgctgtgttgcctaggcatgtctcaaatttctgaattcaagcaatcctccagctttggcctctcaaagttttggggttacaggcgtgagacactgcacccagctgcaaactattaagaaaaagtaatgaaaggctgagctcttttctttgtagctaagcctcttgagaaagttctgaggctgctgcatctcccattccgtcctcagctccttacatcgcagctggcagctccaccactgtgtgggcactgaccaccccacccccccgaagggaccagccatctcctgttggccatggtgaatgtttttcagtccttatctgacctccctttggaattggacattgaccagatccttctccttgaagcgttaccatctcgggtagtcccctgctcgagatgtttctcctgcttccctgggtgttccctttcactgtttgttgaaggttctcctcctgctggtcacccattgaatgtaggtgtcaggtgtcatctagcattggatcccatgtcctcctgtcacacttttttttttttccctggcgggtattcacagctgggtttgttcacatgaccgccacaatgaactcatatttaactcagacctctcgttgggggcccccaaatttcaactgcttgtcaggatctttccatgagactggccacaagtatcttaaacagagaattcttagacagaattcatctactttttccttaaacctatcttttctcctatattccctaccttggtgagggtgtcacctctgatgaagttaaacacactgggggtttggatcaacctaaactcattttccttcaccctctttatgcagtaagtaccaagtctttcctgttactctaaggtagttcctttttcctagtccaagccagtcctacttgtctgcagattcagtatgttaccttacctcctgcaggaaaattccccagcattctgtacccagcccttatcctgggattggtctcccctcgattaagctcattcaggctggtgccttgcctcattcaccatcatttccccagggcctagcagggtggtgccttggaaataatttaatttggtggaagtgtcttagtacgatttcatggctaatgggtgtgctactcttgtcattcagagatggggctgggacatcacctctgtggacattgtggtcctaagagccccgttcctgggtgcctgccatttgcttgcgtcaagttggacatgacagctacgggaaaatgattgagggcagaaggcagttttggtgcgacaggaagagcacaggcttccagggctttgctgtaagatcaggagagaataatgcatcagaagtacctgatgctgagtctgttctcaggaatggtgtgtttgaggcagctgcccattgcccggtgcttgccatgtgcttggatgcaaccatggctaaaaggtttcctatctggctatgtggtgattgactgtgggtcgccttcctatggtatttctgactcctcgagtgtaatataaaggtcttcgcagaggtagggctaacggagaggcagcggcagttgttcaatgttctataatgtaaattgaaagatttttctttagttttaagctgagttttccacattctcattactagttggggaggaatgggaaagtggtgacattattcgcagcattcctatgaccattctctggttctacagaagaggtgtgtttgaggaaggcacccaagtttcctgactatttctcacacttctccatcacaagaaagccctatgtacaaaatgatgagagtcccaagaagcatcatttgctctaggcttgtccttactgtggaagctcagagactcacctttgatctaaaataaataaacaaaaagccataaggcaaaccttattgaagtaggtgatgtcgggtgtgtttgctgctgaacgcatacaaacactttatatgcagataaaataaaatgactcacaacattgctgacattagtgtgtgttcttcctgcagctaagtacatcataggattttaccgaattacaccgactaattgtttattgaccaacatcacactagtgggatcacaagaccacatatgacagtgctgcactttgctttgagagaggaaagggaagaatgaacctgaggagagctgactgaaatgtaataattctgtaccgagatttgaagtgaaaatagaatgccaattttgagttttctgtttcttaaactctattttaaatgtttattttgtcttacaaatgtacgtctacatattagacataaaaatggaagcgaggcagctgccgttaaattctggcttcagtctcttctaagattcagtccttctgattactgagctgtgtcaaagatgccatatctaaaaaagaagtcaacgtctttcctacttcatcttcaatactcacatatacttaggacagattatctcttacatgtcattagatattagttttgaagatttaatgagttcctgtaaagtacttagaatagtgcctttcataataaatactgtatagtgtttgccattttattattgttattgcttatttttaacaaaaattgtatttaaatttgcttgtagtgacatgtttctccaagtgtatgctagtataattttcacagtgtgaatttaaaactctgaatctctcatttaattggatcttatccttttggttggaatttcctttagagatactttgtcaacttttgtagagttaggctggtaatatatattttcaataatcaatactaataggtttttaaaatgacagatttgagcaacttttcacttaatttttctaagatcttctgcaaaaactgagggaagcctgaatacatcctatgcaaataattgacataaggataacacagtttcatttatgttttccctatttttttctgtgatattgttatttttaacattattgcgctatattttattatggaacacttttttacacaactaaatcactctgtctttattttgatcatttgttccaagtcttcaacattttttcgtaacgtttaaatgctaaaactgtttagttggcctcgcacagtggctcctgcctgtaatcccagcactttgggaggctgaggtgggagggttacttgataccgggagtatgagaccagcctgggcaacatagtgagatcctgtctctaaaaataaataaataaaaaataagttgaatgaatattacaaatatttttcaagacctgctgtgtgttgcacactatttgcatatgtttttcttgtttaccactctgagctgtattgtattataggacaatgaagctattttgcatataggaaaacaggtttataaaatgcacatcattgtttggctagtaaagaacagagttgggttgaacacagatctctctctgttaatctcaggctcttaattatcatggtaaaactttttcaaaatgaccctaccgccatcagtaggatggtggaatagggggtccagccctcttccccccttagaagcacctatttaacaaccctccagggatgaaaaatctttatgagagctcccaaattcagttctatgcattaaatatatgcaactttttgtatgtcaatcacaccttataaagtggtttgaaaaataaccttttttttttttttttttttttttgagacagagccttgcaccgtcgcccaggctggagggcagtggcacagtctcggctcactgcaagctccgcctcctgagttcatgccattctcctgcttcagcctccccagtagctgggactacaggcgcccaccaccatgcctggctaattttttgtattttttatagagacggggtttcaccgtgttagccaggatggtctggatctcctgaacttgtgatccgccggccttggcctcccaaagtgctgggattacaggcgtgagccactgcacctggcctaaaaaataacttttgaagttatgtgccatgaaaaatggatttaacttggtttttctctatactacgcctggtgatcccaattcatttccttaattagtgtttattgagccactaaatattgtttattattccaggcccagtgttaggtgggagttcaacaggaaaaagagaggcatagggttacctctgaaggaatttatagcctaattgttcatagaatacttactctgttttgggctgggcgtggtcattcatgcctgtaatcccagcactttgggaggctgaggagggtggatcacttgaggtcaggagttcaagaccagcctgcccaacatcacgaagccccgtctctactaaaaaatacaaaaaattagcagggtgtggtggtgggcacctgtagtcccagccactcgggaggctgaggcaggagaatcacttgaacctgggaggcggaggttgcactgagttgagagtgccactggactgcagtctgggcgaaaagagcgaaactccgtctccaaaaaaaaagaatacttactctgttttcatggattaagttttctgtgtttaaccagctctcacatggcttaataacagtcacactgtaacattattaaaatatgaaaagacgaatttggcattttacccagctccatgagacgaattgcgctatttatcacattattccttgaactttggtgttgccttaaaattgtacagcctatcaatgaagaatacatttttatctttgctatatttagttttctcaagctgctcttgggcatggtgaatcttttcattgttagtgttttacatagtttctagcagtaatgaataattacgaaggaccagatgtttttaaacctttcctctaatgctcacagccatccttccaagctaatctgccttttcttcatgttaatgatgagggacctgaggctccacatgccccacagatgttgtcattccagggtagtcagggcagtcatttgctggcttcagatttctttcaataattttttttttcttttttaatgaagaccttagataggatgtaacagattatccccttttccccttctgtgagagccaaggtgccttatatcggttaaaatctggtgaaacctgtggtgaattgattgtttctgtctgtccctcagtggttctgaaacattaggaggttgtccttgagagaaatctcagcacttcactcagtgagccgatgcctcaagccacttgtatttggaaccataaaagagctgtcagttcaccaagttgaaggaggagggtgttggtggctttctttgttgccggaaagatggatctgattataagaagcctctcaagtagagagttgaatccaaagaactaggaaaatctgggtgtttaaacaaagtttgagttgacatgggatgttgttgagattgcagcttatttaggaagggaagggggtagatctctggctccttctaattaagagtttgtgtccagagtctgcctttgtcccaggctgctaagattatttttccggtgtctttgacaattgccacaaatacaagaatatggacccatgtgggtatgtcttacatatttgggggaatatttttctggaaactttgattcttggtcatatccttattgatacattagaataaaatataaagcaaaaatgccgtaaactggaatcatgatccatcatctagaatgagaaaatgtcccacatttgtggacatttgcggacaatgtgtgacattttctcattctagatgatgttgcttcaagagtgttactgaaacgctctggaaggtagaaccatttgtcctttcccctcctcaagcctgctggcacagaagtgtcacgagggtaagagttcctgtaggaaatgtaatggcttttgaagttgagtttcctgtaatgtgaagaggctttctgtatttgagacataaaactgagtattattttctttttaagagttgtctcctaggcaatctaaaaaaaaatgaatgcttaaattagaaataatataacaaatttatggagcattcatttgatagcctaaccatttaaaaaactgcagttacgtgaactctggcaaactttctgaattcacataaatggatagttttaccatgtaaagtgttagctttgaagttttcttttgagggaagaaatacaatgtgttaaaattaaattatgtttgtttttgtttgaatggctgaaagatgaacatgatgcaaattttaaaagtacaaatctttttggcatacagtaagaagttttcatttcactcctgctcggcagcctcctggtccaccttccagaggccaatagttgatagttattaatatattcttcagagatattttgtatgtataccagcatatatatatatatatgcctaccctctttttccacacactcattctactgatcagtctctctagggttctatatcactatggtctcttattttgacaggcattaattctagtatatagcgagcctcctcattcatttttttctgttacgtgcacagactgtccacataacctctctgtggtgcagtttctaggttgcttccagattttgcagtgaacgaagaattttctcacacaagtatgagtcttagaataaactcctgttagtgtaatgctaggtcaaagggtgtgggccgccaggtgtgatggctactatctcttatcccagtactttgggaggcagaggtgggaggatggcttgagtctgggagtttgaggccagcctggacaacatagtgagactgtctctataaaataaaaaaattagccaagggtggtggcgcatacctgtagtcgtagcttttcaggaggctgaagtgggaggatgacttgagtccaggaggtcaaggctgttataagctatgatcacaccactgtactccagcttgggcaacagagtgagaccctatctcttaaatcagaacaaggatctcgcaggaaaaaaaaattttaaagggtatgggcatatgggtattttaaattttaatttatatggccaaattgtttgccatggaaattataccaaattatcagcaatatattgtggtgccgtgtagactattggctttgaacacattttcttgtggatgggaaattgagaatttttaaatatgcatctttagaataatatgttaagtatatatgcatatttggatatgtttccatatattattgagtaatcatatttgattctctttttggaggctaggtaagtttatgtggcagttttcaaacattgagagctattaggttgaaaaaatatggataataaggtaatctgaggaacttttagtttcttgccctttctctcttacatccctctgaattatttaagatccaactgagtcttgccttcttccatgaaaccttccacaattattccagctcttattgacctgggatagcagagcctgtactcagtgatatgcttttattagaatgaatctctacagtatcatgtttgtgtgccatgttaggagactcacagcgttagaagggaaagagcaaggaggagcttaactcttggctttgccctgtgatttttatctagctctagggacagaaacaataacattcagtagatactgttttcttagttttaaataagaaatacttcccccagtactttgttataatattttaagcataacttgtattatttttctgaatataaaagtaataatgatcattatagaaaatataagaaatataaaacattttataaagcagaaaataaaaatcacccagaaccctatcagctatgagtactcatggccatcatttcttttgtccttttctctctcattgtgtttctctctctctctcgtgtgtgtttctaatgaaattgacagcaacatgctgatatagttttatattttccttttttttccccctaagaatagctgatggcttgggctgtttcctcacagaacttttcctatgcatgtatatatacataatatgaaatgtagagaaagttttgaaaaaagaaattagaaacaaaattatactatgcataatgctgcatttgcttttgccactcggtaatatatggtaagctgcctgtctcaggagtaagtatagatcattctagttcttataaatgttttgtacctttgcaccaggtcccataggcttccagtgatatcatgttttctgtattataaataatgcaaaagtgacatcctttttcatagatgtatgtagaagcttgtagcatagattaaaagtggaatgactgggctaaatgctatacacacttaaattttgatggataatgccaaatttctgcttaaaaatgttttacctgtgtgtatgccaataaatagcctcactatcctcatcagctctgaaaatgatctctttaatttttttaacttgatagattaaaaacattgcctcttgtgcatgtttaatttacattttcctgatggtgaggttgaatgtcttcatatgcttcttagctgtgtgtctttcagctataaattttccatttttctagtttctgatcgattattgagatttctttgatactaactttttttgtctgttacatatgttgcaagtattttcctccaggttgttgttttctttctttatttcttccccccgaccccccaccgctgccccaatagagctcaatttctggagaccaggttgttgtttgctaacttatttcttgttgtcttgagccatacaggagttttaatttatttaataaaatctgtatggtctctcagttttggatcttatttacaaagaccctccaatttaaaaatgtattttcttatgttttttttctagcacttttatgattttgttttcttacaaagactgagctagactgaaggaatgattgaactttatttcttttcctttgtagtttaatcatgaaaattgatatatttttatataggatttttataacttaccaaagcagttctgtggaatatagatcaaattagatattaagttaaaactgaatcatagaaattcagattatggataaattgttctttaggactttaaaaatctctctccagctgtcatttagtttctaatagtgttctctggtcccttagggatcccagcacttgggtagggggtaaggagtgtttaaaaagaatatacaggtatcatcaaatcagttctgcttttatctgtaatatttcatttgaaaataaaggtgctgctgaaaacaagaaacagaaaacccacaatttgctattccattggaagtttggggagcagggcaggtactagtaactcattttccccgaggggtttcagtgagttggtatgggtcatgagtgaggtcagtgtgcagtataactagaattccttgcccctgaggaccttggctgaactccccttgacagagctgggctaagcctaacactgggctaagccgtatcctgttacagttataaagtatgttccgcagtgtgaccttctgctctagaacactttgcacactattattccacatttcctcttggatacctctctcacctgttcactgggatctagttatgcagaagcaataaatactgcagagcaaaagtatttttgttaggaaatgaagtacgtttctaaatctgtgagcacaaaactgaaatggaaaattactgagcaaattataagctcaggaccaagaatgccaggagagtttttttttgtttagaaaagaaacatgaagtgttgtttatctgtgggtatgaaaaatgtattaaaataacacatgaggccgagtgtggtggctcatgtctgtaatcccagcactttgggaggccgaggcagggcggatcaccagaggtcgggagttcgagaccagcctgaccaacatggtgaaaccctgtctctactaaaaatacaaaattagctgggcatggtggcgtgtgcctgtaatcccagctactcgggaggctgaggcaggagcatcgcttgaaccagggaggcggaggttgcggtgagctgagatcgcaccattgcactccagcctgggcaacaagagcgaatttccgttgcgaagtaaataaataaataaataaataaataaataaataaaataaaatagcacatgataactgttctgaaaagcacttttcctcccccatcttaatttgataatgtcagtcttgtctaagtaccttttctcctggagtggattaattggaacactatttttttagactcttgaattactgcagattttctgaccaattgttattcctctccttaatggtacttagtttgcttcagaagatttgaattaaattttggttttggtgtcatctttcacatgtcctttttattccttcagtgttgatttttaaaccactgtccccctacttgtaatagctacagtaataggtaattattaggcattgttatctgggccagggactctgatagtgctttatatacattatcttatttaatcttttcactgacgccgtgacatgtagttactgttttcatcttacagatgagggaaccaacgctcagagagtttaaatagtatgccaaagattttacagttggctgaaattcaaacatagtattgaaattcagtgctctttcttcagatcccaagcttttcactagtatagtgtctttagattttttcaccttaatgagtaactctgtgtgtccctttctgggatgatgctgagagaggagaaaatacatctcaccactaatgctggtcccagttctcagacagttgcttctaggtccaaagtgattttattgtgcagtcatctctaagacctgttgagtttcatgagtcaagcaagaagaattccaggtctttcaggcatctccttccctcaggttcacttgtggtgaagatgacacgtggtcagtgtttctaattatactttggtcttccttttccttgaatattgtcaaggaacacaactgcccttcccccttctctcccttccattcagtagtgtagtggtaactcagtcttagaaacatcaggagaggccactcttcctttagacgtccaaacattttgttagctttagttctccctgctttgttcatgtaaagcttcatttatatgaccaattccgtgtcatctctttctacccttgcaaaaaaagagcttaatgttagatgacaaggcaacacaataacaatgcaccacaacagagcataaagttaaagttggctaacttggcagggtaaaaagaagtacatccagggcttgttcctattttgaccaaaaagcattaaagtgtattcttatatggcaggaatcgccaacctctctaagcttggggaacattagcctgtgtgatagggctgacaacaagatgactggtacaaggagtgaggtaagaaagagagaggaggggccgggtgctgtggctcacacctgtaatcccagcactttgggaagccaaggcgggcggatcacaaggtcaggagatcgagagataccatcctggctaacatggtgaaaccctgtctctactaaaaacacaaaaaattagctgggcgcctgtagtcccagctactctggaggctgaggcaggagaatggcgtgaacctgggaggcggagcttgcagtgagctgagatcgcgccactgcactccagcctgggcgacagtgcgagactctgtctcaaaagaaaaaaaaagagaaagaaagagagaagaggaaaaggaaggcactaaggacgggagagaggacacttgtggagtgctgccagtgatttctttggttctctttctttgatgtgtccacgtaaattgagtgctacacctttagaagtggttctttttaaaaaacttatttgtatttttaaattttttaaattttaagttctggggtacaggtgcagaagttgttcttacttttttttgatagatgccaacaagaatatgttctgtgaaagatcttaactagtgtaatcattctgtcatttcacatttgaaatcttgaccatatatgtgtgacattatatatacgagtcttgcatataaagtgtgtttaacctgggtcagtatgttagcatgtatcattgtcactgatcccactgtgtctctgaatagattacagttatgtataaaagatcaatttcctgttttgctctctcgccatctctcctaattcattggaatgtgatgactctttattgattgcctaattcatttctttttttaatacttttttatttttaatttttgtgggtacatagtaagtatatatacttatggagcacatgagctattttgatacaggcatataatacataataatcacatcatggaaaatggggtacccatcccctcaaggatttatcctttgtgctgtcttgtacatggttggtgggaatgtaaattagtacaaccaccgtggaggaacagcttggaggttccccaagaaactgattcacttctttttcatctcttggagcccttccacctgcaggttcttgatcagaagttcctgtttccaacacatcgcccaggccatcactctgaccattggcttcacttgcagctgtccccagtcagaacctcgtaggcagtccgttctgaggcttcctcgcacccaggacccctctgccctgcagccagcccaatttgggccttctgacctccaaacatgtcttgctttcccacttaggaattagaaacactgggaatgatcatcccccctctgaaaacagtcaccaccactgcctgttggaatcctgctagacataaataaagccttagctcagtttccttaatggcacctttctcataccctcataccctcctgctatgtgttgtgaattctgccgcattcttttttttttttttttctttgagacagattcttgttctcttgcccgggctggaatgctgtagtgtgatcttggctcactgcaacctctgccttgcaattctcgtgcctcagcctcctgggtagctaggattacaggcatgcaccaccacccccagctaatttttgtatctttaatcgagacggggttttgccatgttggccaggctggtatcaaactcctggcctcaagtgatccacctgccatggcctcccaaagggcttggattacaggtctgagccaccatgcccggccgacaacacattctttgtagccaggcatgcggcaccagcaaggaatgcctcatttgatgataccattgttacactctgtcatcatcaaatgtcccaacgtatacacaaaactttaatctgattctccttagggtcatgcaaagctaaaattatttataaaggcatttaaatgaattgtgccattaaaattaaatcagtgttatatgtgtgtctctacaggtttgtaactcattatttatggacctttggggttgaatttacagatgctgaatctgcagatgccagaggcccaaactgattttcctaggggccatcttatctcctaagtgatagctacatggttgtggacatgtctgcttatttcttctgccttttggggggcagggatgatcttttactcattattatattctcccgaagtttttctttttctttttttttttaaacacagtatcctgcatttgataggttcctttagtaaatgtgtcttcattaaatgaattaatgaatatcatattttaaaataaaatctcatcccaaaatggaaataagtagagaatggagtagaaaaagaaaatcctctatttgaaatgaggatgggcagcctgaaaatggaagcgacaagtcagggtttaagaatagactgagtaatctagatgtgactgtaagtgctgtatttgtgagatatgacacctgggtctttaaaccaagatcgagtgtagtaactaaactgcttttgagggggaggatagaaaagaaaagaatggaaggaagcaggtggacgtttgctctggcaggtgacccagatgaactagacttggggaaagatttccccaagtcttgtgttcctgtcttgtcctttagtctccttccaaatccagctttctaagtgctgcagtttttcattgtaagcctagagggccatccagttgtgctttatcacaggggtcccagaccagtaccagtccctggcctgttaggaagtggcatcacaggaggaggtgagtaccgcctgagctctgcctcctgttggatccacagcagcagttgattctcataggagaaggaaccctatcgtgaacagctcaagccagggatctagattgcacactccttatgagaatttaactcatgtctgatgatctgaggtccaacggttttattccaaaaccatcgctccccactcccatttgtggaaggattgtcttccttcaaaccagtccctagtgtcaaaaaggttggggacctctgctttatcgaccagtgaataaaagttggaataccctggcagaacaggcagcccacagccgctgtagatagagctcatacacagcagttttacctgtgaactaacattacattgcagcattgtgagagcatataaaatgaagtttgggtttagagttttaccaggccattctcagtcctacatcattactatcatctatggatttaaaaatcatattaaagaaaatataatttaaaaaatcttgcccatgccactgggtagggggttatgccatattaagcaatttgtctttctttctttctctttctttctttctttgtttttctttctttctttctttcttccttccttcctttcttcctttcttcctttctttcctttccttcccttccttccttcctttccttcccttccttccttcctttctttcttttctttctttctttccttcctttctttccttcccttccttccccttccctcccctccccttccctcccctcccctcccctcccctcccttcccttcctttcctttcctttcccttccgtctcgctctgtcacccaggctggagtgcagtggcgcaatctcggctcactgcaacctccacctcccgggttcaagtgattcttctgctgtagcctccgaagtagctgggattacaggcgcgcaccaccacgcctggctaacttttgtatttttagtagaaacagggtttcaccatgttggctaggctggtcgtgaacttctgccctcaaatgatctgccagccttggcctcccaaagtattgagattacaggtgtgagccacaatttgtgtttcttaaaggaacacaaatataactgtgaattctaacatcttccacagtattctcatttatgcatacacaatgagagacactcgtttgtcctatttatagccaaagatgctttgttgaatatgacatgaaacaatatgatttttaactatacagttttactgtgatctgatgatcaacatgatacaattaatagtgctctgtcagaggtaaatgttaacagcaacagctgctttattctcagctggggtatcaattcccagggaaatgcttattttgggagaaaagatttatttcaaggttatatgtgaaacatttcccccttgtaactttgtggaaaaacctaaaggatccttaaatatctagctctggaagggacttgggttggttgacgaagtgattccaccaccccattgcctcattgtaagaggagtgactttgtacttgctcaaagccttgggattggaggaaaaagcaaagctgggaaccaagggcaaagtggtttattataagaggattggctttggcctatactttattactagtaactaacatttattaacatatgtgtcacttaccgagctaagctgcaaaatctaaactctcagaagagactttagagctagatgctactgttagcctttattttatagacgagacactgaggcttagagaggttaaataaattggccagttgataagaggtggagtcaggacttgaattcaggcatctctagctccagagagaccatcctagaataagtccttaacttcagttctctttctcatgcatttgttcagtcagccaacacagtgatgtgatgcctgctgctagtaagtaccctacgaggctctggagctgcagagttgaatataaaatgatccatgaccttgagcagctcatgactgcatggcacagtgggacaggtgctgggagagagggagtctatgtccagggctaagcaaatccagagatgaggcatcaaaccttagagaggggcaatttagagaactttcctggaaggttgactccaaacgcgttctgaaagacaaataggagtcgactggatgaaaattgggaagtgtggcctctcagaagcaataatactcaaaggcttggagattagaaacggtatggtggttccatggttcctgctctttgcaggtgactggcgcatatgggaaaagggtgggcaaggggagagggcatggtacagatggatacggttttgggtttggctctgccacttcctggctttgtgtccttgagcaaaatctcaacctccgcaagcctcagtttcgtcacccataacatgaggataagtaatatacttacctcagtactgttatgagggccaaatgatataacaaactgaaaatgcttaacaccatgcttgacacatcataaatgctcagtccattgaagctgcggttactaatcaccatcattattgtcactatcttccttttcctcattatttaggtaggcaaggcccagatcttaaaggacctttctcaaaccaccttatgttgtctttcgatgcagccttagctacaccatgaactagcggaaattctgatgtctttgaatgctgggtggaaggatagagagaatttcatatttcgagaagcggtgacaagttcattttgatgaaatgtattgcaacatagcagagaggtcaagagccttttctgatgtctgtgcttgtgatgggaaaatttgtattgaggaaaaggcaataatattacagtgtcacttttgcaaaaatcttcttaagcacagctgtcaaaaacctctttccagagaaggccatttgccctctgtgatcctgaagaattcatccccactagattatgagctttctgaagacaaaagccaggttgtactcatctttagatccacagtgtctgacgcctttcagttgctcagtgaaaatgggtgaaagttaatgatgctcctgaatgttctggtatttggcattttacaaagggcagatattgttaagaaaaagataagacttatgacagcatgctatttcattccttttacatgggttttatgtgctcagctctgatattgccctgcttagatgctttagtgattttgattcttttgtgtgcctgtacagagagttgttttggggatgattaaagtgttttatggtaggtgggctttgtgagagcagcacagctgtgtctgtcttaaacagttttatccctattgtctagtgtagtgcctggcccctacaaggtacgtgataaatatttgtaataatcaatttctattaaaaatgtggctcaaattactgtgaaacataatcttaatttaacaaatttaacttacttttcttggcccataagtacaagtagaagattatctgtgctcagtacaaaatttcattcaagtttgggtggagacgctcttaatgtttaaaaggttggcttctgtgttgtatggtgtataggacccttgctttctcccttgtgccattcactgttgttatagggtaaggtctttgggctgaatggctacagtgttttagatgtggactttaggtcccaactctgcactgcatctgtctgctcttgctaacatgactgcaatgttggaggaatgtcatagcatctccaggaaagcgatcctgtaatgcttggtcctccttctctctcaaatgcagctatttatgttgccattggcccaagatcatatggacagcatctacctcttcttcccaggtgtgttagagaaggggccttacaacccagccagcttatctttcatcttttaggtcactgcttaacatgttagctctcaacaaagtgctttcaaaccttcttcacagactaattgcaaagtatatattgatggagcttttttgccctgttgctcttctaattggatgtaacagtcgttttttttttttgagacggagtcttgctctgtctcccaggctggagtgcagtggcgtgatctctgcttgttgcaacctctccttcctgggttcaagggttcaagtgattctcctgcctcagcctcctgagcaactgggattacaggcacatgccactatgcctggctaacttttgtatttttagcagagacggggtttcaccgtgttggccaggctggtctcgaactcctgacctcagctgatctgcccacctcagcctcccaacgtgctgggattacaggcatgagccaccgcacccagctggatgtaatagtctttgatgcaccttctttaattctagtctggctgatctctcataaggtgttccctgcctcctcctccttccttcactttaattcctgtctttccttctccttttctttctctagtcatatgtgaactacccatgaattagtgactttaggattgtgctttgaaaaataggcatattttacttgaatttgttttagtataggaattgggttaaaagaagtggatgcaatgcagttcatttctgcacttacctgtgaaaatataaaagcatacagatttttttccagtatttattattttgtggtagaatgaaaaaaaaaatagatgctttggggatctgatcaaagcgcataaattaatgtgaatagctgaaggttgatgcatctgggtgacagggggtcaacttttccagatttacggagatgtaccagagttaaagcatgggatatgccatgtaaacatctgagaactttggcatgttttgatttatttttttcactgcagtattgagattggcctatgttcactactagggggaatgggagagggttcagggaggttgtttttgtttttcaaacagaaggggaacaatgcttagcaaatgcccctgggtgtgtgcctccagcaaacacatacattgggtcaagaccctgatttctagcctcccattgcctctcatctcagtttttttccgttttgttctgggccctgggtagtctagcaactttgttcctattgtcccaaccctaagtactccgaagaatctatttctctaatgtggtaagtagttttatacaacactgtcagcaggcggtgagctgtaagttatatttccattgggagagacttactttgctgtatcccactagaatctaaggaaaaatcacaataaaggctcatactttaagacattctggaagatgggagaccatgtagcctaatggagacagtatgagctccatcactagctagtgtatctcaggtaagttacttagactctgtaaagtttgatttactgttctgtagactgaggataatgcctctacagagttgatgacatgggtatgagagataacatatgtacagtttagtatggaggaagtgctccatagatggtaactatgatttttggttaaattagggtatggttttgggacatgaacatttattgatgataacttattaacacccctccctctacccctgcctgcagagtaattctgatcattttaagtgccagcacctgtggatatctgtgaacaaggactcaccaatgaaatataaaagactaggccgggtgcggtggctcacgcctgtaatcccagtactttgagaggccaaggcgggcggatcacgaggtcaggagatcgagaccatcctggctaacatggtgaaaccccgtctctactaaaaaatacaaaaaattagctgggtgtggcggcgggcgcctgtagtcccagctactcgggaggctgaggtaggagaatggcgtgaacccgggaggcggagcttgcagtgagctgagatcgcgccactgcactctggcctgggcgacagagcgagactccgtctcaaaaaaaaaaaaagaaatataaaagactagatgtcttcagccctgtggtggttcctcttcatgcatttaggcgcagtacagaaactctccatgtctgtggttacattcgcctctgtattactcagtggttggaggtgaggagttggaagtctaggtcagttgtactttgaatttacctgtaggtccacttctgccagctcagagtccattagctcttccatattcatctgttctcagcaattacaggaaggagaatttcataccacttgtctaatgaggacttgatcccggtggttatcacagatttcccaaaattgaatgaaatgctcctcttgttcccctttctgaaagaattccaaagcttccttcaatgcagtcaaggggatccttccttccgctagaagcattcctctgttttgagtctagaatgcttcacggtgctttttgtcttgtggcagcttcctgggagagatacgaggctcacttataagtgctcagaataaaaatacaaaacacagtaagtgctcaataatgttagctaggatggtggtggtggtgggtgataaatgatttaatctcatttatgctccatcttctcctccactgtccttccaggataattagcagcactaataatctggttagactcagctcaatgctttctattcgatatgaataagtgattattgtttactgctaagacaagtgtggtgttgagatggcattttctttgttgaacacatttttgtttttccttgagaaaatgcctaaccttttcattctcttggttttccttgaacatctaagtcttcccacacacctccaactgctttgtgaaacaaacgcctcttgtataactttccacattgtccaaccttttcagataatctcagcacctcgcacttttgcttcccctgaagacatccctcttggagacctttaatgaccttctgttcccatctgcatggagaggaataaagacattcaaacaagtctcctattttcaagtccttccctacccataacctacccatttccctcgcaaaacaaaacacctggtaccttgtgtctctaaagttaagtgtacagacagcaagtttagctttctctgccaggtttttaccttctgtatttatatgttgtgttgggggggtttctgaaacccccttgtttcatcaaacatggaactctttgcatctgtatcttgttttctcaatgatttgaagcgatttttcagttggggaaaaaatgggaacacctgcattttaccactttaactcagccatctcctaacttctaattccaaattcatgtttatttattattttttaaagagatagggtctcactctgtcacctaggcttagtgcagtaatgcaatcataggatcatggctcattgcagccttgatctcccagatacaagctattctcttgccccagcttcccgaggagctaggaccacaggtgtgtgctgccatgcctggctaattttttaattttttatagagactaggtgatactgtgttgatcaggctggtcttgaactcctgggctcaagagatcctcatgccttggcttcctgaagtgctgggattacaggcatgagccaccacatccaacaccaaattcctaatgattgactggattaaaataaccatgccaggcaaggaactaaatacacctatattttctagacccattctacgatttctttttccttttgtcctattctttattattggatacaaatgatagcatgcttatcttttggagatgaaagggtctttctctagtgagaactcttttctttcaaatgcagattttatgggaaaatccaactggcctgctctgtgttttctgttaaataagcccatctctatgagttaggtggtaaaggtaatttgtttcattttagtgctataacttaagaagacaaggagaatttagagttaagggagaaccactgagataattaaaaggtgaagaaataatacctaaaaagaaaaagtaagaaaggtaggattatttatatcggagtatatgagggagtgagtgtcataatgagagttaaatatataaaggtgcagtgtagagaagatggcacccagttgcccttttaaaatgaaagacttcaagaggaaatagattaaattagcagtagagtctgtaaatagcataacagagtataaaaatagcagtagagtaagtatattttacaaagaagaaacttcaagacagtgaaagttgttaactggaggcgggtggggaagggtcgcaggcaagattactaggcgaggcttgtgcgcccgctcccgccctggccaccagtgcccacccggtcggcctggcacagccatgatcaaggcgatcctaatcttcaacaaccacgggaagccgcggctctccaagttctaccgcccctacagtgaagatacacaacagcaaatcatcagggagactttccatttggtatctaagagagatgaaaatgtttgtaatttcctagaagggggattattaattggaggatctgacaacaaactgatttatagacattacacaacgttatattttgtcttctgtgtagattcttcagaaagtgaacttggcattttagatgtcattcaagtatttgtggaaacattagacaaatgttttgaaaatgtctgtgaactggatttgattttccatgtagacaaggttcacagtattcttgcagaaatagtgatggggggaatggtattggagacaaacatgaatgagattgttacacaaattgatgcacaaagtaagctggaaaaatctgagggtggcttagtgggagctccagcctgtgctgtatcagctgtaaagaatatgaatcttcctgagatcccaagaaatattaacattggtgacatcagtataaaagtgccaaacctgtcctcttttaaataaaaatgtaaaaaggccactcccaggtaaaatccagggggaagagtcatctaagtttaccatgcagttgtttaccaaaaatggaggaggagagtcttaacttttgctcttggatttaagtcaaggtactatatagaagttgtgtaaaatcagtatgaaagttcaacgttgcttttcttgctcagtgattttaaagaaattgagtagtttctatgtgattttttttttttcttttctaaactgcattcgggtgcccatctacagcatgcctctatgtattggctactacagtgttttaaaaagtgtttcagatatttctttaattatgtgcaacctaaaatgttggtgttttgtatggatcacaagtgcagcattccttaattccttctgctatttgtcacacaattgttatttaaagaaccaagtatgtattgcatgaaaacattatgacttttttctcttagtttaaataaactccaaggtaactggacttctaaagcacctttctgtttgcctgatatctactttagcaataattttttttacaaccctctgactcaacaaagtaaataaaagtatattttatcactaaaaaaaaaaaaagttgttactggaatgagctatcaagggatggtcaccttgaataatttttatttgatagtgtttagcatcacctacaggttctaatttagctaataaatgactaagcaccattactttttttgtgtgtccaaatcagttcattttgtcttgagtgtcttgagagtatccatgcacaggtaatagcaagaagtcttcattcttgcctttttttttttttttggagacagactctcgctctgtcacccaggctggagtgcagtggcgtgatctgggctcgctgcaagctctgcctcctgggttcacgccattctcctgcctcagcctcccaagtagctgggactacaggtgcccgccaccatgcccagctaattttttttgtatttttagtagagatggggtttcactgtgttagccaggatgatcttgatctcctgacctcatgatccacctgcctcggcctcccaaagtgttggaattacaggcgtgagccaccgcgcctagctcattcttgcctattttaatgtctgtattggaatccttgtttaccaatcttacttcagagcagcagtactcttgagaaaactaatgacttcataaggctccagtgtctgtgtaaatgagacagttttcaaaaatcatatgtaatagataactagaatattttaatttctattcttttttttttttttttttttgagcgggagtttcgcgcttgtttcccaggctggagtgcaatggtgccatcttggctcacagcaaccttggcctcccaggttcgagcaattctcctgcctcagcctcccaagtagctgggactacaggcgcatgccaccacgcccagctaaattttttttgtatttttagtagagatggggtttcaccatgttggccatggtggtctcgaactcctgacctcagatgatctgcccaccttggcctcccaaagtgctggggattataggcgtgagccactgcgcccggcagtttttattcttgtgctgcatttgtttgaccctgcagttgcttctgtttcaaatgttgcatttatgtgaaataaagtgagattggatataatctttacacaaaaaaatcttacttgaagttcttattttctctttgagccattatgtacccttgtcatctccttttctccttttttacttgacacgttttgtagattatcctgagccctagaacagtgtgtggatggttgcaaattttcatctgcttcttgtttctttctcgcccttgcctctgtgtgggctcttctcttcccagccgcccagcatatctgctgctctattcatatccttacctatcacttcatacgacttggtaggcagagagggtgccttttcttgttctttggggaatattgagatcaatattatgtgctgtgggaataatggtttttgagaaaatgatatataaatataagggagtacagtcatttgatgtttgggccaagtaatgtttctgtagttaacacttggtggggggcaacagtattacatttttcaaaagctatccttagatctgcttccgaggttgaggtgctgtgacatggcactgtagctattgagagataggattgttgatatttttgatggttgatcatacccagggccatgcctaagattcacagttcacctatttgttacagactggattttgggaggctttctgcttcttagacttcctgtcacatgaagacattgagactttgaggtatcccttttgggatcaatattctcctttactaaagcttttctgccatcttgaggaatcatgcttaaggtaacccagtaagagaaaaaagctatagcaagaacttggttcttttgactccaagcgtgggtcttttctttttatggaagtggttaagaaaacatattgtttcagtcatcttataagtgaagaaatggaaatcatagtcatttgtgatagcctctgcatttaacagttatttgggaagcaatttaggagtatgcaataagagacttctaaaaatatgtagtttttgactcaataacagtcttgaagaatctattccaatgaaagaatcagaagtatagggaactctttttgaaaaatagcaaaaaattagaaccaacctaagttgtcaacaatagcaaatggttaaataaatggtgatccatacactggaatattatgcaacagtttaaaattgtttttgaaaaaattttaatagcatgagaaaataatacatagtaatcataaataatgaaagatatcaaataagatggtacaatctcagttacacaataaattaaacataattaaaatgatgaaataaaatatgcaaacattttaatattggtcctctgtgggtggtgacgtgggtgatttttttcttttagttttctgtcatttccaatattcttataatgaattataatcagaaaatattaaaggttattaaaatatttaggtaaaatagaaaacgactgagctttctaaccctaataattcaaaagaataaatttcaggacataagctgttttaataagtctttttttgtttgttttttttggataataaagacagggtcgggtacggtggctgacgcctgtaatctcagcaatttgggaggctgaggtggtagatgaactgaggtcaggagtttgagaccagcctggccaacatggtgaaaccctatctccactaaaaatacaaaaattagccgggcttggtggtgggcgcctgtaatcccagctacttgggagactgaggcaggagaatcgtttgaacctgggaggcagaggttgcagtgagccaagatcacgccattgcactccagcctgggcgacagagcgagactccatctcaaaaaaaaaaaaaaaaagacagggttttgctctgttgccccagttggagggcagtgatgcaatagctcactgcagccttgaactcctaggctcaagcaatcctcctgcctcagcctcctgagtagctgagactacatgcatgcaccaccacattcagttaatttttaaattttttgtagagatgtgggtcttgctttgttgaccaggctggtcacaaactcctggactctagtgatcattccacctcgatctcccaaagtgccaagattacaggcatgagccactgtgccagaccaaaaaattctgattttaaaaaggaatgcttgatccttttttttttttaagcaaaatgtactattttgtacattttgtatttagtcaatgtatgattgtatatggtgctgaaagccatgtgataatgggagagtgctctaaatagtatttattaataaataattgactattgttacttattttattatgtaaatgtacatcttatggtataacctaatggtgaaagattgagctttggagccagcctttgccacctgctagctctggaactttggccaggttatgtagcctcagtttccttatctgtaaattggacgtgtgaagataaatgagaaaatacacgtaaaagtctttagcacacttcctggcacatagtaatcatttaaaggctattatagctgaaacgatcaatgaatcatgagtgttctactgaaggaacccttcttccaaattttcttacatatagtatttaggagggacatatgttaggtgattaaggtttttttgttttttgttttttttccaaatacaatggtgataatccaaagattgtgtaagagaaagtagatgtttcttctctgttcctcctcttatatctctgagtatggaaatactccctggttttctccaagctcatataaacctaaacatacacaaggtaactggtttatttgctttggttttgccttatatattactctgcaacttttcctacttagtaacacatcatgagcattgttcagagctaatatagattgaactcatttttaataactgcagaatagcctaaataatgtagatatgccaaaatgtacttgaactatgtattatggatactcaggttgttacaaattgccaccctctactacaaatgacgttgaatgcagcatccttatacagaatttttaagattcattgcttttatttccaatgaaagtttccctagagtgacactgctgagttcagagtcagtgctaattatagtgcaaagggatttggggtgcaaataatatataaaactttgttggtttctgcccttttataatctaattgaagaagaagtacgcatgtatttttctgtggatttctttgcttatgtacaacaattttagtaaatggtgtttattcctagggaggtttgaaatccttagcattctgaaacataaatcagaagagcaaaaggagtctcttgaattaggtttactctgtacagtatttgctgtatttattagatacaaatttgttagaaattgtacatagttaagtcttgcagtttttaagagctaagagtcccacttgaaaactgaagcacctgacttttgccctcttgttccttagtgtgcttacaccctacagggttgcagacaggggaagagccatccccacatgcagtatctcgtctctagaggcccaggcttgctcagcacggatgcaagcagctgaacaaatcttgttttgaggtcaccgatggtaacaggaatgatagtatgctaacaaattatttttacaacagtaaagttactgtgttagcattagacaggttctttttctttgtaatatcactgagagctacttagtacaacataagttgttccaagtgtccacttaagtagtgtggggtatgtgtgtgttgtgtgtctttacaaggcaggggacagagagaagaaagaacaattgtaatgggtttgtggtgcatgtacgtgcatgtgtggccgcagtatacctttaatgagcagcacgaccatgtctgtttagaagctttgtttttccctgttagtaattaacatttggttacatcagttgggattatacaactctttaacagctgatactagttcatacctgttttcattctttctcccctctgattcagcttcttggctctggagaagtgattgcgttatacactagaatccacttggttgtactgattcactggagtggtcacatatctgaaacccactgggcaccctgttgcggtttccagtcagtgggacctgtagttgcatgttttggtttcatattttttctcttagtgatgaacagccttaactttaaaaattctctgctctgtaacaattggcttgttgggaaaacatttttacagctgtggtatttagcagtcattgtgtttccttgggtttcctgcagtattccgtgaagtagcaaggataataatggcggtgatagcaaacacataaccaatgcttaccatgtgccaggaatttatagattattaactcataaccctcccaacaactctaggtggtggggactgttttcatccccatgttagaaatgcagggagcgagccagcttcggacccatggttatgcagtgtgtaagtggcttaggcatggaaatgactgcttctgggtgaggcttgctggtggggctggagaaactggtgaatgaggcgacattcccagggaagctcagtgctggatgctcagacccagatggagagagctggcagagtggcttagctgctgctcactgtttggataggaagtgacaccctggacatgggagagaagttgagggaactcactcaggcatgggaggaaggaaacgggggaaaggaaggtgtggaaagctttgctgagggaggtcacaagcaacaactgtctctccaggagagcccttctttcttggctacttctgtccctgcagggcgcacctctccggaaaagagcgaagcaagctcaaggtatgtttatcctcagtgagtttcttttgatttgatgagtgagtcatctgccctggctggaaaacctttccatttgcttttgtgattgtgtttttcaaattggtttttgaagaggttctatgcgacatgctcaggttctctcattccacaacacagtggtacagtagaataggccatctaggtaagaggctctggcagggtgctatggctgggatgggaccctgattctgccaccatgccttctggatagagcttccttgggctgaaattgggtcccagcctcagggccccctccaccatgtctgagtaatgtccgctgtgggtgagcaaagataaactgctgatggtatgtcatagttgttttttgtagaatgtgggtgcttgctattgtcattgttacttttatatcataaggtcatagctgataaccgtctttctgcgtcatatcagcatggttcattgggtaagaacatgggttcagatggagctctgggtttgaacttgattgtctttagtcactgagtgatcgtggggggaagttatttcctctctttagcctcagtccttagtgtgtaaaatggggtgatatagtaagagaagccctgttgtcgtaggggtgttgagattgtgctcagcagagtgcccccatcaatgtgtctgcttcacaaatggcggtgctgattatggggaatttcccattctgatttttaggtgtaataagctctgacattccaggacatacatcattgtggatatagatactgacagcaaaaagaagtggaattgaagagttgcagaatgcacatctcccaaagaagggtggggtgtcttacaacaaagcattcctggcgtgactagacaaagctcatttgagagtaaaccagagtcaggtattcttctgatggaattgattatgcaagctggaccaggaagagtcctttattttatgcccaattgatggttctttatattttaaagaacttgtcattttacttacagaaagaatttttcctactgccttttaataaggaagggaaaaactattgcttttggttttatctagtgaaatccaagttctgttttggaaggacaaaggagttagtttggagggaaaattctgaccctttttagtgagcactgttatctgttttaccaggttactttaaaaagtatcatttagtaaatttttttgttttacaagctccagcttattattatggaaattttaggcacatacaaagctgtagagaatggtgagacccctgacatacctgtctcccaccttcaagaactgtcaactcatagtggtgcctcatctgcagccctactcagttcccaaaccctcgtgattttttaagcaaatcccagacaacattattttatccataagtattcaagatgtacttagaatgccttcagaggaaagtttcgctaaggtcaaaaatgaaaacctgcatgttctaagttgcttcctgtgggaaaatcatgtctctctggaaatctcaagacagtaatccttaaagcagggggtggagaaatgatctttttaaacaataaccaggggagctttttcagactaacttgtcctcctagaagattgcctgctgaagccacccccttattccaagagttcacagaaagtgttagagatgtacaagatagagaaccacctctttggggaaagtgcttccgggttatggaggctttttaaccaccatggatgggacttacttaaaaatgtatttattttcttccttcttaaacagattatgctgggtactatttaattgttcctatttactacagggagttttggacaccgatttgtatgctgtggagtgtgtatgttaatcatttacgtgtcacctcccttgttgccattttttatcctatgtcaatgtgcttgtctgtaatgacagccccttgtctctttgaaatctgttaagggctgagaagtcaggtcaaggaacttgtaaagaactgtacttaaagtcagagtaaatgaactgagggtgttcttttgtttcctgagcaaagtgtatgatgttggaattaaggatttggtgatactcaactgctcaaaggatgttttggctccatttcttggtttttggctgtgttctacatagatcaggttgctgtgtagccatgtttcatataggtgaggtattactgtaatgaattataacacagtaggaatctttgttttccaatttcacatacagctttagaaaggcttgaaaggtcatttacgtggttagtgcgtaagagagatggaaaatgtgttttaggacaagtttccatctcaccactgactaaaagtgagttaggagggaaataatggaatcttaaaatgtgctttttacagtttttgttgttgatgttattttcattagcaactaaagtcaggggcttgtgttttaaactttgcagaaaaagctttacttggctaaaaataatttgatgtatggatatgatttgggtactgtacagctctaaaactgattgatagaagaaactaataatctcatttgcactgcacaaaactaatttcctttctgccttcctttaaaggaaaataagagtagacatttttagtattcttttatttcccatcccctcccacctcatcccttcttttagcctttccttaggaaaatgacctagtactatcaaaactgagctgtgccctatgcaggtttatacacagcacagactagttgcatcagtttttcctttcttacaccctcaccaagattacatagctctgtgagatgtccttgggagttgtaatagtatggaatgctggagaaattccaaagactgttggtaaatataggatgcaattgaatagcagttagcttcttttggtgatttcagaacttatctttaagaaaaaaaataaagagttaagtatacatagcatagcatgggaactaaaaagaaagtgcggtgaccatgtttaggatttggatttgaacttctgtctttcatttgcctgtgcaggtaattcaataaaagactaaacacagactgtgctggtaattcagtaaagaggaatacgctgcatttggttgatatttgtgaaagatctctcctctgcttatccatcatatttaaagatttacttgctctgccaaatgaccttttctaaattgtgagaaagctgtctttctttgctttgtgtttttaactttgaaattttttttaattaaaaatgagagaacaaaatactggaaatccacagttaataggtaaagatcgaaacttacactttagagcttaggaagctgattgactactcagaagtgaattttagaagtgcctgaaggttttctgtatgttctcttgcaatgtagcctattctatataaaagacctttaagatgtgatgtttacagagcaaatatctcaacgaattgctttcagcaagcatgggcacactacaacactttttatcatctcagtagttccattgtatttgttgcaaggaacgtgtctggatctgcaatctctgtctgtgagaatacccccagtataagacagatcaggggctagaaaaggaaaacttgggtggtgggaatgttcttttggaaacccaagttcaattttttcccctgaaaaagcatgagtcagtggaataacttaactctcatcccttttctctgtagcttaaccctctcttaagaagccagaattcagacccatctaaggttccagattccttaaatgatttgaagagtcactgaggtcatgctggagactcctgccctgccttaatgtcaaaaagctagtgatctcaggattcattctttcttcataatgactgtgttagtctgttcttgcatggctatgaagaaatacctgagactgggtaacttacaagaaaagggattgaattggctcatgcttctgcaggctgtacaggaagcatggcaccagcatctgctctgcttctggtgagggcctcagggagctttcaatcatggtggaaggtgaaggaggggagcaggcatcgcatatggcaggagaggagggggcaagagagcgagcggggtcaggggaggtgctagactttacaacaactagatctcgggagaactcagtatcctgaggatagcaccaagccagaagggatccacccctatgacctgaacacctctgaaatcggggattacaattcaacatgtgatttggtgaggacatatattcaaaccatatcaatgagaaacatttatttcacttcctgccatgtataaagctccatgttatgattatagaaggttacaaagctgacgcccacacaggtctttcccttcaggactctgactggggaggtgagacaaacctgagagtgattgtaggatgagagactctgtgatacaccaggaactgtagagacacggcctcatggattttataagaccaagggaatgtcatatcaatttcccctggggaaaaaaagaacaatgggcaacactggatgatatacacatgctgttggctagaataagaaatcttcttcccacccaggatgggctcttcagaggacatttagtctaagattctctcctttatgcttcaggtgtctgagtttgtgggataaccaggtagccgtggttggactaagagaatgcatgattcagcattctactcggtcagtttttccatgggattgtcatagcttcatgttaaactctatgctttgccacctcaccccccaccttcatttttaaccttttaaaagactttctctacagtaggtcaagtactcaatttcctctttgcacaactgcttggccatgctttgagcaaacctagcatactctgaaactatgagaagagtaggaagggaacttgtccacactttctgagtgctcactagcactgttttctcatttacttctcacaaataggtagggtatgtattaacttcataagtgagtagactgaggctaaaagaggataagtactttgccattcattctgcccctctctggttaaagccagtacttgcatgaaagtttgtgcatgttcctatccctaatagtaaaccttggttcttagaacccctcagctcaacttcagtcgagtgagtatttttccctttctttagtctttagttttcggtttccagttgctttactgagacaaagaccctagaagttgaagagtccagggtttactgcactttccctgtcattccccctgtactttgtattccaaattactttcatcacggaaaggtgaaagtctaagtctttaaaaaaaaaaaaaagatttagggggttcaagtgtagttgtttttttgttttgtttttttttttttgagatggaattttgctcttgtcacccaggctggagtgccgtggtgtgatcttggttcactgaaacctctgcctcccaggttcaagtgattctcctgtgtcagcctcccgagtagctgggattacaggcacctgccaccatgcccggctaatttttatatatatatattttttttagtagagatggggtttcgccatgttggcccggttgggcactcaagtgcagttttttttttttttttttgagatggaatttcactcttattgcccaggctggagtgcagtggcacgatctcggctcactgcaacctctgcttcctgagttcaagtgactctcctgcctcagcctcccgagtagctgggattacgggcatctgccaccacacccggctaattttttgtatttttagtagcgatggggttttaccatattggccaggctggtcctgaactcctgatctcaagtgatccactcgccccggcctccaaaagtgttgggattacaggcctgagtcaccgtgcctggccaagtgcagtgtttttacgtggctatattgcataatggtgaagtctgggcttttagtgtaaccattaccccaatagtgtcccaggctacttttctttataagatgcgcctaggaaaaagagggttagaagattgttttgaaattagaaaaaaatcacagtattgaaaaaaattaggagtcagcattgttagctttatgatctatattttacttagaaatagagtcttgctgtattgcctagctggagtgcagtggcatgattatagctcactgcagtctcaaattcctgggctcaagtgatcctcctgcctcagcctcccaagtagctgagactacaggtgcacaaaaccatgtccagctatttttatttttattttgtagggtcaaagtctcgctattttgcccaggctgttcttgaattcgtggactcaagtgaccctcccactttggcctcccagatatgtatagtttctttaatttctataaatgggtctcagcaagagttgcagctttgtagtatttattagatatgttcttaaagaatagatcaataaaactatatattaagtaacttatttctgtttattttttaaaaatagactcgatttttgggagcacttttaggttcacagaaaaattgaaaggaagtcttaaagatttcccacatacccccgcctttccccatgcgcccccactatcaccatccccctactagagtggttccttggttacaattattgaacctaaattgacccatctctagcacccaaagtccatagtttccattagggctcactctgactttttatttttaatggacctttctcttaaaaaaaaaaattacagtaaatataatgagggctctatacttttatctcttttgaaaaacagtttttattaggaaaatctaaagtgtctaaacctgtgacctttctatgagcatgtggcatttagttccagattttataatgtatgtgtgataaaatgaatatgatggggccccagagagccacatggggaaagttggaaaggttccaggagccagactatttaacagaaaggagatgcttagagtggatttcacatcaagtccattttatagtggatattttgctccctgctctaatgacaaagcagaggtattcctattggacataaaatataggagggagctgagtttgaggtggaactctacgcctgtgtgaatggctaaaagatggaattttaacatatgtgcaatggcttttttgagagcttaaaagtagtggataaattcatagaatataaaaatgttgaaatgaaagggactaagagatcttcttctctaatcctattgttatagattagtgtcaagcagattgtttacctggaataatttaggtgtagcctttcctaaaggtaagagatgccttaaatgagtgcctgaaagttctttccagaagcatggctctgtggctgtgcaaattctgggtgaaaatgtcatgagcttttaatgtaggtaaatgatgtgtgtgttagaggtgaaaaaaatgtgtttctagctctgaggaagtttagtgtcaaagtgtgctgatatttttaacataagctagattagtatattaaaataagcaccaatggctgtgggaattcagacagaaaagattacctgtgatattaaggatcagagaagtccatagaaagaggcagcatcatttaaattcagcagtgactaggtatgagcatgtttactatcggcattgaggattgccttctttttaacttttgattatgaaaacttttaggtatatagaaaacctaaaagaacagtagagtgagtatctgtatactcacagattcaacaactgttaacattttgtatatttattttaactttgaatttatagatgtgcttatgtgtgtatggtgtatgtgttggtttttcttttcttttcttttttttgtttttgagagtttttgctctgttgctcaggctggagtgcaatagtgccatctcagctcactgcaacctctgcctcctgggttcaggtgattctcctgcctcagcctcccgagtagctgggattacaggcacacaccaccatgcctggctaatttttgtatttttggtagagactaggtttcaccatgttggccaggctggtctcaaactcttgacctcaggtgatccactggccttggcctcccaaagtgctaggattacgggcgtgagccaccgcacccagccgtatgtgttggttttgcaaaaaaaccattggaaagcaagttacaggcatcatgacttctttacccctgatatatccactggcatctcttaacacaattccatctattctcctacataaccacaattctatcaaaatctgaagaaaattaataaaaatacattaatatcatctaatttctgtttttcaaacttccctaattatctgtatcttttacagctattttttttttcacaactggatttagtcagggttcacacactacattttgttttcataattcctaaatctcttttattctacagcagcctgtacggcctccccctcctcatgcccaatttttgtttcatgacattgacttttaaaaggaccagaccagttttcttacattttgttgataccgtatcttgcaagtatttttgtcaactggagattttaaaagtcttttagaaatcaaaatgtgtattttctaggagatatattaccagattatctgctagccatgaatataaagccatcgctcctgatacaccattttcagtagataatgtactttaaaataatctttatttacaaaaataatataaggcagctgtaagatgctagaacaatgtagaaatatctaaggttagaattctatttaatatcaagtagctctgagataataattttgccaaacttacattctttcctgtttgtgtgtttttgtatatcataaaaattccaatcatctatacatgttgtttaaagtttactttttatttcactagttatgcattgcaaatgatgtcccatagaatatgtagtagagattgtttttgctgggataaatgcgtaccaagccagccacattctttcctaggtgtttacagtgagacacacccaaatgtaaggtgcctggctcagggttagaaatgtggcttgtgcccacagagcaaatatttttctctgtttgaggctctctggttaatgcaggaattgaatcttggcctcttgtgttctgtgctttaataagttgaggggaattcatgagtagtaaacatctaagggctgtctatttgaattttggcttccccccactgtttttcttggggttgggggtgggtgggtcatttcatattcttttctgtacctatcaagaaatcagattggcttaccttagaggtaaacatgatactctgccaacataaagtgatttagaaatgttaatatattttaccaagccagagtttctagcatatgtattttaagccgtcataaaacatatacctgtcatgttaaggaatgtgcccacggcaagtatcaaagacctgctgtgggaggctgaggagtgtgttttgctatgttgcagggttataacctgacaacctccatgaggcatgagtactggcagggagtggtttataaatattgaagctattttatttattactttaagaattcctacaagtagtagctattcctatttgtacatccaagtgtcttggggctcagggggtaatcctgtgtcggcagatggatgaagagtgtaaatcctagtggatctgcctgagttagggaatcaagttaacaaaacaatcagatgagcaagagatagtctgttgggcttaatggagaacagaacatttggacagaaaagttttctggacatttctggcttctttgaaagacaagtttaatgagcctcccagcaagattgctggctcacggtggagcaataaggccacttttgttgttattttattcttgtgttgtccatggcaataatgtcatcattttcatttggtgggacatcagggtgtcagtaagtcttgttactataatagtaaattaaattatctgtgatttggttacaggacttttgcatcaagattttgtaaaggaacaagatgatggtagggtggttccccacatctgtctaaatatttgttaaaaaaaggacaaagagttgtgatttttaagtgctttgaataattcatatctttccattaaagaaaaaaaaaaaaggaagtaactggccgggtgcgttggctcacgcttgtaaccccagtactttgggaggccaaggcgggtggatcacatgagttcaggagttcaagaccagcctggccaatatggtgaaaccccggctctattaaaaataaaattaaaaaaatagccaggtgtggtggcgggtgcctgtaatcccagctacttgggaagctgaggcaggagaatctcttggacctgggaggcggaggttgcactgagccaagattgcaccactgcactccagcctgggcaacaaggtgagactccgtcttcacaaaaaaaaaaaaaaaaaaaaaaaaaaaaaaaggaagtaactgattatattaaatgcatattcccaccactttgtcattcattctaagtaaataataaagttaaaacataagacatgaaaataaaagtaaataatgttaataagagtaaagaggcagtgttacaaagagtgaggaggaacaagatcaaattttaaattcagtgaggcacttaagtcattaaaccttacttttttcatctgtaaaatagacaccatagggttgttcatgaagttggaatgagacaatatatttagaaatttaaaaaacaaaacaccagtgttcaagttccactcctagtgggctttttaatttaatttaattttttttatttgagacagaatcttactctgttgcccaggctggagtgcaggcatgatcatgggtcactgcagccttggcctcccaggctcaagagatcctcccgtctcagcctcccaagtagctgggactacaggcacacaccatcatgcctggctaatttttatttatttatttatttatttgtagagacagggtctcattgtgttgtccaggctggttttggactcctgggcttaagtaacccttccgcctcaacctcccaaaatgctgggattacaggcatgagccaccacacccagcctcctagcactttcttgagtggacagtattgcatagtgaaaaacgcatgtgaactgaagttacgtagacattggtttaaattctggctttgccatttacactgtgcacctgtgaatgaatgctttaatctctttgaaccttcctttcttcaactgtaaagtagcttttatcgtatcacccttgtaagataaggcatagggcatgggctctgccaagacacttaggaactccagaacttgcagcttatcaaacatgagtgttgatctgtttggcgggggggggcttctgtgtgtgtggaatatggtaccattgacaggtcccttctggagcatgaccatggcgtttcttttgcatttacagctatcttccagagggccacactgggcatggacacccttttccctgcctggaggagcacaggtgatagtgtaattttccagtcacgaaactgctaaggccatctcaggggcgtgtgcgccaggataggcaggcggcgtccgaggaccacatagccatgccttttggtctgaagctccgccggacacggcgctacaacgtcctgagcaagaactgctttgtcacacggattcgcctgctggacagcaatgttatcgagtgcacgctgtcggtggaaagcacagggcaagaatgcctggaggctgtggcccagaggctggagctgcgagaggtaagaggggtgtgtctgtgtgcgcatgtgcgcgtgcatgcgtgttgggtatgtgaaggagaactcaccgaagggaccagccatctgtttcttggcatctgttgtgttttttggcctaagcgacgatgtgtttataagaatcctgttattcttagcacggctgtgatcttatccatcattggatggggagacttgaacaccgcctagagctgcatggcgtggcaggtttccttttatttcagctggggaagaggttttgggggagttgaaaatgagagactctccccaccaaagtcatcttctctctttaaaacaattgagtgggtagctggtattttggcattctggctgcacattaaggagaaaaaacgcccacatacggatgcatgcagctgccttttttttttttttttggttgtttctatattttcctctaaaaaaaaaaaccccaccgaataaagagaaaaagcatttagagtgagcatgaccagtgaggctttttgtgggagcctgtaaaacagaggttttcttctttttaagattcctcacagccctcgttgccttcacgccgtctgtgagatggcttttaagcaaaagcagggctgaccacttagaaagtcatgctatcactctttagaagggactttcagagcagtatgttgtttttgacagccaagcccttcttttttcagtcatacagacgtttaggacaagagacttttgtgagcaatccacacttcagcatctgtgtcttgagagctgtctgacatattgagcagtggggaaggtggtatggttgagtggttgccaatactgaatgactgcaagcccctgaggctgagacattcctgagggcaaggaaaagctgtgtgtaattgtcctaggtccctgggctcttggagagtccaagtgacagcattgcccaggacctcgatgacagaagaggggtggcaatcactgttggaagtgattgcatgtggcctctctccacctgcttacaaaggaatgggggcccaggagggtcttcctctcccctttcctgctctgaaagtcccttctaaagacgtcttccacaggctggctgtttttctcagggaaactgtttcacctgaaatgcatctgtctcctgctgttcttggtgtttatactttggtttcagtgatcaggtattccttttaggtatatttttctgtgcaggagactgtcttggacaatggatatatgtattagtagcttggtaactgccacagtagaataaatatgtgaaatgttctcatcttgttgacgggtagctggctctttttctcgttggtatcacgttaggatacacacatttaaacacacatttgcatgtatgcatgggcataaaggaaaaacaaatactgattggggaagagacttgtctaagttcttatagaaaactagtatttttacttttaagtacttccagtcactcaaattagagcaactaattattcctcatatgcatcgggggacagtgtagcatgtggttacaagtataggcattggactcttggtcttgggttcagcttactcttctgtcatttattagctgggtgacaatggaaaagttactgaatcttttgaggcgtaagtttcctacctataaaatggcaataataatgcttacttcacagggctgttgtaaatattaaaagagttcctgtatggaaaatgtatagtgctgtgtttaataatttataattgttcaaatttgagagtcttaataaacaacttaaaaaaaaaccattttttgttaaagaaaatattgaacaaccatcttgtgccaggcacttttttagaacttggtgaaatgaagataaataaggtacaattttaccttcaagacatgcacagaacaataggggagtccagcctttaaataaacagttaatatcgaatgtggtccaagctaaaatagaatgcaggggtaggcccaaaaggcgatggctgtccttagtgttgtgcagtgtgcaatccagcccactgaacactgcagtcttgctggtgagagtgaaagagttgatggaagatgaacatagccttcactctgaaccaaaacttgaaggacatgtatcagtccagcaggtagaaaagaaggccatgtcatctttagtgtgggggactggattatcaaagatccaaggatgtgaaagagcagccaacattttgggggctgagaaggcatccctctgaatcaccgggtcaagctagagtttataacaaatggtgggaggtgtgtggagatgtgtatggtaataatggctttcaacagactattggttttctcagtgagaaggcgaaagtcaaccctggatcatcccacaactaccttatcacaaagaataaaacagtgcattgccaagtgtgtgccgtagtgtgattgacattccattgctgaggtggggtttgtgtttaatactgactttattttgacacgtcctaatgggtgcatccgcattcgaccaaatcactttctttttgaattttatgctttccttccatgacagataacattgaagttgtgcccttttgggaatcaatcctctagatactcctgaattaaaggatcagatagagtaatctgatactttgttcttcttttgcacacacacaccttaaagaagaatgcatcctctatccaaaagcagaagtaagaggaggtgaactcagggtctgctcctcataccttgaatttatatttgggtcatttttcaaatagagctgatgctgctttagaggagaaggtgacaaccaatctaagatataacaaaaagtttagtcttttttgggaggggtgttggggcctaactctattgcacaagatggagtgcagtggcatgatcatggctcattcagtctccacctcctggctcacgtgatcttcctgccttggtctcccaaagtgctgggattacaggtgtgagccacacacccagccaaaatatatttaatctttttttttttctagttgagacaggatcttgctctattgcccagactggagtgcactggtacgatcatgactcactacagcctcaacctcctgagctcaagtgatcccacctcagcctcccaagtagctgagactacaggcacatgccaccatgcccagcaaatttttaaattttttgtacggatgggatctcactatattgcccaggctggtctcaaactcctgggctcgagtgatcctcccgcctcagcctcccaaagtgctgggattatagatgtgagacactgtgcccagggtaatatgtttagcctttatgaagtcttggaaactagattatggtggatatttggctttgccattagaagtagtttaggtatatcataaattttgtaatagctttatattaggaaaggatgtatggtggattaaaatttttttattaaattttttatttacattaattgttttgccactaaattttattagataatttttaatagactttatttttacttttaagactttgatttcttagagcaattttagattcacagtaaaattgagaggaaggtacagagaatttccatatacccctggccccgtgcatgtacaccctcccccactgtcaacatcaccccccgagtggtacatttgttatgattattgaacctacattgacacatcattatcatccagagtccggagtttacattagggcttacttttggtgttgtacattctgtaggtttggacaaatatgatatgctgctatttaacatggctttcagaaggatccaggcctggttcctattgtcagcaaacagtcatgctctgggaaagctgaatgtgatagggtccctgctcccagaaaccagatagggtctttgctcctagagtttagagaacaggacaaacaagaaacaaagcaaggggaacggcttgtgctgcggtacagaaacaggaaagaacatggaattttcagggaaaggcagaattcagtttgcactgatgtgtgtgtgtatgtgtgtgtgtgtgttagaattttcagggaaaggcagagttcagtttgcactgatctgtgtgtgtgtgtgtgtgtgtgtgtgtgtgtgtgttggaattttcagggaaaggcagagttcggcttgcattgatctgtgtgtgtgtggaggggaattttcagggaaaggcagagttcagtttgtttgcactgatgtgtgtgtgtgtgtgttgtgtatgtgtgtgtatgaaagggtcgtggaagggaaggagggtaaaggaggaaggggcaggatggagtctgcttttgaagggtttgctgtgtctgcctagggagttttaactagatctataggatagtatttctaaaataagttacaaaggataattaccaccttttgattgtatatactctgctgagcagtttccatatatcagctcatgtagttctcataacaagtctgtgatgtgtccctactcttgctgttcctatgttacagatggggaggctgcagcatagggtgacctgcccacagtcactgggctggtaagttgtgaggccggttcaaaccctggcagctgacgccactgttccagttcccagagacttgtagtgggggagcagggagtatggtaaaatgctttgggaaacattctttcctcaattctgtagtaaaagaaagaaaacggtgttccagtaagtgtttcacagttatcttagccttccagaaaatactcttttgaactatgtggggaataaaacattgctgtgaagtgtaaggtcatcagaggactccaaggaggagcatgacatggttaccttgcatgttaggtaaagaactcagtagaactcagtagtagaaaagagtggggatcggccaggcgtggtggcttgcgcctgtaatctcagcactttgggaggccgaggcaggcggatcacgaggtcaggagatcgagtccatcctggccaacatggtgaaaccccgtccctactaaaatacaaaaattagctgggcgtggtggcacatgcctgtaatcccagctatttgggaggctgagggaggagaatcacttgaaccagggagttggaggttgcagtgaaccaagatcgcgccactgcactccagcttggtgacagagtgagatactgtctcaaaaaaaaaaaaaagaagaaagaaaagagtggggatcagctgggcacagtggctcatgcctgtaatcccagcactttgggaggctgaggcgggcagatcgcctgaagtcaggagttcgagaccagcctggccaacatagtgaaaccccatctctactaaaaatacagaaattacccgggcaaggtggtgcatgcctgtaatcccagccactcaggaggctgaggcaggagaatcgcttgaatctgggaggtggaggttgcagtgaggcgagattgagattgtgccactgcactgcagcctgggtgacagagtgagactctgtctcaaaaaaaaaaaaaaaagaagaaaagagtggggattggaggggaggaacagagatgccagtgggcacaactgtaaacctggcaagaggtcatgagatgaactgcttaggaaaagtgtgttttcattgttttaaagatgagggaaaaatcagggataagttgctgcttgggagctctattaacaaagaaattccagagatataggaagctcagaaaatcagaattccgataatgtcattataatatgtctggatcagtgggtttaacccttttctgcaaatctttggtggaacatggatgtgtaaatggagctgggccttttacagaggagataggatatctggagccctatctcagtttgaaaatatctagcctaggttaagggaaaaagagctaaaacaatggtgccttatgactaattctcacggtttaaaaaagaagtacatgaaaacacagcagagtttagtggctaggaatgtcagcttggaccaaactgcctgagtttgaatcctggttctgccatttactagctatgtaaccttaaatagctactgaagtaccctgtgcctcagttttcttatctgtaaaatggagatggtaatagtagccacctctacaaattgttgggaggattcagagagttagtttttcatagttgccacagtctcacagtgcctggcataggaagcactcgatgtggctgccttctttgcaaaacaccacccaagccatccagcctctgccatgacacttccagagactgggctgtcacccttttgtaagtctgcttgttccatttttagatgactttaattattagaaactggggccaggcctggtagctcacaactatagtcctaacactgggaggccaagatggaaggtcacatgagctcaggggttcaagaccagcctgagaacatagtgagatccatctctacaaaaaaaataaaaaattagccaggcatggtgatgcatgcctgtagtcccagctacttgggagtctgaggcaggaggatcccttgagctcgggagaatgaggctgcagtgagctattaacatactactgcactccagcctgggtgacagagtgaatctctctgtctctctctctctatctctctctctctctctaggtatagatatagatatagatatagatatagatgaaactgtgatcttatattgagttaaaatagcaaagtctttcagttcctcgaacagctaggattaatttaaggttgtgctgtccaatatggtagccacatgtggttatggaacacgtgaaatgtggctattttgaactgaaatgtgtggtaagtgtaaaaacacatcagattttgaagacatagtatgagaaaactaaaatactcattaattatatgtatgtttgagtacaggttgcaatgatattttgaacgtgttttaaataatatttattaaaagtaatttcacttttggtacttttaaatcaatgtggcttctagaagatttaaaattaaatatgtaactcacatttgatttctgctgaacagtgctattctaagaaacgcaaggggggcatttaatggtaatagtgagtataagcatcctaataaaatgtaaaaatatgctagaataaccttggctctacttttaacttaacaagtggaagaaggataaatgatataacaaaggcacctgagatacccttcagttcattggtaaaccctatttgaggtagagaactgctgtgaggaaatccagcgctctggagaatggtgactttcataactctcggctctctcctaaggctaagcctaagagccttggtttttaaaagagtgtaaaaaagcttttaaaaaccaaactataatcatttcaaagagtaagtccttatcctctaatttatcccctttttcttttgcaaatttatattttgatctttactaaaagctgttttacccaaagctatcactacagtagaaattttccacattttgctattttcataatgactagagattataaagataagaaacttaacatgcatttcctattatcacataaaagttaacttacatgaagaatatttctgtggtttgatttcatgctaatcttttggcaattaataatttatgtgggatttggggggtactcaattaaatgcaacacctcatgccctggcagataatagtggaattctgctgtattttatagcttgtttaatcacgtcagtatatatgtgtatttgcaaaggattaaaataatcaatgctgattaagaatcgactgaagagtagactgctgggggagatttctcatctttaagttttgtgttgctttttgtctttgtaaaaatgacagtgtgaaacattattagcttaatgtcaatcctagaatgtaatggcaccggcatctccattttctaggtatagagattgtgggtgaactattcgccagtcttaacttgtacgtcttcatctttctgtgtattctaggtgagtcgtacagtctcagaagagtggtttttcttggctatgggacttgcttcttgggtctgtgttactctgcattttcttttcatgtacttttataaagagattggctaggaaaatgaagagggtgcagttgttaattatagatgtgtcagttatagaaatctcagacctacccagagtagaggttgattacacacaagttcttttctaccgttatccaactgatgtacagtggcttattttccaaagccattggaatgtaattgcatgaagtgctatttcagagtctgcttatagtcatcttttgaagtattttccatgcctcagtgaaactgttcgtgcttgtataatatgtaattcatatattttatgtggaagcacaccatttcttaatttacagctgaaatattgggtaagataggcaacctattacaacttaatgcaagatattttaaacttttgcttctggatgagtaactcttcaaaatgcttgagataagatcatggctttaatccttggtaattgccaagactgcatctaaacctcttacaaatagcattaaagtctgtgccattgtcacaaaactggaaaaacaaaaccctcaaaaaatatttcccttttaatagctaaggtgggggattataccatctctttacaaataaatgaacaaacaaataaaaaccaccccaaactactttttaatagattttatttctttagagcagttttagtttcacagcaagattgaacaaaaggtacggagagttcccatatgtcccctgccctcaaaactacttttaagggcccttattctctagaatctttccataataccaaaagatggacattttgacgctgtagtatccacacaccaatctgccactgaagaaactagccgattttttagtatatgcttaaatgtatgtttcctgtgttaaaatgcagtacaccaaaccaaataaatgaggaagctgctcacataaaaatgacattttagtgtggctttccctacttggtttcatcgtagtgcattttttgtaagtggttcagggatgtggttcttgtccctgaggactggctcttctgtcttcttttctcatcattgcagtaaacttattgcagaactcatggcaccagagctgtgtgttctagttttcttaagaaaactggagcaataaaatgggattcatacctcacccagaggaggtatcatgaggattaaatgagtctggcttacttttggtgcctgagatataaacagaacagatatttcaggcatttactcaggtaatatgatgggatcctcttggtgtcatggagaaggtggtttctatttgcaatcatccaccatgctttcttcaaccatgtggcaatgtttagcagctaagcgcagctttcaaaattgagctagagtttaaattggcaagttaaccacaaaccagcctggtggggtctcagctgggcttgacaggattagtagttccttggataatacacaggaagttgattggtgcacatgctagttgaaatgagagcctaggctctgattccatttcctgtgaggcactgtgtagacgtgggagaataaacatgtgctgtattggactttcaaggcagggtctttctactccagagtaggaaaatagctagaggaagaacgggaggagtagggtgggaatggaaaaggttactttgggcatagcttcaaaaatcagggtggggatggacttttcttcctgctagagaactgaatttgacagttctaaagttaggatgttctggctgtgagtagatacaaactctgtcctccagattacctgcctcccccaattctgccctgcactggacaccccgtttcttccatagttatgtaattatttcactggataattacctggtgagtcaccctgaaatattctgtgtcctctggaaggtgctgtacaacagcagtgataaatttatgccatgaattaggtttttctattagaagtggtttactttgttatttagagctctggctcaagattattgccttactatcatttctcttgtacctcatcatcctcctcaacatatccatatgtgtgtatgcacaggagtgtgtgtatgtgcagctgtagtgtgcattttgtgtgtgttgtatgtgtgcacatacatgttcgtgtgtatatattccatggaatattctttctctgagggatttctggggtggaggtcaggtctggtttaatgatctggatggatgggaatgagaaaaggaaatttaaaatagctttcaagacacagaagcaataaaaattttaaccgttttttaaaatcgattgtagaacatttatgcagttactgtggccctctataatttgaatattactaatttgaatgaagtgtggaccataaaaatatctcccaaatgtcaaaactacttttagtgaaagatgataaatcatggttagcctgttaagcaattgtgaagttgccctctgtttctccactaatgcttataaaagggctcttttccaactttaataattgctgcatagcatgttaattacatatattacataatttattatatggagactcactcctaggcatccaaaataccatggaataccctcatacagccctgtgttccctacaggaattcagtataatgcagagctactttggacccttttcagataagtttcttgaattgaatacccaaatgacttcatgttaaggttagcttaagcctacatcatagatctcagaggatagcatcagagtgatgttccagtgtcccaatatcatctctcatgagatcctcaaaatcttagtggaggtatagctttgtgatttttttccttacatcttttaaatatttatgttatttgtagatgttctagcttctacctttgcctgctttttctcattgactcccagataacctctgtttcctgattctctggttcacagagatgtcagtagtgctgatgaaaaagatttatgaggtttacctgctttgatttactgatgatgatgatggtggtggcgatggtggtggtggtggtggtaacaggagtagtagtcgtgcagccgcagcagcaatagaaggtaccacttatgatgtagttacttaccatgtgccatgcaggtgattgacaggcattatctcatttacacctctcagagcctgtgggcaaaagttgtaaccatcatccccattttgcagaggagaaaactctgagagtctagaaggctcaatgacttgtgtaaagttactgagacagtgagtgcaaaagatgggagatggactgacctccaagtctgttttctttctattcagccacatttcatttcctctatgtcatcactcaggttggaacaactaatggactcagtggagctaggaaatgaataatagggtcagaattcatccaagtaagtttgtctaagttgatagaaatataaccttggctctggttggcattttgttgctcaagaaatgcatagatttctgatgtgaacttgtcctttggaacatcatgggagaaagctaatcaaatcattacccccatctcaaagtaaatccatttaaaatatctttaaagcatctgggtctgcagctttatataggcaagggcacgtctggttttctagtaaagtcagagtcatagcttcatgagagattttggtggggttgtggcagggattgatctgtataatgttgagggggcagccagctggagtgggaacatcagcataagaatgcctttggaaattgaacattgtaatgaaaacattcttttgaaggcagatttccaggtgtgctgtaaaccattctaggctataattgagatataaaagaatcttcaaaagcagtgatctattttttggtgattgttgtgctaatcctgaaatcctagcatgaattaatataaaagatgggattgggtgcataaaagtacctgttttaatcatttagcatgttgttcaaaactaaactggtttaggcttcaagtctaagggcgaaaatctcactttcatctaacaaatcccaccataatctgccaagaacagccaccaggggctcctgcagcagctgtgaagaggcgatccttcctctctcaaagcttgatatggggagagatttgctgcagttcgtgtataataaagtggaagaggatgatactttttaaagcacacgaaaagagtgaataaattctccgttaaaatctggtactgtatgaaaatattctacagtgcagaagctttcagttggcaggcggttttgtcttaggaattgagtaataagttacattgcagcaggtgcaggagcggtgttggtctttgccagtgtgctccatgtgagatcatgaagcatgcagaaggcacacagaaaaggcagtcttcagatatcaggggaaaagtcagcactatcccttccctgcgcgactccccttacctcacatgggcgctttggtatctgcaagcacaaacagtagtaatgagtagggatactgcatctggatactccatgtatgttacagtagtgtgtggttgtggtttcttttgattagtcccaaagttatatgtcaaagctggatcttatatatgggctggggaacccagggtgggatgcagcatgctggagtctcgtttcttgtgtggccttgggatgcttgtggtgagcatgaactgatgctattttacccttttatctagacgcactactttggcctttggtttctcagcaagagccagcaagcacgatgggtggagctggagaaacctctgaagaaacatctggacaaattcgctaatgagcctttgcttttctttggagtcatgttctatgtgccaaatgtgtcatggcttcagcaagaggccacaaggtaggtgcattttccccctgtgtgccatataagggtgttgactaactgtgaagcttccaatgaagtagatgagctggtagatttaggggtgtgtgggtgtgggtgcgggtgtgtggtgggggagagggtaaaatagttgggggttgtttactcattgctttgcagctttagagttttggttgaatccatgtagctaaccccagcagttttctgtaatgctggtaaggtagtagggatcctgagccaggcagaatttcatctctagcagcgtggaaatattcatcggagactgtgggtaaaataggcatgcaagaatttaataaaaaattaatgacctggccaggcgtggtgtctcatacctgtaatatcaacactttgggaagctgaggtgggaggagagcttgaggccaagagtttgagaccagcctgggcagcatagcaagaccctgtctctacaaaaagaaaaaaatataaaaactagctagacatggtgttttgtgcttttagttccagctcctcgggacactgaggttggaagatcacttgagcccagaagttcaaggctgcagtgagccgtgatcatgccactgtactccagcctgggcaacagactgagaccctgtctcaaaaacaaaaacaaaaacaacaaaaacaaaaacaaaaacctaattctgttttgtccacccttttcctaaaaatatccccaaacaaaatgtggtatcagacttcgaatttgaagattggaaaggtaactaaaagtgggagtaaagttaaggaggaaaatgttgcgagagcaggagttttgatgattgtccctactaaataagaggagacaagaagccatcagtagaagaggagaaccaggtattgcagctactcagtgtctgctttagcttggagaaaccgtgtgctgcctttgaaatgatgttttcccctctcatctgtaaagtgagggatttgtgtaagttcataaagcatattcagtgaatggaataagtgcatttttttgatgttggtatagttcatttattggtaagagttttccattaaaatacctgggaagtctcctcatcaaatggatatttctggtaggaaaaggaatcacataaaccctttactttttgccttttacccggaccttgtcattctgaatgcttgggaagcaatgcgggaacatgctttgaagaaggaagagtattctacctgacttttgtgtagtttttagattttaaatttctgatataaggatgctcttgaaatttttaagtgtattttaaggcaatattctgcttgcttgctttttctttttctttttcttttttttttttaatttgagacggagtcttgctctgtcacccaggctggagtgcagtggcacgatcttggcttactgcagcctccacctcccaggttcaagcgattctcgtgcctcagcctcccgagtggctgggattataggcgcctgccaccacggctggctaatttttgtatttatggtagagacggggtttcaccatgttggccaggctggtctcgaactcctgacctcaaatgatctgcccgccttggccttccaaagtgctaggatgacaggggtgagccactgcgcccggcctctgcttgctttctttaatttggcttttatttatttatttatttatttatttattttgagatagagtcttgctctgtcacttacactggagtgcagtggcacaatcatagttcactgcagccacaaactcctgggctcccgcaatcctcctgcgtcagcctcctgagtagctgggactacaggcatgtgccaccaagcctggctaaattttcttctaattttgtagagatgaagtctcgctgtatttcccaggctgtcttgaactcctggcctcaggtgatccttctaccttggcctcccaaagtgcttatttttttcactttcgttctttccttttttttttatttttatttttaaatcaaaaggtattgtaagtagatggcataattgcaaacagaggccgtgagttagcttacagcttgatccaaaaaacctagtgttcagtttttcatgtgatagacatttaaagcactctgttgcataccattgctccctgttttcaagttgattcacatatccaagttcttcctgtacaaaaaattattaactcctcaaaatgtgatgatttccgttggcttttgaatcctccttgagtactttacacggtgctaggaacacagcattaagttaataaatacttgctgattcttggctctcggccattaagtgcaaggtaatgagtgatgagggtgaaacatggactagaaattagtgtatattgaaaaaagttctgtctgtaagaaaaatgaagtattgttactctagacagacctatcctgtaaggcctattggtgagaaagagcagttgaaataaagagggactcagaagttatgctttatgaagttaaaagaaaaaggttgtttaagcttagaaaaattaagtcggccgggcgcggtggctcacgcctgtaatcccagcactttgggaggccgaggcgggcggatcacgaggtcaggagatcgagaccatcctggctaacaccgtgaaaccccgtctctactaaaaatacaaaaaattagccgggcgtggtggtgggcgcctgtagtcccagctactcgggaggctgaggcaggagaatggcatgaacccaagaggcggagcttgcagtgagccgggatagcgccactgcagtccagcttgggcgaaagagtgagactccgtctcaaaaaaaaaaaaaaaaaaaaaaagaaaaattaagtcttacaagggcacagtagtagctgcctttagatatttacagactgttgtaggagggggaattctttgtcagttctggagcacaaaattaaggtctaagtaagtgaagtccaaggagccaaagaactttgactatttggctcaatgtaggaatacagtttctagtaactaagccatctaaaaatggaacaagacttacaaaagggtgagagcactggtctctgtgaatgttgtcacgtggaccaggtagcccatgtggtatcctgtagagggagccaccatattgggtaggatgttggaatagatcagtggttctcaaaagaccagggcctgctgtatcatagttacctggagcacttataaatatgattctagagctgtaccagaagtctggttgtaatgtctagagctgagaatcaagaggatgttattgtttaaaatgaataggccgggcagtgtctgacacacggtggctcacgcctgtaatcccagcactttgggagaccgaggcgggcggatcacgaggtcaggagatcgagaccatcctggctaacatggtgaaacccgatctctactaaaaaaatacaaaaaaaaaaaaaaaaaaagtttatctttagagtcacctgcatttagcaagtagtccnnnnnnnnnnnnnnnnnnnnaaaaaaaaaatacttggaagaagttttacaggactacttcctccctgccttaggatatttacagactgttgtaggagggggaattctttgtcagttctggagcacaaaattattttttaagtaagtgaagtccaaggagccaaagaacagtttattttttttttttaagaagacagattttttttactaacccatctaaaaatggaacaagacttacaaaatggtgagagcatttttttttgtgaatgtgcacgtggaccaggtagcccatgtggtatcctgtagagggagccaccatattgggtaggatgttggaatagatcagtggttctcaaaagaccagggcctgctgtatcatagttacctggagcacttataaatatgattctagagctgtaccagaagtctggttgtaatgtctagagctgagaatcaagaggatgttattgtttaaaatgaataggccgggcagtgtctgacacacggtggctcacgcctgtaatcccagcactttgggagaccgaggcgggcggatcacgaggtcaggagatcgagaccatcctggctaacatggtgaaacccgatctctactaaaaaaatacaaaaaaaaaaaaaaaaaattagcccggcttggttgggggcacctgtagtcccagctacgcgggagtctgaggcaggagaatggcgtgaacctgggaggcggagcttgcagtgagccgagatcgcgccactgcactccagcctgggcgatagagcgagattccatctcaaaaaagagaaaatgaatagtactcctctggtgtttctgacactcacccagcctcaggaatcaatgaatcagttaacctctaaaactctttacaattttagattttccaaggaagtaaacttaatgctgcattgtttgactgtcaatgtttgcattcatagactaaaacaaaaggtatttaaatttcaaagagggaggtatagagtaaaaagttttggtagtggtggttattaactgtgggatttaggaaggacttttcttttttctttagaatttctttttgcttaattagcctggtttatttcagatgaaggttgataaggagggaaagaagtgttttccaacacaggattttgaagcaaactgtgttgctgacatttgatcagaaaaactaacaaaaaattttaaactttgaaagatatttttagatttaagcgctggaactaaattatgtagatttcaggtctaaccaactctttatggcaaagaatgttgaaagttaggagttggattagcatgcaacattttgtctgtgcgtgagtatgtgtgtatgtttgcagcattgcagaaatttttgttgcctccaaggggccctaaaactggaatgtgccaaggggtgtcagagtgagtaaaagatttaagctgggaatatggaggaacatgagaaaaaaaaaatgtaagaaatcaaagaaaagttgttaggaagaaaagaataaaggaattacatttatttgggaaggttgagggccaccaacaacgatcaggtgtgattcagcaagacatgccgtaggttgtaggcttatggactagagaataaaggagatctggtttggacagaataacatttttaaatgcttgagttttctcggtgtggtgttggagatggacagatgtgctcaacacaaggtgaaaaatgctacagtccttaagagcctttgggaatctcagccttcttgggaggttttagcagcatctgaggtccgaactgaatattgaaactgccttccaggcagctcagccaaggggaagcagtggtggtggggcaggattccagaggaatgtttcacagaaggccccaacaacattcattaggagcgggttaatgactaactctccagtcatccgctgttatcccagttaccaggcatctcaggtggagatgggctttggcatctctgagagcacctgggatctgcagtgtctgacacaaaacagttagtctttgtgatgccctgcagagtaagatatttgcatagattagaaatagaaatctgtctttcatttgcgggcaacccgttggaggaggcaaccattcagccatctgtgctgaaaaaaataagcctttgtctggagccaaccaaacttgttttcatccaacacatgtttgcaatggtttggctacttctgtttgagaacaggttctatagcattagtcatgaccagccatttcttctctctgaacaaggacaaagagtctagattaatactctggttgggttttccttttttttttgctgtgtatatgaacccatatatatatcaagacacataggagtcaaaggaaaatacatttaaaagctgtttatttaatttgttgtccccagagaatcacacccatggaaatttttaggtcagtagtgtattcagaacaacacaacaaaaatttgagagtgacattgattgcaaattgtttaataaagtgattggctttattaaaattatcaagtccaaattggtttaaattagaaaattaggaggcactgctttttttgacattaatttgacatactgtgtctcatctgctagatatggcttttgaggggcaagtcccttcataagtgagggaaacctgccaagacactatgattgtgttggataagaaatggataactcaggccctactttaaggtgttaattgaatgagaaaacaaaatatattaaaaggaaaatacacacagggctacaaataaaaggaaaaaagaagaaatcccttgatattgttatagaaatgttaaaagaaaatagtgaaaagaaggacacactctggtagacagatgggggatgagtcatgaaaccataggatttaaagagattaagaaccaccgagtttgttaaccccaaactgtaagatttattaccttggggctttgaaaatgttagttttcccctgttggttaaaatgactcaagggatgggaccactgtaattttttccattttgctttgcttctcagattcctttttgccagcttttctgtccagcaaagggactcttgagcagttcatcttccccagcatgttctcctgactcaaaggaaagatttttgtaatgtgttttaatgatttgcatagcaacaggctcattataaacacatggttttcacatttttctggacacggaaagaaaaaagatggcttctgagaggtggataaattcttactcaaacagaaggatacttaataatagcaaggggaagccagaaaattgctggccaagatcactgcttttagtttaggtctggggtttttccaagtcttcctcaagcatggaagtccctctttaatttcttcaatactaaagagaaaacttttaaaagaaaacttaatttttgaagagtgaatttaggctacaaacttctaagttgctgagtgcatgcatggtttctaaaatttttaattttgtgtgtttttttttttttaaccaaaacatgtttgtctttgcattactcactgttgaatgttatggttgcacagtgcacaggagcttctaattgtcctaatgaggtcagataacatttcctacttttccaggacatcttagtagcctgcctgtttgggtggggctgtccaccctattaatggtgagcactctacagaattgacagagtgcaactactgctgtagccagcacggtcattccatttgccaaggatgattttagtacactgtcgtacatctggcagacacatcaggcccacaggacctgttccaagtaccctctatctggtggatgctatgtctgttttcggtgcttctcagcagctatgggtatcccctactcttaggatcagtgatctattgtacatctcccagttcttccaaagtcctgggtattctagtcagccaggtaaaactgcctagcagttatcaccaggaggatttttaaaatacttaatctctgtatgggcttgcatggagcattcttaaatgttaaagatagttcctgtctgggaagaaccaagtggacaggttgtctttcaaccaactgagaataaatacccacatttaaagctgtgctgtttaggtaccagaaagagggtaagtgcatttcagcgtgtgaagtgagtgacaagggagttaggttaatgcatttttaaactatgatgggggtcccctttttccagttacatatttgggcccatggcatgttgatgggaaagccagactaagtgaagctgtatatcttcataagggttaaaatggtgttttggtgtgtgcatgtgtgtgtctctctgtgtgtgtgcatgtgtgtgcttaaactaggtttcaggaagtgaccttacagtagctttcttcacattttctttcttataaataccaatacttttcccccttagactcctgcaatctgccttgtgtgctgttgtaaacaagttagtgttcaaccagtgtttaaagtgtctgttttaaaagctctaattatggtagtatttccatttccttttacaacaccctttattttgttcctccagttcttttagttcttttattattttgaaatgtcattttactggatatttaaagtctacccgtgggctgggatacagggactcccttcaagtcttaagattaagcatgaattccctgtggataatataatttgctgagaatagcaaattctcctcctggccagctccagctagtgaatgggaaattgttctctttatgttggttattgagaatggaattatttctgccagatattttagatattttaagatgcagttgacattgggatctaatctcaaacattctgtgtggttaatgtaatgtacaatgtgatgagagaagatggctgtctgtaataaacagtgcaaccttggagggaagaagaattaccttcccaaaatgagataagttgattgtcatttgcattgttttttatttcaacctttattaagtacctattctgtgttagacactttgctagttagtgggaatgtaataacaaataggtctcaactccccacctccctcccactctcactcccaccacagagctgtatctccaagcagcttttatttcatttccgtgtatttgatttactagaagtttatttgaatttgtctttaacgtctacattgctgaccctatttacttccaggagaaggcaatgccactgctttggtgaaacccaagggcaaatgtctcctgggaccaggaccagcttcatgggtctgtgacctgtgcagttagttgcacagtaccccatgctcagaagtgccctgtagttggtttagtgctctgctgttgccatcctgaagttttttggtttttcaacagtggattctgcattttcactttgcgctagactctgcaaattaagtaaccagcccttcccaggacaaggacagcctcctgttcctcatacatgcatctctgttcgttcacctctgcttgttttgttgttatcttgcgatttattcttaagtatcggtggatttactgatttgaatctactgttatgggtgtgatcaaagagaaaaagtaaatttaataaaccctcaagggaacaaaactaaaattttcactgtctttgcaaataagaaaatagaaatgtagcgctggtaaccatttctgcttctggatctgactcactgggaaatccttgcaggaattggggaggtggtgtaaagtcaatttgatttcttttaggaaagctgattggattagcttgtcttgatcctcaactaggattttcttatgttttactgtgaagaagactataaatcaagactatacagtagatgcctacttcatagtacaagttgtccaaatacatgaagttgcttcttgtttctttctttgctcttaagaaaaagatatggtgtgaaagatatgcagttaggctgggcgcggtggttcacgcctgtaatcccagcactttgggaggctgaggcgggtggatcacttgaggtcgggagttcgagaccagtctgaccaatgtggagaaaccctgtctctactaaaagtacaaaattagcctggcatggtggcacatacctgtaatcccagctactcaggaggctgaggcgggagaatcgcttgaacccaggagcaagaggttgtggtgagcggagatcgcaccatagcactccagtctgggcaacaagagtgaaactccgtctcaaagagaaaaaaaaaaaaaagaaagctatgcagttaggtagttagctattgaggcaacctactgctactagaacaatgaagtatagacaaataagatgaagttaacttagccgaagttaacttagccgtaaacataatctagctgtttctctgatattctttccctttagggaaaacaaatagtaaaataaatcagtgttcttttgtaatatcacttggcataacttattatttattgtaggtgtcctataatgaagaggaaactcagaatttcaaaaggaaataaatcagaggcattattcgtatttcaaaaggagtcttcatgtaatgtttgtgttctttaatgcatctgagatgtttgattgagatgctttataaagcaagatatgcttatacgtatgttttagccattagaaaaacaaagtttaccaaaaaaataggttgagcatccctaattcaaaaattcaaaatctataatgtaccaaaattgaaaactttttgagcaccaacatgatgctcaaaggaaatgctcgttgaagcattcaggatttctgatttttggatgagagatgctctactgggtaagtatagcaaatatttcaaaatctgaaatcccaaacacttctcgtccctaacattttgcataaggggtactaacctgtttagtatacttcaaagaagtgataattttattattacatctttaaatcacatggttaatgtgttagtatttggtctatttggaacttttctcaaaagcaaacaaaaataatgtgctattgagctattttgaaaataagttcttaagcagaggtattgatttttatcctttgtgaattccttgattttcaaagatacattcattcatttgttcattcattcattgattccaaattgttctttattagtgttacattgcaggactgagaaagattaaacaattgaacccatgaaataataaagatttgtaatagagcatgagttaaaatgttaaaatagtctactttttctaaagcttgagtagaatacgatgatgccacattgtagtgtttacctttaacaaaggtgtgaaaagaagggggaaaaacaacagaagctatatgaagaggtgttttgtcatgttgaagcatgcaggctgtgccttatgaatttttaagagacatccgcttcccataaaggattctcaagattgtaggggtatcattacaatgggtgggattgagaatggtgtgtcaatttcaaaaatggattttaaaaaaaatcttgacgttggaagaggtgcaaagaatagatgttttataattgtttgctctaccttttttcctgaatatcagcattgggacattcagttggagtggagtgggtggagaggaaggaagtgacagatgtgctacatccacacgttaaagaaacttacagtgtctgagcagcagcagaatctagaaagcacaagaatccaaaacctcaaaacttccccagcctgaggatattatagttctgtgtggttctgtggaaaaatgtagttgcgttccatcaccggatataatgtaacagtagtagtcatggtagcagctaacatttatgtgcaagatgctatgctaagtatctcagattattatctttttcagtcttcactagaactctataaagtgggcaccctgaaaaagaactgtttgttttttaaataacagaagttttttctctaacaagtggagtagatttaggtcatcacataaatggagtcttttatattactttgccagagaaatacatccgttcatgcctttcttcactggctttatcagagtaacagggagtttagttccataaaaagtcaacaaagaaatccagagggctgacctaccagtaagatcagagattattaactagtactatgagggctgattctggtcttcaggtgggttttgtttcaccaggatcatttttgaaagaactgaattgggacgccttgcagagaggcatgtgctgtctaactgggcctagttctccactccctagggagttaatagtcagcagcatttacacattcttgtgacctgtctggccttgtaggtatttaggtcctgactgccgatacttgcactttctgtataacttgaagtgcatctcagtacttgggtcagcccatatctcttcattgacccagttgattttatgtcattcagtgtccagctgtattaacactttagctgcctataagagactgtaggtggttgagctgagtgtgagagtataacttccctaagtgctcatttgaaaactttatttctgtgtaaagatcactccggagggctagattatatgtccctgtcaactttctactgcagagccatggctcaaattattcagatttcctctctttattgctcacaatatctgtctcatctctgattacccataaaaggttcatgcatagaaagagtaccaagcgtcttataggccaataaagacatcattcaaatcttaaacaaacacagcctatttgagaaagagccctttgccttatatcaagacagaccagaatgatagagttttatatctaaatatgagaccccacatatcaataaatcacagagaccagttgctttgttttacagatgaagaaactgagaaacagacagataaagggactctgcccatagtcacacagctgtttagtgacaagcctggctcttaagctggttctggaatggttttaggtgaaccaagcatgctgacatgggagagcccatagataggatttatttaaacgttcaaaaagtctttgccaatcctcccctcccctccccttagctgtaacagctaagacacactgtggaattggaagggatgagttttgtcaaagagaaggaagtagttcagacagaagaaacaaagggtagagggaaacaggcacttctttgagtgagtcctttaaatagcgagcattatgtagagagtggaactaaaatgggttttatttaacgtctttatcagtgatctccagccctgggcacatagtgaaagtgccaagctttcagatgacactgagtcctttagaagggtggaaaattgagacattgcaagtaaacagtagaaaggtgtcagcaggtgtcaagttaccaggtgtgactcaaataatgatactgctttctggtgtactttgtaaaagcagaggaggcgtaatcatagcgggacatgttgcaacatgtttcggtttacagcctcctaactctcaaggtcagctcgtcaatcttgtgcttgcagctggggagagtgagtagacatttcgcctgacgtttgctgccagcataaaaatgagttaccgttattcagagcaaatcccagcaactttgacgtaagtttaactgaaatgcgagttagacacatggtcctttagtagaaaatcacagagatgaagcaatgttggaagcaaatgcttttgaccagcataaatgttttgaagaaggtagaaaagatagatgtttatgacagtgactaatgtgagaaacccataggtctaactaaggaaaacatgaaaaaggtcggtaatttggatccttgaaataaaatggccaactgtgaaaagatagctactgatgaggatactgatggaaaatttgaagcaagttatgtatctgctagagctctgtatgttttgaatgattgttggaatcagcaaataactagtattttttggtttaatcttcaaggaaaataatagctggaaataaaacaataaaaaaaacactacaaaggagaacatacattaatgtgggaagtagggggaaaaaaaggaaaaagaaggagaacagacttgaagacctcactctctggtgtttgtttcttggtcaggctctgtaaactccccaaaattaagttcttgtgtttagaatcaggagatgatgctagcatagctattgtaaggatgagttcagaaagcatttgccattgtgcttagcatatagtaggtcttcaaataatatttgttttttttaaatgaaaagatatactagaaggtagcaggaaactgctgcatccctcagagagctgtgctggtatcagtcacctggcagaagattctctgtgacccacactaaccagaaacataggggaagaacattctgggaaatggagtgcagcctagtcaggttgagacattacaatgccactgtgaggcttcgtacattattaatgattagtaaaacccaaatcactgtaaaccataccctactagaaactctactgagtacaaattttgtactgactggcgatttccaaaattcagaattactccctcaaaacaaatgatttgatattattgaagataacttcaaatttgtccctaattccctcaggcaattcccaaaagtggaattgcaaacaataatttaagcaaacattttgtgttattatcatagacatgtattcccagggaggttccccaccctcattccagtcccatatgagggagcagatctgctgcagaggacgcggcctggtgctttgtcctgtgccgagtgtaggaaggctaaggttatcaggcccgagcaaggagacaggataaagcgggccttgcctcacagcttcccagatggtcagagcagctgttcagaacagggaagccaggttggctgccacaggacgggccaggctgacccaatggtaatctcacagtacttgtaacttgaagagactgtagtctgaaaagataaacagattccagtgaaagattatttaaagagatgatagactcctgatgagtgacagttatttaaaaaataaaaataagacattgggagcctgttggttctttgagtgtggtcttcacactacgtgcatcagtattgcctatggcattttaaaaaatatgtaggttattgtaccccagtcctgactccctgaatcaaaatctgtttttgatcattgccatgggtgattcttatcatttaagtttggttaaatggaagacaactgtatcctgatgtcttttcagctgtagctggtcttttctgttagtagatggatgttggagaatctcaggggggattttggggaactgggaaggaattaaagagttgcaaagcttaaaacatttggttcaggctgaggaatttagagaatagatggcgtggtcttatttagtagaaaaattgtgggcgtcttcctggggatcctagaaggaacagaatggagaatccaaggttcttctgtagcaattttgtacagtttgattgtatttcctctctttcagaatattttagccttctaggtagttcaacttctgtaatgcacaatagattatgcataatataatgagtaatacatctcctaaataggtttaggggatatattaaatactatttattgcataagaatttagccttttgtgcatcctttatttattattaaatttattattcctataagaataataaaaactggcctgaattatactactctaggaccctaaaaccttaaacacaacttcccactgtttctgcaggctttgaagttacagattgaattttaatttttaaagtgagaattttgcaaaactgagaattctacatatggatttcagtaattcttttgccactgtctgatttattgatatttactgcatttaggtaagtgtaagatgaaataataggtaaattaagaaaaaaataaaataatttcagccaaataaaattcaaggttgtgaaaacattatttctttccattatcagttatttgaaaaaatattatttctggcactggttcatgaaatacttgatttcaactaccaactagaagtacactatatttaagtaaaaaaaaaaaaatacagagaggcttggttctagatagcagttatcttaattttccagacatctgtgactacttccttactatatacattgagagattttgtgtgttgcatttgcatgcatacaagcacacccatgattttgtgatgtgctgactcttgttaagagtacttgaaaagcattttttttttttttttgagacggagtctttctctgttgcccaggctggagtgcaatggtgcgatctcggctcactgcaacctccgcctcccgggttcaagtgattctcctgcctcagcctccccagtagctgggattacaggcgcccaccaccatgcccagctaatttttttagagaaggggtttcaccatgttggccagctggtcttgaactcctgacctcaggtgatctgcccgcctcagcctcccaaagtgctgggattacaggcatgagccactgtacccagccctaactgtctttaaccaaaaatctcacacttactttaaaaaatatggtttcaaaatattttatccaccacaagttggcaaatggcaggtaaaagaaaactgtattttttttttaactttattttagatacaggggtatacgtgtgggtttgttatataggtaaattgtgtgtcacgggagtttagtgtacagattatttcatcacccgggcaataagcatagcacctgataagtagtttttcaatccttaccctcctctcaccctccatcctcaagtaggccctggtgtttgttattcccttctttgtgcccatgtgttctagatgtttagctcccacttaaaagtgagaacatgcggtatttggttttctgttcctatgttagctcacttaggataatgacctccacctgcatccatgttgctgcagaggacatgatcttgtcattttttgtggctgcatagtattccatggtgtatatgtaacatattttctttatccagtctaccaccgatggatatttaggttgattccatgtctttgctattgtgaatggtgctgcagtgaacgtacatgtgcatgtgtctttataatggaatgatttatattgctttgggtatataccccataatgagattgctgggtcgaatggaaattctgccttaagttctttgagaaatcgccaaactgctttctaccatggctgatttaccatgactaatttacattcccaccagcagtgtataagcattcccttttctcagttattttttgactttttaataatagccattctgactgatgtaaggtggtgtatacctcatggtggttttgatttgcatttctgtaatgattagtggtgatgagcattttttcttatgcttgttggccacatatatgtcttcttctgaaaagtattcatgtcctttgcccactttttaatgggattgtttgttttttccttgttaatttgaaaatctgtattgtttacacccagttcactgaatacttttttttttaaagggtttcatgaactatttaaccattatactctaaagcaggcatttttcctttctggtttaaaatgattattttctaatttaggacattgtataattataacataattataactagaatatgattagaacttcacttaaagctttgaacatctaaagaagaatggtgggttgaattacggatattgttgcctgttgctctgtgatacttgcattttatctcaacacacacacacacacacgcacacacacacacagcagacacactaccggactgaaccattttacttcttttcatcctggcccaatatataaataattgattagagagcattaaagtaggtgagggggaatcaatttcacttttgataacgggaatgaagtactcctatatttttaattgtctagatcaagtttgtgcaacccgcagcctgcgggccacatgcagcctaggatggctttgaatgcagcccaatacaaattcacatgggcattgtacagattctcctcttgtggctttcacttaagaaacagaattttgtaaggataagggcgttacaaatcatcaaattgaatccctctttcaagaaaccagtctcatagtcacatgattattgaccagggcaaagaagtccaggcatgtgcttttggaatggcatcctgtgccacatcctccactaaacatgtttcgccgtgggtccctctcccaccctgtgtgcagcccaaagaccgactccctattctgctctcggttcttccaccttttctctgggtcctcaacacttcatccagggcgactccaatttcatgtaattttcaaatatctttaatatctgcttctcatagattccttgcttttgatttccaaccacactttgctttttctatattaaaaattaaccacaaaatatttcacacttttatacttcctaattactatttaatatctctactaccattggatgccttttcttttttttttcttttgatttactttctgttaacttactcattgctttcatcagtttttatctgttccttcttgagtccttgaaaaagcatgtccatcgttgattttgcttatatttgcctcttgaaggttaccagaggacactgccagccctgggccaggggccttttctcacttttagacaacgttagacatggagagcccactcctcaaaatcctctctttccttggcttttggtgaccttcaccttatctcatctctgacctgcctattttcatcttgcaatctccaatttactggaaccctgtccttctaattttttccctctttatatttgctgtgcaatacagctcaattgtctttagcctttagaagtacttttttgggtttttcttgagacagggtcttactctgttgcccaggctggagtacagtggcacaatcacagctcactgcagccctaaactcctgggctcaagtgaacctcccacctcagcctcccaagtaactgggagcacaggcatgcaccaccatgcctggctaaattttttgagttttttttttttttttgtgtgtgtgtgtgtgtgtgtgtgtgtggaaataatgtctcactatgttgcccaggctggtctagaacccctcggctcaagcagtcgtcctgcctcagcctctcaaagtgctagagctacaggcatgagctaccacgcccagctctagaagtaatttttgacagatgtggcctaactttgtaccatttacccacattttattcttgatttcttgctgacagaagacagtcattcattcgtttatatattgaatatctgctgtgtgctgggaactggacgtataagcagaatacaacctttttcttaagcgtatatttatggcccctctgcttgttgttacattcttgcttcagtgtcctcagagtggtgatgacgactatttgtcaatcatctctacccacaatactctggctcaatcaatccttgtaggaatcagaaaggtagacagtgatgaactgttagttacttgctgccttctcttgattttaaatcctcccttaaatatcccatttttctataagtagctctaagattctttcactgtcacaaattgcaaatctgtcaccagagccccccacttcctcatgtcatttgttacactagaccctgccagtttcttcaagctccacctctgcttggtagacattttccatacttggagtcaaattgttgtctttgtgctagtagtcattttttaagataggctttttggtgaaatataacatatgcacagacaagtgcaaaaatgaaaagtgaggccgggctcacacctgtaatcccagcactttgggaggctgaggtggatggatcatgaggtcaggagatgaagaccatcctggcaaacactgggaaaccctgtctctactaaaaatacaaaaaaatagccgggcgtggtggtgggcgcctgtagtcctagctactcaggaggctgaggcaggagaatggtgtgaacctgggaggcagagcttgcagtgaaccgagatcgtgccactgcactccagcctgggcgacagatgagactgtaagaaaagtgtacagctcaatgaatctttgtaaagtgaacacacccatgcagtcagtcactagttcaagaatcagagcatcaccagccactcagaatccttcattgtgctccctctcagtgtttatggatcaggataaccatgatcctgaattctaatatcatatattagttttgcttttcttttaaaaaaaactttttaggtagagtaatacagtatatgctctttgatgtcttacttcattgatcaacattttgtgagtcatctatattgttgtgtatagagatcattcattttcattgctgcttaatattctatcaaaggaagacatacattacaatttacccattctacaaaggacatttgaattgtttacatttgggagctattacaaatggaactgtgttgctgtgaacatttctagtacatgtcttatggacagtctcacacaggctctcatgaatgtacttatttctgctgaatatgcatatgctagttagtagttttccaaaaattgtattactgccagcgaaatgaaaagcaaattgtaaggctgagaaatcttaaatacttggtcttatgtttcttttttctttctttctgtattgaatttgttattcattaaacaaatgttaagtaccttttatgtttgaggctctcaagggatatcagtaatcataaaagcaagtattgtggcatttatttagttgcaaatcctactgatttttttttttcttgagacagggtcttgttctttcatccaggctgtagtgcagtgttgcaatcatagctcactgaagcctcctggcccatagttcctggcccaggagatcctcctacctcagcctgggtgtagctgggactacaggcatgtgccaccatgcctggctaattttttaaaaacttttttgtagatacaagatctcactgtattgctcaggttggtcttgaactcctgggctcaagcaatccttctgccttggcctcccaaagtgctaggattataggcgtgagccactgcgcttggctgatctttcttaatattaacaatgatgactcctgacatttcatgagtgtttatggccaagcacaattctaagctcttcatccatattaacccatttagcccttgtaacaactttttgagttagtactattattctgatttcacagaataggaaactaaggcacagagaggttgagtaacttgcccgcacagtttgagtacatgacagagctgtgatccaagcctacacagtgtagctccagaatccacacatttaccactatgtgccgtacctttccagttaaatccattctagtccgctgtgcccccaatttatgtcttcttacctccagccttaaatataacgaaatggtaaagagcacaggctttacagtcagacagacttggatttgaattctgctctgccattcactctttgtatgttcaggtgagttatttatccttcttaagactcagtttctccatgaacagaagctcttgtgaagattatactggttaataaacagaaaagcacactttgtagtacctaacactatcatcattattatttgacctcccaatttgtatctgtaccacccatttatataatgtggtgtacataccaactctaaagcatccttctaaaggattgctttcatcattttccttcctttgtcaaaaatacataatgtcttaccattgcttagaagataaagacagacatccagaggcatttgaagcatggcaagcctctgtcttcctttttgtcttctgcttccttacatagccctattttacttgtctgtgccgttcaatgtctctggacaccctgggtttctcacttcttcctctgctctttgcagtacttgaagtatctcccttttcctctttccttcttgccttagaagcctcctttgccttccagactcacctctgggcattcattcaacacattaattattttcaaagtataaggtattctgcaagatatagagtggcacaagatgtcagtcctgtcctgaatggggctttcaatctatttgggtagattagatggtcacataaaaatatttgagcaacatattagtatgtgttggatgccagctgaaggtacctttcatgggtggaatgataaggaggagctttggagacgggcattattcagtgatctccagagaaacagaactaatgagatgtatatgtaaatagggagagaaacttattttaaggaattggctcacataaatggagagacttgacaaatgcaaaatctgcagggcaggccagcaggctggagacccagggaagattgaagttcaagtccaaacacaaattcttccttctgcgtggtccatcttttctctgtaagaccttcaactgattggacgagacccattcatattgtgacaagcattctgctttactcaaagtctactgatttaaatgtgttaatctcatcaaaaaataccttcacagaagcatctagaaaaatgaccaaatatatggatatcgtggcctagccaaattgacacataaaattaaccatgacaagagatgtccctggaattggggctttgaagaagacattggattttggtgagtcagcattgttaggcaggaaaacagcctggaccaggggctataagcctgttatctctcccaaatacctaaagcggtagctcccatcagtatcaagggctcactgatggatgagcggaaagtgtgaagggagaacattccgagccaaggaaattatgtaagaggggaggaaaattgcaatgcaaagtcctcaaggatacctagaatgtggtaggaagcaaataatcgtagcacagttagccctggatttatatttcagctaaagaatttcttaaagttcaaggtttccctattactgttgggtcacacgttcacaggatgaaatctccttctgtatcttgaaactaagtcatgcaatttcttctttagaattttaatctgatgaggtcattaaggaaaaatattttcttaatctagaattcccagtatgttcattataaaataaattccttttctttcttctcataaaaccctgttttgaaaaaatgtatctacctttagtacttcctaaaattattttgtcaaataccctatattgatccttagcatgaagtaagtagtgtaacttaacacaattttacataattaatattctagttggcttggacagcccattttgggcaaaatatcaaggatttttcattcattgttcatgcatgcattcaataagtttacttgaagaccatttgggggataaaaaaataaatatttactgagcatctgttatatacaaggaaacttctggttactggtaatacagcactgaacaaaacagatgaagtccttgatctcctgaaagtcaccttttttcaaatatttgtagtagtttatgactgtcaatgtttttacagagttcaaattaagaattataaaagcatgtagtactctagctatctgaatcatcaaaatcagctaccaaattgtattctctcaaacaattgtgaaacaatgcattttaaatactaaataatagcttgttttcatgtaatattattacagatctccttcactgagaagataataaacatatagaagatggtcatgtgaacatatctatttctgggtggtaaactataaaggagtccattatgtttattcttatttgcatatacttatgatcatattcttctttagacttaaatctgtgatcatgacttttatgaggaaatcatcctgtctataagcatggtcatgcctttaagaattcatgaaaattatacggaacgggctaacatgaaaaagtgaggcaatatttgggatttcattctgtgaggaaaatgtactggacttagtttactaatgtaaagtcggtggtggctctaggtgagttttcatagaaacaagaaacttcagatggcagaaatgcatggcttagtaactatattattaattgcacaaacttgttttttctccccagtctttttagtgcatgccttttgatcaagttatactgcaaagaccatttttaaagttacaaaaaatgatgatgtttttaaagtgtagtggtttgataatagggctcaagtgggaagaaaggaaataccctttatttgggccttccagagattttgccaaaccctgggtgagagcagtgtttcatttcctgattcctaccacctgtccacttattcactgcacatttactacatggtctctttgccattcttaatctggactcaaaagtcaaataatagaaatcagagggaaatatgtgtggacttcgttctataaagatagttcttttacaaaaataggcagaggatttgagggacaaggaagaggaagaagatgataaaaaggaaaagggagaatccattactatatcaaagatacttcctcttttaaaatgattagataaaatgtttgactgacgtggtttgatgactattttgaatatgtaggttttaatgaaagattatgtggttataatttttagaagacagtcaaatccgttttccccaaatctgttttgtctgtcagttttcaaaaagtgagaagtctttatctgaaaggtttagtttagttgctcaggccaaaaatcttgcagtcatccttgaattctttctcccatacaccacatccagccttcagaatatgtctggattctgactacttccttctgcgtccactgtaacctctctaatccagtctgctgtcattttttctgactggcatttccgcttccacccttgcccctcccagtccagtgtctacaaagcagccagtaccatcttgttaaatgggtgcctgtttatgcagctcctttgctcagtaccttccactggtttcccatcttactgtcgtcagaacccttaccgtgccctgcgaggccttttgtggtttgtaccacttcctgccttttctgtcagcccaacgattcatcctcttgctcactctttgctacattgacctcttgaacattcatgaatgcacgacactagctctcctgaaagcctttctacttgccattccctttgtttgaagtgaaaacctccatcccccaaatatccacatggctagctcctcatttttttttcagatctttgctcagagttcgcttttattagagaaacctttcttgaccacctcctaccttgctactctctgtgtctcttgcctgcttttttctcattggacctattgtttatttacttgatttttgcttgtcttccccactagactgtgagctccatgagcaagagcagagaatgggtttgttttgttcactgtgatatccctagtgcctagaataactcctggcatgtagtaggtgctcattaagcttttgtcaaatatgaatgaataaataatggaatatatgtatgtatatacttctgatattttaccagtaaactaagttggtttactttttaaatgaaagtgctataaaaggataagaaatcattatactaatttaatagaatctgacagcttttataatgatttctattcaatacattttgtgctggtttcatgaacattaacaaattataggaggccttatattttctgcaatcataatttttttttttttttttttttttttgagatggagactcactctgtcgccaagctggagtgcagtggcacgatctcggctcactgcaaactccaactccctggttcaagtgattctcctgccttagcctcccgagcagctgggactataggcatgcacaccatgcctggctaatttttgtatttttagtagagatggggttttaccaggttggccaggatggtctcgatctcctgaccttgtgatccgcccgcctcggccccacaaagtgctgggattacaggcgtgagccaccacgctggcctgtaatcataattttttttaggagaagcctgctgagatttttttattttatttttgtttttaaagagagaatttgaatacctacttagtacttcttttctggagagtgctctcctttgaatatggcctgatgcccgcagggtgtgccccgtacagccactgactgccccacactggcatcttccctgggcttcacgcccctgaatttttggttcctaaagagacatttaatgcgctcctattctggtttctaatgagagagttttaagttcttaagtctaggatgaaaaggaggagtgtgtttgtagcagccttctttcatgaaatgaaagaattgaagaatttctctgatttgggaattatagttctctgcttggcaatcctccatccctctacccatgtcctaaacaaaaggtttcctatatttatgtgtagttacttgtcactttggccatcatttttttttttctctaggaagttacagtttctaacttaaagtttactatgtgtcaagagttataaaagatggtcttgtagaaactaaggcaattagaaaactaaaactctaaaagaagaaaggatgttcaaaatgatttttaaattgcatttaacaaatgaagtatctcctcctttaatcctagagcctcaagaagggtttgaaaggaagaattgtagagagacatttccatgcttgaaaatatcaagcatgattttggcagaaatcacagcataggaagatactagattcttgggcagtgagatgtttgctggtttggtattttatctctggcagttgttgccacatttgatgtcttcagctgctttgaagattctgcaaaagaaaattattcatttctaacattaaaaattcattatgttgtcaatggattcatgttgtgatctgtttatagccttctgtagtttttttctcttcttccttcctttttttttttttttttttttttttgcgatttatgctccagattgtagaaactatagactaacctactacacaggcacaatgttgtaataaaagagcacttgactgtaaaatcagaagacttggcaagtcacctaccccctgggagcctccgtttccccgtggataaatgggatagtggctatcttgcagggttgttgcgaatattaaatgacaggaaatattatacatgacaattcttggaaaacaactgcgcaaatgcaaagggctatcattgttaataactatttgaaggctctgatttcttaatatctagagaaattgataaaaattccaattgtggagaattcagttcttccaaagcttttgatagacatgtggtgtgtttttattatttttttcatagtacactaggaacaacgtaaagtttctttcagccagtatgtaattgactgtcttttaaatatgtggccataataatatcctgctttaatgtgaatgcatagtaaggcggtctgttgggggaaatacagacatgaacaaggcagtcttataaaacagcaaaggaggcaaaatagatgcacataattaagttgtttgatcagtaccatgttagagttacaaaatcaatgggaacacagagggcggaatgagttattccaatttgttgactggggaaaggctttatattatgtaatacctagagtgtaggtgattttgtttttttctttctgctgagtccagtgttgttttatgccacctatttgggtggctaacttccagaaaagcattcttttttacccactgggtgtctctgagtcagtaaatgatcataatgctttttgtgcaactaccaagtctaggatcatctactgagtctgtgaattgtagaatagagagaggtggttcccgccttcaaggtacttctgggctagtagggtgctaaatagagattgatgggctggatggacctggtggcccatggctgtaatcccagcgctttgggaggccgaggcaggtggatcacttgaggccaggaattcgagaccagcctggccaacgtggcataacctctgcctctactaaaaaaaaaacagagatggataggcatgttatcattacaaatgcataaaatctttaatattaaattgctgtgattggggagaggctgaacatggatcatagtggccacatggaatgtagggtgggcgggccgggcacggtgtctcacacctgcaatcccagcactttggaaggccaaggcatggagatcgtctgaggtcaggagttcaagaccagccttgccaacatggcaaaactgcatctgtactaaaaataccaaaaataaaaaataataaaacaaagttagccaggtgtggtggcacacacctttagtcccagctactcgggaggctgaggcaggagaatcacttgaacccgggagatggaggttgcaatgagccaagattgcatcactgcactccagcctgggcaacagagcaagactctgtctaaaaaaaaaaaaaagaaagaaagtggggtgtcccactcaattgtctcaccacaggtccatgctatggaaattaaagtcatccagcaggatctccgaattatctctcatattgctgacttctgagcagatagcccctattttgctatttctgataaacattccatccagcttttgtgtttgtttgttatgtctgtgttttcaaacgttcttttaatatgggttacttgtgtggtactctgattttttttttttttaatagagtctcactctgttgcccaggctggagtgcagtggtgcaatctcggctcactgcaacctccacctcccaagttcaggcaattctctgcctcagcctcctgagtagctgggattacaggcgcccgccaccacacccagctactttttgtatttttcatagagatggggtttcaccatcttggccaggctggtcttgaactcctgaccttgtgatccacttgcctcaggctcccaaagtgctgggattacaggcatgagccaccgtgcccggccagtactctgattttttgttgttactgttttgttttgaaactgagtctcactctgtcacccaggctggagtgcagtggcgcgaactctgcttactacaacctccgcctcccaggttcaagcgatttttctgccttagcctccctagtagctggaattacaggcgtgagccaccatgcctggctaatttttgtatttttagtagagacgtggtttcaccatgttggccaagctggtcttgaactcctgacctcaaatgatccacccacctcggtctcccaaagtgctgggtttacaggcatgagccacaacgccctgcaggtactcagatatttttaagctgtgaatatgagaaaatgcgccttcagtgattaagagagcatggggtgagtaggggcacctgcagtgatgaagcacgaaagcctagaagccagcaattagaaattttcaaaatttagactggccagtaaacaaagcatcaaccaaagtttaaagttaggcttggctggctcttagggacaaaacttggaaagtgggctcatggttacagtgacagagatgctggagtaaggaatgtagatggcactcccatccatacagagtctgtggtcaccggaagtgtgcctagccatatgacttaacatgggctgggaatttctttttcttatctttcttttttggggggtgttgcggggagacagtctcattctgttgctcagcttggaatgcagtggtccaatcacaactcaccgcagcctccaaactcctgggctcaattggttctcccacctccacctcctgagtagctgggacaataggtgcatgccatcacgtccagctagtttggctgactttccttcccctccctcccccctttccctcttccctttccttttttgtttcttttgggttttgccatgttgcccaggctggtctgggctgaagcgatctcctcacctcagcccctcaaagtgctgagatgacagacatgagcctctgcttttggcaggaaattctattctttccatttttgtcatagtctcgagggatatagaattaagtatttacttccattgcctcattcgttcatcagacatttattaagcacatagttttcctactcatttctgggacattacttcatcgacagagagttgacatcttttagcagttgcttacctgtgaaaaggtagggactacctttaattagggattctagggaagaacttgtgcccattcacagagatgatcttcttgcctttcatttgttgatttttatgtattttatccttcagaccaggcatatcagtaataacagcactgtatttccgcctggtagctcaccaaagcttcaaggatgttatgcagaatccttagccgggaacgtggccgtttaccaggaagacagatctttgggcaattgactcacccggcttccagatataatttgagttcccttttcccacagtgagttgtaggtaatattatgaacacacgattttcagggcaggcagatatgtattttgagctgatgagtcaagacatatttattgctagtgtaagagggatgaggctccgtagttgacagctgcaatttagaggagtagttttggttggccggttagcatggagcattggtgttccctgatctgtgctccttttgcccacctggtttaatgctgttggtccctgactgtgattcatccttgagttctttctttgctgcatggtggctcagagatcagtttaagtcatttaaaaataaataaacatttcacactgaatgagtagttttgctctttgcataaagacaagtttcccaagacttcctgcttgatgtgtgatgagttccatttctagaatttttaggcgctctttcatattatagaaataacatctaatagctttgctaggaggtgattaatcttcctccctttctccctcctttcttctgtctttgtctctctgtcagtatttcatctactcagaaatgtttattgagcttctacttagtgccaggtactgatcacgacagagttggggaggcgctggtgccagtgcaggagaggcctgggggaagtatagtggcggatgtgaaagggttcactaacttgttgagagggtttgggaagcttttggagaggagatacatttcctctgagccttggagcatggacagatgattgggcaaatggaggataggcaagggtggttagaccaaggaaatggcgaggaggcaggaaagaacatggcaactattggggagcaccgcacacttacgacagctcaggtatggggtgtgtggtgagatatgaagttggaaaaaaaaatagttttgactggatcgtgaagagcctggtgtattgtgtcaagagtttggattttttcctgattaggatcattgggtgttttgttctgatttttttgagctaaaatccacataatgtaaattcaccattaaattttttttttctcctcaccctttcttatggtgctgagtaaatccatcattttaaccactttaaagtatacaattcagtgacttttagtgttttaacaaagttgtgcagccactgtcactgtctaatttcaaaatgttagcaggcattcctcagcctcttcttccctcaacctctggcaaccattcgtctattttctgtctctatgaatttgcctattctggacatttcttatgaatggaatcacacagatgtgactctttgtgtctggcatcttttacttagcataatgcctcagagttcatccatgttacagcatgtatcaatatatcattctttttatggctgaataatattccattgtttgaagagaccgcattttgtttatccatccatcaggtgttagacttttgggttgtttcctctttttggctgttgtgaataacattgccattcatgtatcagttttggtgtgaacatgtgttctcagtttgtgtggctatatactgaggagcataattgctgaatcatgtgataattgtatgtttaacttctgaaggaactgaaaaactttcccaagtcattggagatttttaagacagatcaaaacagactcatttcattttaacatcaaacactttagcacagtattttctttcgatgctaactatttctacttctgttggcatgttttcctaattcagggcatcacagccctcagcagggaaccatgtcgggcccttttaaatgctatggattgattgctataaagaaatctgtacccaatagcataggataggacagaaagaagtggtgtcaggacattctctctccctgtatggtgtatttcagaaatgagtttttcttttctaaacagaacccctgattagatgataggctactattagggaatttattatacttataaacagtacttggattccctgtaatttgttataattaatgcaagagttcaagagcagaaagcaaggatcaggtcgtggcatgtctttctcttttgcaacaccttgctatcattggctttttttcactagttaaggcctgtgtgtgtctttgtatgcatttaaacaaatattatcctttttaggaaataattgcaatcctttggctcattgaaactgaaggaatcttattaagaagttgggtgtctctggcaaaatagggtatttattgatcaatgaatgttgaaaacttctagacttgaacgtttgccaagaaaatcttgtctgtgtttgggtatatgcacatgcttttcttctcatgcatgtacatgtattagcttatagtatgaaaaagcctagaagaaaaactttcccttttaagggtatctttgctagagttttagttgtagcttttccttttgtttgtttgtgttttccccctccctatggggttatttcagttttgcatagttgcaggagtattcgctttgtagtttgttagacagtgcagacttttaattgactgtcaacttgaacagtcattaaatgtaaaagcttttagatagtgcatgggtcaggtaccaaacgcattattagactttaatagtcataaactgaaattcttctcaagagttttgaggatagagggatggagggagggaggcattcaggtttatctggttgcatgcctgcatacatagtatttatctggtcctggcagaccgagaacagcatgggccaccctgtcctttatctggatttacagctgtgaacacccgctggaatggatggaatgtgttggttccttcctatgggtatctctgtcaatctaagattttaaattattcccctttgctctcctgtaccccaggactctaggactacttgtctcttttccctcttttttttgtcttttatagtagagaaacgtttccatttgcagaatataacatcagccagaaaccaatgctgtctggcactttggtacatgctgcacttgggagaactgggttccagtacattctagcaagattcctctgatattgctagttatgaagaaagttttctagtgaggaaagcacattttaagtcttaccctgctcttcataacagtgacaggacaatttgtctttccgggtcctggtctggtcctccactccagtagttttatggaaaggcttcaaaaagtgaggaatttaaggatggcccctctctccaaattgtcacatccctactgaccgtgcctatggggagagataagttggtttaactaaatttgaactctagaggagggaagagcagaccaggagccgtgtgtgatgataatgattctgcaggttggtagttacagcttacagagtgctttcactaacctgtttttcaaattaggaaagaaagttttctttcttactcagacctccttgagagtagggggagaaggagtaatgaatagttgatatgtgctattaaatttggataacattttttatgatcgataatatagaagctgctcagtgcaaacaagtaaacgcctgtgtgtgatactgacgatgaattgcattttactttttaaaaatctgcatttagaaatatatacacataagggcccagtttgtacctgctgttggacatagccactccttccagatgggagcctacaatcagaaactctggtctgtagattttacttctatccctccatccttcttcgaaaattaacatgtagttaaaatgtataactcagtcttctttcccttccttctatctctggggcagaaaagtgaaatatctcagaggctgctgccaggagaaaaaacagatctgaataaccattggccacaatatgaaacatgtcctgtaataggatttttatggaaaagtttctcatttcaacatttgcctcatatgctgtagctcagactgtctaagtaggggtggagaaaagcttggtgattgaagcccttctttagaagcatcataaaaatcaccgggtagtggtgttttattttcacttttatttttagacttcagtgaaattggtggtttgcccagaatgggcagggatcagatcctgccttcatccctgtggttgttcatgcccagatctggttgtggccatgtctttaaggaagcagtattaccttggacaagtcattctcctccctcaacacagttgccttctctaagaaatgaaaggattggactgggaatttaaaaatccttcccttattaaatagcttaggctccatcatgctgcagtgatgtatggcccccaagcttctgtggctttcacaaacaaaggtttatttgctgcccacctgacagatccactgtgggtcgtctgaggctctgttcccagctgtctttgcccagggctcaggctcactgagcagcctgccctccctgctcactgcaggcctcagagcaaagggaagcagaggtggagaaccggtcactggctctggacacttttgcttgggagcaacaatcacttcccgcttccattcccatttcactggccccaaagctagtcccaggagtaatgaggtaggcaggcatgaccctgttgggaaggcagcagacatttggaaccgtggcaagggccctgctcctcctgtcttcaccatcctgtgacttacgctgagcatgttgcatcctagggtggtagtatgaccaaaatcagatgccaaggctttaaccgttttacatggctctctcctgttttgggcacgtctgctgaactggacttggaatgaagatttcacttgtggggaggggtgggtgaaatattttaaaagcaacacgtacccggcctctgagttcctggtgccttatttgtagttctgtggtaatacagcccatgctttcagaacaccacacggacctgctcactctgagaagcatgaacagaattgcaagtaaaacacagttgcagacgtgctgagataaattcctcatacatgaatttaaaagagagcatgaagatcttagcaattcatctctaaatgttgaagatattgttatgggctataattttgaagggatcctttgatactctgtcaaaagtactgaaggctctgttgatttgacccaacagggcattttttcaaacttgatttttcaaactcctatgggaggaagtgacttggataagtcacttattttcttaccatcggatgaggagattctagatagatgaggcccccagagactaggtcatagcatgttagttcccaatagataacactgattattaggacgccttttttatttcaccccgacaaatctgtatttaataaaaagttaatctttaaaaacaaaatttaaaaatttgaaaatacaaaattttaccttcattcgagaagcaaaattatgttcaccaattcttagaggcagagcagaatcctaacctaaaaccattcattgggcctcaagagtcagatggactatttccaggtctttgaatatgaaaaatattaaaaagttttccttgtgagcttggattttcaaagaggatctctttggaaagttggcaaatgcttactttcctggcatgaaaattgttgtttttttttttccttttcccctccacccaaagctatgacagggtggagtatacttccatgaaattgcatgcttccaaaatagaattcactgttatattttactactgttataattgaatcgctaatgagaaataagcaaagagcaggcattctagaaatagaatttcaactcctgttgtcaaatttagtcatcatattcgatagaattataatattttataaaactgccttttgtgcaaaattgtaccagccaaacaattttcaaagtggtttgaatttcattctcgtttctgcagtcttacacagtagtacccacaatctcgtggtaatagcaccctatcattgctgctgtttagattctctcctagtttggatggcttccaggagagagccctgcttgcttcagctccttatttttatattccagcaaaatcctacacccaacctacatgattaggaacgttcctggtgttccttgctagtggattgtgagtcactgtttcctaggatagaatggatctgtaatagaacttgctgacacattatacaaatggtagctgtagatgaaagttggaagcagcagatttttaagaactagagctgttgttttggtggcagattaattggttactggtcaactcccaaaggtattctctaataaataatcttagctgatcattttcatctccaaggtaacaggtaacaaagctctacctctggcagatgatgccaggttaacaccttttcagatgttttactccttggttcttaatcactgaatccttagatagtacactagacaaaaacatgatcacagcgatcaaaaagatatgtgcatccttgtaaggtggagactgttttagcactctccaagatactactcagcatctagcagacttacacccatagaaagtgcatgaatgatagctatgggttaaaatatctgtttgtctttctggcttggagagcagcaaataagtcaaaaccactccagaaagatgagaaggaatgaatggcatgtagatgagattcaaacattttataattagtaggaatcagtgaaatttaccattcttttctaccttgagattttgctttttgttttgcttcgtgattttttctagcccatattaggtttgactaaaaaggatttttaagtaactcccagtgtttgcccttctgatttgagtataggtttttcccaccaaagagtggtatggctgtctttatcctgtttagtacacccaagaggagagaagaaggactctactggagcatgcacggagcccagttccttccctcaaacaggcattggattgactgatgtgtaatgatgcctgtgacatcaacatggtagagccagcagtaattagctctcagcgccgattgcctctctccaggaaagttgggctttggttcacttatgggttcccttgattgagatgccaaagtgaagttaaaatacagagttacagttaccaggagcaaaaggattgttagcatttaccaggaattaatgctagagaaatgtgattgttgtcgttgtgactatgtgttgagagtatgggcaaaggaagtggagtcctgggaaataaacgtcttgagtgagaagttttctaaatgttttaggtaattctaagagggctattttattggtagggaaacagtacactgtattagctcctgagggcacttgtctagtctgagacttgatgtgtttgggcacgattctgtccatctgtactttgctggtttgagaatttacttcagtttcgaaagttgcatcagattagatttttctgattcacagatgtgtaaggtgaaaactgtatttgattttttagtggaattacaaattatttggcctgtttgtgatctgccttaccgaacttttgagtttgaaaggtgatgtgtttctagaatgcattcaggaacgcacactgttgagtgtagctttggcagtcgtgttgtcgtgggtctccaggtgtgcaaaagtattttcattctcggattctgttatgaggacctggtccttatcagtggtttatcccgctggcctacaaataagtgatgtgatgagaatcctctcaagctcagaatgaacaggatgtggcacctgctacatcaaacaaagataaacacaggcagaggtcactttccatcttttatagaaatgacctttatcagcatcacaggcatgtcctgctgtgtacacaaggttttacatctagaggcatctgtgttgtgggaatatattccaagtatgtgtttttaaggttgtttgttcctctattcccatgaacagatatcagtattacctgcaagtcaaaaaagatgtgcttgaagggcgattacgatgtacattggaccaggtgattcggctagccggcctagctgtgcaaggtaagacatagttatgagcagcatgtgaaattccattttctgtttgatcatggtgttgctggcctctcagagtgagaagttagatttacttaaatgatcccttagtaatgctccctttttatttcaagttatcttacgtgaaaaatgcaaagttagtgatttttggtggctgggtggtagatttctcaaagctgtttgcaaactgctcatgcttgtataattacagttttatatgaggaaatagcagcttttattctgcctttaattaaggctacatttcagggtttgtggaacattttctcagaattattccaaggcacaatgtggtcatattctgtagcttgatgctgcaaaggtgttactatcacaacttctttgagtgtgatagctttaaacattatagtataatgcattctaatgcaattaaagaggtagatttaaaatccatgattgtaacatgaaacaacaaatgtgtattggactgaatttatctttcaatccatcctataaaggtttatattacatagctgttttttgccttctctaaattgttatgtgtgggactttatatgtatattttatacattatggtttattgagtggtggcttaactgccttcagttatactgaaagcaagataggccatattgaaagcaagataggccagcgcggtggctcatgcctgtaatcccagcactttgggaggtcgaggcaggtgaatcactggaagtcaggagttcgagaccagcctggccaacatggtaaaaccttgtctctaataaaaatacaagaattagccaagcatggtggcacacgcctgtaattccagctactcaggaggctggagcacgagaatcgcttgaacgtgggaggtggaggttacagtgagctgaggtcacaccaccacactccagcctgggtgacaaagctagactctgtctcaaaaagtaaaaattaaaaacatttttttaaaaaagcaagaagatggtaatatagtttttgaaaagaaacttttccttttagtcattttcttgaaaaccagcttatctgcaagtgtgagccagccagcagctgggttcttcctgcatggactgttgttttagaaggtgtgaactgacttcccatcccaaacactgggctgaattgaatcatctcagatttaagtgtctgaagaggcagcccttctcctgacctctttcattctgaagtattaacaacttaacaatttctgttagaagtgtaatttctatacagttagcttctgttgtaattctgtggatggaaacaggcaaaatctgatgtatcacctctgtctgcttaaagactggaggggaagaaacaatggccagttatgatagagaaatcagaggtagcattgttgaaataatggagaagatcaatatgtccctcattgtcaaattgggtctttcttcttttaaaaagctttcgttgggctgggtgtggtggcttatgcctataatcccagcactttgggaggccaaggcaagaggattacttgaaaccaggagtttgagaccaccctgggcaacaaaacgagactctgtctctacgaaaaaagtaaaaataaaaaattagcccagtatggtgttgtgcacctatagtcccagctactcaggagactgaggtgggaggatcgcctgagtccaggagtttgaggctgcagtgggctatgatcaattcactacaccccagcccagatgacaaagcaagaccctgtctctaaaaaagtaaataaataaataaaaagctttgtttactgcatgtactctttcctctcactactcaatcattaggcttattgtgggcatcctggatattggaggatcctcgaggaatttggtgaacttactctggattccctttttgttgggtccttgaagctagctgttcagtctgatgaaaccttctctaactaatccttttcaaataacttttttttgagaacgcttattgcatttttagaaagatacatcaacagaaatataagttgtggtggaatgtgataaccaattattgaacttggaaataggcagagtgagtgatgtttgctattcttgaatgctgcacctaattggtaatttgttacatgctgagtttgtaggttgacgtttattttttaccttctagcaacttctcaacattggtgcatggtgtgtgtatcctctcatcctatatctcttgttaccttaaagatacctggatccatttctatctgatgctaaatattttacatgaaattaaaatttcattcaagtttagtttttaggagagcaagcaagataagaagcaagactttatatatttcattttgcatgtgctcaaactgtaccacggtgacatgaaaacagggaaaacagaatttttggcatcttgtaacatgtgaagttatttagaaggtgtaaagatatttgaggttgcttgccaagggtgatttacagtgggaatttccagctgcatatatatgaaaagatgcagatgggtttggctcttcagttctccagattaaccttgagttaaaaagtcctcttggcagatattcttaagatatgaattgatgcatatttaacaaacagatagatataggtttgtttaaaattttttaaatggcctttaggaattgttttcaaatttcttcattatttctaaaaattcatgtagtggtgcttacatgctgatatttaccatattgttagataaaagtaactatgtcaaacatatcttggcactatttttatttaataatagtgagaaataggatgaaatgtgaagaataatgtagtgatgagtttgccctattttattccatctttaatttcatataataaatactgcccttccatcttcttttcttctcagctgattttggagactataatcagtttgattctcaagatttcctcagagagtatgtgctatttcctatggtaagtgtaatttcatttttcttaattaattttctaccttctttggacatttagttctttcctttgaaaatttcaggattttacatatgcatattccctggggaaaaagtcgatgggtttataaagtaggggcaagttttataaaacacactgagaaggtaaaaatgccttcttctgcctcaagacacttccctaatttctttttcagatagtttcttattagtatataaaaatgctactgatttttctatgctgattttgtaacctgaaactttactaaatttgtttctcagttctatcagtttttttgtggaatctttagggttttctacatataagatcatgtcatcatcaagcacagttttacttcttcctttcccatttggctgctttttatttctcttgcctaattgctctggctaggacttccagtactatgtttaatagaagtagtgagagttggcagaaaacaatcccatttacaatagcattaaaaaaaaatacctaggagtaaatttaactgaggaggtgaaaattctgtatgctggaaactataaaacattgatgaaagaaatttaagatgacacaaatggaaagataccccatcttcgtggattggaagaatcaatattgttaaaatgtctgccaaaagtaatctacaaattaatgcaatccctatcaaaattccaacatcattcttcatggaaatagaaaacaatcctaaaattcatttggagtcaccaaagaccccaaatagcccaagtaattttgagcaaaagaactaagcaggagataccacactaccttatttcaaactatatatcaaagctatagtaattaaaacaatatgggactagcaaaaaaataggcacaatgaccaatggaaaagaatagaacgcccagaagtaaatcacacacatctaaaaccaatagatttttcaacagaggggccaagaacacactggtgaaagggcagtatattcagcaattggtgctgggaaaactggccatctacatgcagaggactgaatttggatccttatctcaccctttgtacaaaagtaaattcaaaatgtattaaagacttaaatgtggccaggcgcggtggctcacgcccataatctcagcactttgggaggcctaggcggccggatcacaaggtcaaaaggtggagaccatcctggacaatatggtgaaaccccatctctactaaaactacaaaaattatctgggcttggtggcacacacctctagtcccagctactcaggaggctgaggcaggagaatcgcttgaacccctggtggaggttgcagtgagccgagattgtgccactgcactccagcctggccacaaagcaagactttgtctcaaaaaaaaaaaaagaaaaaaaaaagacttaaatgtaagacctgaaagtataaaacactagaagaaaacatgggggaaaagctacatgacattggtctgggcagcgatttcttgcatatgaccccaaaaacataggcaacaaaagtaaaaataaataaatgagattgtatcaaactaaaaagcttctgtgcaacaaaggaaacaacagatataaagagacaacccacacattgaaagaaaatatttgcaaattatacatcagataaggggctcaaaatatataaggaactcaaactactcaacaagaaaacaaatagccctattaaaaaaatggtcaagggacctgaatagacatttctcaaaagaaatatacagaaggccagacatatgaaaaatgcccaacatcactaatcatcagggaaatgcaaattgaaaccacgatgaaacaccacctcatacctgttggattggctgttatcaaaaagatgaacaataacaagtgttattgagtatgaggagtaaagtcttactgagcatgaggagtattgagcatgaggagtaaagtcttactgagcatgaggagtattgagcatgaggagtaaaagataacaagtgttactgagcatgaggagtaaaggaggtataacttccagccattttggaaaacagtttagaggttccttgaaaaattaaaaatagaactaccatataatccagcagtctcacttctgggtatatatctaaagaaaatgaaatggtatgtcaaagagatgtctacactcccatgatcattgccacattattcataattgccaagatatggaaacaacctaagttctcactagcagatcaatgggtaaaaatggtgtatactcacaatggaatactatttggccttagaacagaattttgtcatttgccataagatggatgaatgtagagtacattatgctaagtgaaaaatccaggcacagaaagacaaatactgcccaatctcacttgtatgtggaatcaaaagaagttgaacttatagatgtagagagtggaatggtggttaccaaagctgagtgctgggtggaaggaggaaatgttgatcaaagggtacaaagttaggaataagttctggtgatttgctgcacagcaaggtgactatcgttgataataatgtgtatttcaaaattgctaaaagagtagattttaaatgttctcaccacaaagaaatgataattataagagatgatggatatgttaattagactaacttgccaattccacaatatatacatgtgtcacaacatcacattgtactataaatagatgcaattattatttgtcaatagaattaaagttttgttttgttttaacaaaaaagacatttccctgctttgcttccctctctctcatttactctctaccctctggcacgctggctctttttttttctgaacgtactgagcttctcctcaccccagagcctttgtaggtgggtttcctctgcctggaatgtcctgctccagatctttatgacattcaggtctcaattcaaatattacttcccagagagctcttcctttccttaaccacctgtctcatacaccctcaccatccttcctgttaaatcagttttcgtatgtgtagttctgtatctggcgttattcattcttatgtatgtacatatgtatgtatttattattgtcagctagatggtcagttctatggtctttaaacagggaccctgtcttcttcactgtcatctggcacacagcctgtgctcacaaacattttagaatgaatcaatagagtaaaatgcccattcctgggttgaagtaaagataagactaggttttaacccctggggaatttttgttggttggtttgttggttggttggtgggtagcttcagagtaaaagagaagagtgttaatgaggagggattaaaaaattttgaaagccattttagggaacagctctaaccaatcaacattctggctctggtttcagaaatcatgatcattcactacttattttttccgtcaactctttcaccccaagcactgacctgggggactaacacccaggggatgaaattatataagaaatggtgcttgttttcaaggagactacagtgtggttggttaaataggaagtttgcaaaatcagaataaaaagctaagtgtgataaagtgtgatcaaaattttatatggggagaggtcacatgcccttgggggattagggaaggctgaaagactaatggcatgtgtgctgttaggcaaaaagatagggagcaaggaatgatttagacagagagagaaggagcagaggcagtgtggcctgggtgttcagaaagcatccactggctggtttgactgtagctacgggtggagagttgtggcagatgagactggaaacttctgaggagttagaatgcatgggctcctttgagttctgcagaccccacactttgagaactgctggattcaagctggtcagctgggaatcttgttgtgttctgggcaaaggatataatttaggtgttagtgaaagaaaaacaagaaagcaaagcaagggatattttgaagtaaaataggcaaaatctggcaacttatcagtgatggcatatgggagaaagtagagtgtctggtgacaaaggttttaggttttgagagactgggataggtaagtctggaattatccatattagtgcatgaggtcagtctaaattggtccaaagctaatcttggtcttaatggttagggaatattgcacatctctaacttttcatgaataactccattcattctttttttttttttttgagacagagtttcactcttgttgccaggctggagtgcaatggcaccatctcagctcactacaacctcagcctcctgagtagctgggattacagatgcccaccaccatgcccagctaattttttgtatttttagtagagacggggggtttcaccatgttggccagactggtcttgaactcctaacctcaggtgatccacccgcctcagcctcccaaagtgctgggattacaggcgtgagccactgtgtccagcctccattcttattttatttccctccaagtaaacagtggtattatctgctgtgcctgctgttttcataccttattaattctactcattaaatgaaactccagagattaacatattacttaacagagcagttcttcttagggcttaatgtcaatatgcttgagtcaacatttctaatgtctcagaagctcatcccaaaagtcagggtgtttcccagcgtgcttggtgggagggaagtgaggctcaaaccttagaattttagagtgtgtacatgtttgtgtcaaatggggtagttggtattggagggttgataatttcctatttcttattcgccttactctcattaaaggcctttattacgttgcctttaggaagagatcaggtttgggtgcttctcagagttttcaaaggtgattaccagcatgatatttatgagtttgtaaatggtaaaatgctctgacaggttaaagtgctatgaagtagtaaaggagttatttcgtgcatcatacctctttcagaatgagactgtgtttccactaaactctaggcaaatcagatatgtaaacagcataaacttcataaatctcatcattggacagacagatattgacattgttattcttggatctaaaatggctctcttcagggtggtagctgctagccatgtgtggatatttatattcaaatttaaattaatgcaagttaaataaaattaaaaatttagttgctagattgcattggctacttttttttttcttttttttttttcagacaatctcgctctgtcacccaggctggagtgcggtggcgcaatctcagctcactgcaacctccgcctcctgggttcaagcgattctcctgcctcagcttcctaagtccctcctgtgacaacaggcatgtgccaccatgcctggctaatttttgtatttttagtagagatggagtttcaccatgttggctaggctggtctcaaactcttggcctcaagtgatcttccctccttggcctcccaaagtgccggtattacaggctgagccactgcaacggccttggctacatttttagtgcaccatagccgcatgtgtctagaggctactgtattggaaagctcagatatggaacactttcgtcatcccaaaaagtcctgtgggatgctgaagatgatgtggcagaagccttatccgagttgtgaatattcctaggctttagttatcagctgtccactttcagcccctgcccctgccccattgtatcctgggtgcactgtgacctgtggttggcaatctcgtggcacctttgctaggcagtgctgtgaccctatcccagctgtgcctcttattggctatatgactttgggcaagttttttaacctttccaaccctcagttttctcatctaaaaatgagaataacaagcctaatttcgttgtaagcattaaaagacataatacattgtgaaatacctagtatgaaatacataatacaagttgccacatggtaaattctcaataactgtttatttagttgtcatattattattgttattagcactattattctgtctctatgtcttgcaaatataagaccgttgaagagtgtgttttccaggtaacatcactctatgcttttttttttttttggattttgttatgtgagcagacagagtgcaggcagaaggtacaagtgattgttaatcagctctgtgtaattaaacttttgtttgacaatatgaaatttacatgtcgcatagtgagttcagttcaagaagcatgtattgatcacttactatatatttagcccttataagctgtcattgcacaaaagccctatgataggccccttaagtgatatgaagaagaattgctgccctcgaggagcctgtactctgatagagggtgggagacaaggatcaaggataagacgagtatacacataactgtgtaagaaatgcagtaggcagaatacgagaagagacacgcacaaggggaagaggtagttcaaaaggcgaaaatgcttacgtccagctggggagagaggagagccctattgagggaagtggtagctgagacaggacgtaaggatgatgtggcatttcacactgcatgacgttatgggatggttctcccagaggggatgggcatgtaaaggcccatcctttccgaatggaaatgtaaaagcagtgtgtgttagaagaggtgtcggcctggggcttgacctcttgggcaaggaggtctggaaggggaagctgagtcacattgaagaatggtctgcatgccaggcccaggtgttgaccttgctgagtaggccgggggtagtcttagaagggtgtaaactttttccttggttccactggagctttcaaagagaatgcattcctttggtgggggagggaagataggatgaatggctgtgtttgatcttatgaagtaattgaatttgttaaatggcatttcttcagcagagaaaagaacaaagtcaagtacacaaggcgctccacaggtgtgtggctgtgtacaggcatgcattctgccatttttcattcccacagggccatgctcgcactctccctggcagggcacatacctcagggaggccccaggtgcagatggaggcggttaagttgagaacaatagcagagggggtacctttgggcttctttttaaaagtaggaaacggagatttaatggaacactttttgatcttcactttattttatattctgttgccacatgcccttcattagcttttcaaaattaatggggtttttactcaatacctggatgcacatacatagctaactttctaagccttgtgatatctttgttactccacaacatgaaactaaaaatgttgagcttatttcctatcacggacttgagtcatttcaatggatggctaaacaggaaaccgcaaattaatcagttatgtgaaaagtaagagctgccataattccccgtctgctctaaagtctctcgtgaactctagaattagcaggatgtgcagagctatagaatttttagcatacatttatgtctgtgctttccagttttaaaatatattgatttttcagattttaatgatttgagatgggatgtttttcacagttttgaggtgtacatttttaggggtagtgttttcatccatgtaaagttaagttggagatgaatctttatataagtggtattttagaatcaaaggaatggggcgtttggtatgatttctgccaaaacatcagtccctacctcccatcctagtaggatgagcttcaggtacccatcagggtgtagctcagagttccttctgacatccgctctggaggtcacaggaaaatggtgcccatctgtgaccctcttggtgcttactagcctggaatatgtgggacctgctgcccaggaaagctagaggcagctggcttggggcttgagccccaggccaccacaggcatgagacaaactctagaatctctacctctatcaatttctcaagaatgcattgcttcggtctgcttattttggattattcctcttgattccatctcaccatcctaagcagtgcttccctggccagtgtttagcaagcctatttctgtgatgtaaatcctcccactgtggtgttacggaagggtagttgggaaaagatgtgtgtaatcagttcttctgagcccatagtagtcagcacatcacaggttccaggggcctggggttcagctggtagagatgctgactagtcagctacgcaactgttgccttacagagctctctggagatgttttagccgtcatggcttcctctgcccccgtgaccatcaagtaacatcagaatgagcctactctgccttcagtggttttgaattcgtttcctggtatacagaaaggcctggcacagtcccttcctaggctcaacttttgaagggatgatggcctggaaactcattggcctataccccaatcattagaaatatgtaagcacacgcaaagcattttttataaacgtacatctgagaggcaggcggatagggaagaatgaatgaaaagagctattccctggcaccacagaacttacgcggcaacccaaaatatgcctggaaataacctgttataatggagagccgtgttataacagtagaaatcataactcagttctaaaaattacaacctttaattctacagcagtaaaggagatattgaggaaatgtgactaatcaggaacatctgaggaagggagctttaagatttgcaagcaaaatagcaaatgcccacaccctcatgtgaccttaagcactttctattcttataggatttggccctggaagaggctgttctggaggagctgacccagaaggtagcccaagaacacaaagcccacaggtaaggcaggcagagggtaaggggctgcctgcacaacagatgtttacagcccatggggcaggaggcatccatctccctatcagcaactctgggcttgagccaacacacttgtatttattccaccacgtgactcagctctgtacttccgttctgcaaaagtgaatgtccacttgaaaactgctccgttccttccttccctccctcccttccttccttccttccttccttccttccttccttccttccttccttagagaatctgggaagcctgagacagcctgtgctgagagagtgaagacctaaagtgctgtgttgggtggtaggcaggtgaaggaaagaaaaagagagaaactttaattcaaggaagcaccaggagtttgatatcgaggcctatgcagtgatcctaagttctctcatcatggcttttttttttttttttttttttgacagagtctcgctctgtcacccaggctggagtgcagtggtgcgatctcggtccactgcaacctccacctccggggttcaagcaattctcatgcctcagactctcgagtagctgggattacaggcacatgcaccaccacacccagctaatttttgtatttttagtggagatggggtttcaccatgtgggccaggctgatctcaaatgcctgacctcaagtgatctgcctgcctcggcctcccaaagtgctgggattataggcatgagccacggccatttgactcccaaaatattatcctcatgataaactttttcctttttttttttaatagtgaagatttctcccagatgggagaaaaataacttctttttaaagtaggcaacatattcgaagggatgtctggaataatgatttcatgtttacagggctgtggctcttaattaaatactttaccttcctcttattattcgctgttaagtaaaaggctactgggaaagatgtcaatgaattacttagtaatgcaccctaccctcacagttgggtaatgattgctcttcccagaaactagagctaaaccacagctctggaatttgccatcaggagagtgggatcttccactggctgcccttaaccatttcttcctttgatgctattttgattttagtggaatcctgccagcagaagctgaactgatgtacatcaatgaagttgaacgtttggatggatttggacaggaaatcttccctgtaaaggtaatatgctgtgccctgtgctggctttaaccttctcagaccggtactggcatttggaaaaccattgttgatagcagtgggccagaatggcttggccttctttttgctatgcagccttagttggcaagtccaatttattatagataaacaaatgctttttcttaaccaagacgttttgaagtttgccatggtcctcagcagaatagttcaataagacagtccatctaagtgagtaccaagcatcagccaatccggcaccttggaggtatcaaggctgatatccagccttataacaggacaagtagccaatgtcatgtgtaacattaatgaagactctagtcagtagttttcttattctctttttctcttcattgagccaatacagggataatcgtttgtgaggtagaatgaaacgtttcttgtatacaatcatgctttatttctccagctttatagggccctcccctgtgggttcctagcccctttggtgttttatggaagctatgcctcggaaactgctatagcacatcacatcctttgcagcacatccacctcctgaagtgggtgtggttgggggggtcatggatcatagtcatttatagagctgagcccatcatccaaactcattttccactctctgttgaccaactttacaaaaaatggagatttatcagaaacctaaagcaactggcacatttcagcaatttgggagatgcctgcaatttcagcacaaacatttcactccagactagctccactggctgttttataagtgttcagttccccctctgttgcacgtttgcaatttgccttaatgagaactgcccatgtgcatcaagtagaatcgagcagggtggccgcagctttcagaaagggctaaatggctcttttttagatttgtttaattttcttttgcttctctaatagctgcccttcatagggttgtaatccattttccttgcaataatgccttatgaagccatctgcatcccacttacatttctgcagcccatatatagtcatattttgggtcattgaaaaatcagagtaaacttttctctgcttctagaaaactgacttctcaatctctggaagttggaggttttgttgtggcaatttgcttgtgttgttttttaatgtggactgcgagaaacaggggcagttgaggtcatgttgaaatctgctgtggttggttctgatgtgctttctagtatgttctttctttagtgggaccaacagggttataataccttcctctgagttggaagataggcgcttctgacttattgccaagctcgggtaactgagctggactgcctctttttcttctctttccccccacatatgtgtgcatatctaaggtgaccacctatagaccgcatgattcctggtgactcaaggatgagggtgggagcaacagtaccagtggggggtggtaatgtggtcagctctgcaataagtgaaaaagcagacaagaaaatatgcagggaaagactgtgagtaggactggagtctcttttgattggtacaggttcttattgacaaaaagcatgtcatgatatatcctaggaaaaatacttgaatttagcatgaacttttccgtgagtggttcctcaaaaattttcaagagtagaagaacagcagtggactggcagatgcagatgttgtacaggaagaagaaccccctgctcaaaatactatccagtgagcctcaggatatatttttttttaaattttgcttccttgaaggagtaagatacttacaaaaagatgcatctagaaaacaaaaataaactctgaaatttaaaatgtgatatcagaagtgtacaacctaatagacaggttagaagataaaactgagaaagtctcaccaaaaaacaaagtaatggtaagtcggggacaggagataaaagaattagaggacctgtccaggatgtccaatatttgaataatgggagttctaaaaagagtgaacaagggaaacaaaaggtaattattcgagaaaatatccctgcactgaagaatgggagtttctgcactgaaagggccagagatggtagctgcaaagagacacatcgagagctttaagaggtgaaagttttggcctctgtgcagaggaagtggtagggacaggtctcctcttggcttcctttaaacaagccctgaagaatattcaactcttcaaattattgcatgtataacgatttaaaaaacaaaaactttggtaaggttgaaaaataaaagacatcaatagatgttcatgaaagagaaaatccaaatgccaatgaatctgagaaaatccagagattgtctcttaaactggacatgtgttgtgacaaattgagaaaaaaggaaaaaaatatctatctctctatctatatagtccactaggatgtgtggtgggtgagttcctgtaggacctgaccccgccgacacagctggtcaccttattgctgtgatgttgtctatgatttattctactcatgggtgagaaatgggatgtgatgcctgtgggttttgaaataacgtgtatattgtggagtggctaaatcaaaccagttaacatatgcgttacttcacatatttctttgtggttagaacacttaaaatttactcctttaggccgggcacggtggctcacgcctgtaatcccagcactttgggagtccgaggcgggtggatcacgaggtcaagagatcgagaccatcctggccaacatggtgaaaccctgtctctactaaaaatataaaaattagccaggtgtggtggcatgcacctgtagtcccagccactcaggaggctgaggcaggagaatcgcttgaacctgctgggaggtggaggttgcagttagccgggatcacgccactgcaccccagcctggcaacagagtgagactacgtctcaaaaaaaaaaaaaatttactcttttagtgatttcaagaatacagtacattgttgccgggcacagtggctcacacctgtaatcccaacactttgggaggccgaggatggaggatcactagcctgggcagcatagcaagaccctgtctgtaaaaaaaaaaaaaaaaaaaaaaattagcagggcatggtggtgcatgcttgtagtcccagctacttgggagactaaggtaggaggattgtctgagcccaggaggtcaaggctgcagtgagccaaaattgtgccactgctctccaccctgggcaacagtgagaccttgtttcaaaacaaacaaacaacaacaaacaccaatatattgttactaactatgctatggtcacaatgataccttgaacttagtcctcctgtctaacaaggcttgatttcctttgaccatcatctccccattcctcccattctccagcctctggtaaccaccattatactctatccttctatgagttcagttttttagattccatgtgtaagtgagaacacgtgttatttgctttctgtacctggcttatttcatttagcattgtgttctccaattccatctgtattgtggcaaatgccaattttattctgttttaaggctgaatggtactcccttgtacacacatgtaccacgttttctttatccattcatctgtggatggacactcaggtcgattccatatcttagctattgtgaataatgttgcagtgaacatgggtcatcacaagtatcttttgttggtcttacccaggacaatcatggaaactgtgtacaccttggcattttctttatggggattttcgtgaggaacagaattggaagacaagcggtaatatacaggtagtcttatttgtttgtttttcttttttcttttttaccttgaggaactgtaatgttaatgttacattaacatccaaatgagttaagagccaaactgtggataagatttgacttctctcagctcatataaggtgagccctctgcaggatttaagcagttaaattcatctcacttttcgtagaaacccatcccacctgattccaggaactacattgttgaactctattgagttagaaggatgaaactaaacttcgtgagtctggttgaaaactggctctccagtcaatcattaactctaaacacttctttccattgttctgaaccacctgtgccacaagagtgccaactgatttttatgtgaacaaaaggtgattagttttaaaaatgtgttttgaaaaagcaatctatttattatgatgaattagggggctttggtacttttcattattttgacacttcagtcctcttttccatttatcaggaatggcaccagtgtagagatgcagccatctcccccctgcatttcatgtcagtatgcttgctttgtattggtgcccatagattttatcataatgccaatgatctgaaaaactgtgttctagctttcatttacaagggcaacatggcccatgattggaagaacagctttcttgtatgtgtgtctgaggcggatctgtgtatccagggcacactatcaaagatagctcttggaggcaagcatagcccaccttctggaagtgactcttaactggccatgtactctctggatcagtaaccacagcaggtcattttgagacagttttctaaccaaaagcttcctggtaggcttttattttcctagatccccagtctgtcattgtttttatgatattctcttgctctctgaatagagacattattgaagcaggagtgacaagagagatctttcaggctatagaataaattttttgacttttggacttactgtcagctccatatatctgccacaaagtataaattaattgaggaaaatatgtaaatatgtgcagagttgtaactataaatttttatacccattcaaagctatccaggcattgagtcctaccagttcttcatagttaaatcaatgtttcagtttctgtttgaacctacagcacagcagagaagtaaacaagtcttgcacaccagctattgaagtgaaatagaagaaaattgcaatttggaaatttcatgagcataagccactcacaggttttgcttagtttccttagaaactgcttccagaccttttcatttatcttgaaaccactacaagatgagaattcacatctactgtagtgtcatgttaattataccactagatgaagtcatgtggcggggctccgagtatatctaggatttcagcagttgatttgaaggaatgaggccagaggaaaccaaatatctcttatctctagagaccttcactaaggagcatgtagctatgagtccacgtagatgtaatctgatagaactgtaggttgtgaagcaagctgggtgcagcactattagagagtattgccccagcagaggtacctaaaaacatttagtactggtataagggaatgatgactggaggaaaggctggaaaccccaggtaaagaactcatccatccttgacatagagagtaaacatgctaagtcaggtacttatttgtgtctatattgcctcatttttaaagtaggagcaaaaatagctgccataaagagttggtgtaagaatcggactctatacagctaagagacaatattattgctttttattcttctagcagacatttattgagtgctctgggccaggtactcgattcagtgcttggaacacagaaacgaagaaggcagaatccctgcaccgggtatggggcctgtggtctgcttggtctcatcagagatctcatcacagaagtaaaaattataatgcaatgtggtgaccggtaggggactgcagcaggctcttctcctcacgtgtgggtagggggatatgatgaagggattcctagagaaggtgactcccagagctgagtctcaaaattattatccaaacagaggatggtagaagtattaatgagcagacgcatcatatgagtgaaaaagcggtggcagggaattacaggttggggcaccaggtgaagggtaaaagatggttagaaattggttccaagtaggatgggaagcagtagcttatctttcctcatctggtgcttattttggtgtatctccttttagataaggtctccatgaagacagggaaggaaactctgtgtgtgtgtgtgtgtgtgtgtgtgtgtgtgtgtgtgtgtgtgtgttgttgggtcccaaagtgtaggcacattagagagtcaattaatttatacttagtggcaggcatatggagctgacactaagtccaaagtcaaaaagtttattctatagcctgaaagatctttcttgtcattcctgcttcaacaggcgttttttcttagtggcatcatgaatctgtagtgcatattgcaatacagaatatgtggattcttctatttaggttcctggaaacacatgatttttaataatatgtgctcctccatcattaaaaagtggtggtcatgggaaatgttttgtcactttggaaatgtgaaaaaatgggagagggagaagtaaaagtcccttgcagattttcctcattgctagtcacaaagaaaactatagtttataaatagcgatgtctagacgtattttatgtagaatttttagcaatttgaatggatatgtgttgcattttcttttctcttttgaaagaacatttcacttaaaaaatagttaaatcatagtttgttaaatgagacttgatagcagcaaacagccctcctctgctgtatcataaatgcctggaacattgttgagtaaacacagtgacatttcttctaaccaggtggaatgacatggggaatatcactcataacaagtcgaccattctagtggagctcatcaacaaagaagagactgccctctttcacacggtaagcacaacagacaaacagtcagggtctgacaagacactggcttttggacttttcaactcctaatgtcctttccttgctctccctatcttgagataataaatactcccttgaagagatgctttctaatacttggtcagtgctgtcattactcattccaggatagtggtgatgaaatacccatgtttaaaataccaagtttctggctcatgcctgtaatcccaacactttgggaggccgaggccggtggatcacttgaggtcaggagtttgagaccagcctggccaatatggcgaaaccccatctctactaaaaatacaaaaattacccaagcatggtggcgggcacctgtagtcccagctactcgggaggctgaggcaggagaattgcttgaacccaggaggcagaggttgcaatgagccaagatcgtgccactgcactccggcctggacaacagagctagactccatctcacaaaataaaataataaaataaaataaaataccaggtttccaagctgacttttgactctaggactctggtccctccaactgccttatgtgtgatggatcacattgtctggtgtgccgccttcctcagcactctagttacagccctcatctagtgacccctgattctattgcattccatttgcttttgctggaggacctaagttttctttcccatcatagccttagcttaatctgaagtagctgagggactgacctcctgttgagtgcctcctcgagagccaaggcatctcactgcctccaatttaagaagtctggtgtttattctatgctgtgccttgattcagttatttattttgaaagcacttggtcggaaattacataaagacatgccggttcatcagtgtaaccccagcactttgggcatagggattccttagcagacagcaggttctgccactctttggcaggctttgtaggcatagctgctgctgaaattcagcaggctggtttaccttgctggcccatgtattattttgtgcttgagatgaaggttggaagggatgtgtgtccctcctcagaagaatcttaatgaaatgtataactaattcaacaaatgtttatttttttctctgtctcttcttttccaaggatgatatcgaaaatgccaagtatatttctcggttgtttgccacacgacacaagttttacaaacaaaacaaaatctgcactgagtaagtaaacatttaatccccccgacttgatggctttgtcagattaaattaatgtccttttggggtgctgtagatctcttttcccattcactctttttccttgttccttgtagaagctaatgaagtaagctaaagccagggcaggaatgaaaactttaatgatgaagactgtctagtgtcgtgcatatgcccagagagagaataattcacaaattgactgtgaatgcttggctgcctggatgggttggcccacattagcgcctttccaaccctctgctagaagtttggagaagcggtgcagttcccaatttgccagggtgccccttcgtgtcagacgtggagtgtgttcagaagtgggtaacagagtgacgagctagcttgaaagagaagacgctcctgtcatcctcagccccgtgtcgcttacacagttggctaaccctgcgtgtgctcctgggtcatgtcatctgactgtaaatgagaggccagggtaattagaggaagatgtggaagacactcataggtgtcacaaatccgtgtgtatttttttaatttaatttggaaataaagatgataaagaggcgtgtgatgagggcacttaaatgcggcctgacctcagatggagcgtgctggggctcactctatcgttgtctttttcttggttaccttcaaaagacgttcctcagctgaatacattcagcggtttgggcgcccaatgtgtttaattttgtttcaaagagcgtcagggttataaatgcaagagaagaactgcttttccactcccacagtggacacatccgagagtatgtagagtattgtcctagagcagttcctgctgaagaacgcggctgctttatagctggagcgccaggtcatggcagacttttttctccacaccgtggaggctctttcaagccagtcactgcaattggtcactgtcggggtctgaaagtatgtctgacagtattaggcctacctgcttggtttgcaaatgtgaatcagaagaaggcctgatcggggagtggcaagtgaagcggctgtacgtttcttctagacacattctcgcatgtgccgcaccacaccattctcttgagcaggttcctgataggtcacttctgtgtatttctactctgctgttgcctttgacttctgggggtgtctttgacatgaacaagaatgctatccttgacttctgtaggatgaatttaaaaactgagaactggattttactcttgtcttctgatttaaccacagctcagcagatggttttactataaaatttacggagtgtttattttccttttgtggtcgtttccttcagtattagtgaacatcacatattagtctgaaaactaagaagaaattctgtttctcaattctgcttctgtaataaccattcctttcttcttcctaaccaagtataagaggttcctaacctcttacctgattaaaacctggggcacgctctcaaaattatactctctctcgctctctctctctctttctctctctcccccattaaattccatatgcagttcagcgtcccagcacgatgttatggcctggggcatccctctggagttctgtgaactggcataatcttaacagcatccttctccatgcatgcacagcagcatccttctccagagggcgatactctctgacctctaaaagatcgttattgatttttctgctcctgcagagctgctgcttgtcatctggaggtatagctcaattgagtggctcctcaatttcttgttatagggagaaaaattaggcggcggtatatataacataggtctgataatattgtattatttagccagtcatttaaaaatccaccattgctatattacctccatcatttcataaaagatattttatcaccaaaaaattaggaaggatgaaatctcagaataaggagagtcctttaaattgaagaacttaccttaataaaaaactgtacatgtcctgggtttttttttttttttttatggtaacactgagaatgagggaaagtattatagcatttgggacctgttgcttgaaggcgtctttgatttcaactctaaagaatttgctaatacttccaattcattttttaatctctacatttaaaaatatgttgcttcttagtctggaaaatatctgatcaatgtttgtaaaatgtgttatcttaataaaaagtatctttatatggtcacactaaaaatattgtatctattttgtattttcatttgactggaagtattttaaaaatattttttcttgcattttttttaaaaactgtgaaagattttacatatatacaacagtagaaagagtacaattttttaaaatccatgtaataatggtgatatttttcagtctggcttatttccctcagtctttctatagaaataagcctccattggtttaatattactttgtaaaatttattctaaaagtatccttatccgaacattttgaaaataaagaaaaacaaagcaaatcaagattgttcttagtgttaccacccagaaataagccacgtttatgttttgatataacgattaccagtcttgtttattctcttcctctccttcccttgtctatctggtctttttatatcaataataataaccattctcattttttcacctcttcatgtagacagtcaaattctccaccccccatcagacgccagcccacctggagccgatcctctctggtatgtatagaagctgcagtgatcaagtgatctgactgttgagcattctttgttattaatttgaggtggggggatgatgagggcatcatgatgaggtgaaattttgtgagaacacagaggcgtcattctgtcaagcagatgcgatggacacccgttttgtcccccttggacccatccatgcccaccactactctaagtgtggctgaggctgagggtttaccctgagagtaggtcttattccaggcctgtgggaccatgttccatcagcatacagcccatggtgtgttttcattcccttgctcatctgttctggttgttgtgtgaagatacatcttcagttacgagctccacaaattcctttgtgttcactgccgtagagagagcttaataaactagtgagaaaatgccttctaaatgagcaaaaattgaacggatctagttgatggtctcaggcagagtatctgatggggaaaattgattgcatatttcctaattttaggccttttaaaaaaaatcagaattccaaagcacttccataattttaggctttaattagccagcagagtttgaattgacctagctttagctgctgctttgttgtttgtttgtttgtttgaagctgctctcctcatcatgtgaataaggaaacacaattaatttcaatgcatgtgttctgtcttaggctatgttttattttgaggattactcaaggataacagatgttaagaattggttttctttaatgttttccacttgttttaactcacaattcttttattttaggtcatgatttttttacacaaaatcaaaataagcatatgaccttttaacttctctagatcaacaattctttcaagctgatagaatgcaattgaatttttcttcatattcagtgtatacactatagcatgtctttaacttgtcttttgaagggagcgttttgagaaaagtttatttccttgaaaatgcttagatgtggactctgaattcttgagttgagtcattatattatcgcagtaattcctgagtgcctgtgtgaatattatttctctcagtattatgcacaatatctcacatgtggtcctgggccctgaaaatgtaacagatacgttgggctttcccccgagtaccaatagatttgttcatggcactgatttatttattcttctcctttatgaatgttatcttccttttcccttctttagagtatagatgtctttattagcaaaataatttttcatttacacccttgaaaccctatgggaggcaaagtgttttaaagctctcttgtgatcttatcttgtcctcattatccagagaggatgcagaggcttacctattttatttggatgaagacagtttataggaagtctgatccaattcatggcttccccctttcccctgtcctttaggtttaaaccatttcaccaagagtttcttacaatgagtgagtaagaccaaataacactgtctcttggcttccttgctgataaccaggacttctcattgctgtttttcacctgccctcttctgtctatattttggcgtcaagtttgtttctctattagcaggtctgggaagaaatggaataatgtattagaatatataacgagatgaaataaataatataatcctgaaatgatgtttgagggattagctattattgtcctttgacaatgctgtttgtgaactggcataagtctgctcatttatgtcagttcataaaccgtaacttacttattggatttttttaaataaggcaagaaaacacagtaaaccaattttgccttgctgtgtatttctattcccttgtacaaatccctccccactgtgtttttctttaaagccttaaaatggttgtgctaccatggaaaaatttagttgaattatgtattgccaagaaaaggaaaaatatttttaaattgcaactcaaaaatcagccaaagggagacttgggaatatagcaccttttctttggtaggcccgaactgctttcttagattgatttcagttcttcatttcttctgtcttgattccttttaattcttggatccctttttttttattacccctttgaagatcaagcattgtttgtggcaaagaaaatgataggtgagttattcacccagcttcaagctcttggccagtgcgtttcttccattgagggatgctgagaaagtgtgacccctgctggatttgggtttcttggtttgatctcagattcttctctcaaaatagtaacctttaaaatctataaggctaatagaaatataagagattggctgggcacggtagctcacacctgtaatcccagcactttgggaggccaaggtgggtggatcacttgaggtcaagagttcaagaccagcctggccaacatggtgaaaccccgtctctactaaaaatacaaaaactagaagggcctggtggcacagcgtctgtaatcccagctactagggaggctgaggcatgagaatctcttgaacccgggaggcggaggttgcagtgagccgagattgtgccactgcactccagcctgggcaatagagtgagacaatgtctcagaaaataaaaaaaaaaagaaaaaagaaatatgagagattatcctgttcggtggcttacaaacgtaagcgttttgagggttttttcccccgcaaatcaaaactcttatttcaaacaaattcttacctggaacctcagtacataaataaaatggagaatgcttgaggtaggggaagagaggagcttgatttgactgacgggaaactgagaccgactgaggttaaatggcttgctctagattacattagtgcataaccgtctttcctttgttggttcaccaaatatttaatccattgaagtttttttgttttgttttgttttgtttttttctctgaaaacttgtccctcttccgcagcatgaagttattcaggttcagtctaaatagccatctttaacagactgtggaagattctgcgctgcggtggtgggtagacagggccctttgcacacttggttctgcaatggggaaggtcagcaagtggtcttgacagctacacactcattgttgtgggccacattttagatatttaaatagattcaccctgggctcagcttaacactaaccctgttcctatttaaggttgatgtggagctgtgaactggggtctcaggcacagctatgttgatgtgtaggagcttgtgaatggaattttgagaacaaaacaggtgtcccccttattctcatttctgagatgggttataataatttactttctctttctttctttctttctttttttttttttttttgacggagtcttgctctgtcgccaggctggagtgcggtagcatgatcttggcttactgcaacctctgccgcccaggttcaacgactctcacgcctcagcctcccaagtagctgggactacaggtgcatgtcgccacgcccagataatttttttctttttttcttggagacgaagtctcaatctgttgcccaacctgaagtgcagtggcacgatcatggctcactgcaacctccaagtcccaggttcaagtgattctcctgcctcagctcgcgagtagctcggactacaggcatgcgccaccatgcctggctaatttttgtatttttaatagaaatggcatttcaatgtgttgcccaggctggtcttgaactcctgagctcagtcaatctgcctgccttgaataatttaccttttctaaaagttattcttgtgaaagaaggcatagagaactttgcaaatatattagaacatagatagtaaatggttacatttagtctttgatggtgacctctttctctttctgatcttgaaccaacttcatttctcccttactgtttctccagttccaaacttagtgatgagatgggagtgcagacgggtagaagaaggttgagtcaaaggggtggcagggacagcagctgccacgagcctcccttacaacgtggcgggactgccgtgtgcctgggccggctgtgtgagtcaccagccgtgtctgcccaggcctccccacctcctctgtgttctctgtttcagcccaggcagcagccgtacatcctgcctcccgttcacgtccagtgtggtgagcactactcggaaacgcacacctcgcaaggtaactctggcttgccgttctcccttcttaagacaaaaagttgaataccagtaagcagtaaagaaggctttaaaaaaaagatgacagggatgctttcttttcaactttgtcatcgtctgaatgacagtagctaacagcttcagtttgtggaaggcctagactgtcagttacctctgatcaaaaaatttccccagtattggctgctcagggagtcggggccaaggcagcgagcaagtccttttctcctccctttcctaagggagcttagagaagagagtatgacagctcagcccaagcgaatgcacttcaccttcattgccagtatcagaaagctcgtggcagtcactcagcttttcatggtgacgtagaacacgggcatgcagaataattggaagaaataaacaaagtcagccttttcttttagctgtttttctcatctctttctccagcccctttcttggtacacttgcttttttcttctctgagtaaggtaaatctgttttattcctctctttctcccaaaacatctcccatgcaaaatgtgtgaaaaagcttcttctgctagtaatgactccatgataacaactaacattcatagagcaattgtggtattgctgtaagtacttgctatatattgtcttatgtcatccttaaaataaacctataggtactattattatttctattttacagttatagaaattggaatacagagagattaatgatggaacttatatatgaaaatcggtaacttgtaatcgttatgctaactgcatttcaaaaagagagatggtagaaaaccgtggatgttggaaatgtagtaaatggataatatagtttctacgttatcaactcctggccattttgaatcctctgctgtctgaaagtgtgagcatgaaaaccaagacaatcaagactatttaatttaataaaaatagtactttttataaggagactggcaaagttaccacatttctatgggaaggcgccaaaccccatgggaggtggataaattgcggcacatttgtctctgtgttccccctgttttttgtgcctgtctcatctgatcagatctctttccacattcttcctcttcagacagttgaatgtcttcagtcaccttttctgtttttcaccttctctgattttctgtttctctgttttgctcatgtttaaatctgtagtgtgaaaatgaatatattttggccacagaaaggcaagaggttgccttccttggggtgtgtgtgtgtgtaagagaacaccagacacctgattgtagaaatcaatcaggttgggcctgattgtagaaatcaatcaggttgggcctgattgtagaaatcaatcaggttgggcctgattgtagaaatctgctttttctctctttaggtacctctttaaactataattaatttttacttgaattgacctaagtgatgaaaccagatctagaggggatttggggaattaccaaaaagaactcttgattctaattttgccctttattgctgctcaggatgaactagctgtgtggacaccctggctacatcatttgttttgtgtctttagaatgccctgcagtcccctgggtgaaggggctttttccattgccgtcaggaagagcagctctgagcacttagtaattgaaatctattgccctattaaagttcttgactgtcttgtctaaatattcagtcctattgccgagccctgcacaagaggacaggcctccccaactggagggctgttgttggtgcctgatttcaaagcttatggcaaaattgagaacttcctcaagcgacacttactccaaatgtgtgcatgccttcttccattaggttccctttttcttttcagtatgtcttaaggtgttctttctgtatgttggcatttcatccaagatagtatctgttattctatagaacatgtgggtggagaccatgggatttcactttttatgacttgtttaaattaaaagtcacctcatgagtatgaggatgtactttgttgtggcaggatggcttggaggttcacgtgcctttgtttgacttcttgtagacagcatttttcatgggaatgaagaagccttgtattgcaactctcacaacagcctggacttaaattatttaaatggcactgtcaccaatggcagcgtgtgtagcgttcacagcgtcaactccctcaactgctcgcaaagtttcatccaggcctcccctgtatcctccaacctcagtatccctgggagtgacatcatgcgggccgactacatcccgagccaccggcacagcgcgatcatcgtgccctcgtacaggccaacccccgattatgagacagtcatgcgccagatgaagagggggatcctgcatacagacagccagagccagtctctgagaaacctcaacattatcaacacccatgcctacaaccagccagaggatctggtgtacagccaaccggagatgcgggagaggcacccctacactgtcccttatgggccacagggggtctacagcaacaaacttgtcagtccatctgaccagaggaacccaaagaataatgtggtaccaagcaagccgggggcaagcgccatctcgcacacggtgagcaccccagagctggccaacatgcagctgcagggcagccataactacagcacggcccacatgcttaagaactatctcttcaggccaccgcccccctacccacggccacgacctgccaccagcaccccagacctggccagccaccgccacaagtacgtcagcggcagcagcccggacctggtgacccggaaggtgcagctctcggtgaagaccttccaagaggacagctctccggtggttcatcagtctctccaggaggtgagcgagcccctcacggccaccaagcaccacggcactgtgaacaagcgccacagcctggaggtgatgaacagcatggtgcggggcatggaggccatgacgctcaagtcgctccacctccccatggctcgccgcaacacgctccgggagcagggaccgcccgaggaggggtcaggcagccacgaggtcccccagctccctcagtatcaccacaagaagaccttctctgatgccactatgctaatccacagcagcgagagtgaggaggaggaggaggaggctccagaatcggtgccccagatccccatgctccgggagaagatggagtacagtgcccagctgcaggcggccctggcccgcatccccaacaagcccccgcctgagtaccccggtccaaggaagagtgtgagcaatggggctctgaggcaggaccaagccagccttcctcccgccatggccagagccagggtgctgaggcatgggccagccaaggccatcagcatgtctcggactgacccgccggctgtcaacggggcctctctcggcccatccatctcggaacccgacctgactagtgtgaaggagcgggtcaaaaaagagcctgtgaaggagagacctgtgtctgaaatgttttccctggaagacagcattatagagagagagatgatgatcagggtgagtgtcctcctctcccagggcattttccagtgtgaaagcacatgcttcaggcactgagcaaggggcagggcttatgcagggaacgtggtaggtttttaaggaatcattgagcatttaaaaggtagtactttattacacaaaatgttgagtttttgccctttcagataaatcttccattctcatttgtggcttctaacaggtgtacttggtacgttattgaggccagtgcctcagccagcattttgctgtttattcaaagctcagacttccaattgggtaagctggtattggggaagttcaccttgctgtgtcttttagtgttttgttttcttgaaggaaagctgtcccccacatccagttaggtattaaagagcaacatccctataccgccttctgtatagatccgtaagtcaagactcaccagtattgtctggactgtgatatgtctagctttgtattcagattttctttcaatagatgtttcacacagattcaagaaaattatagtaattggatatataacttagtaattggataaataattctccattgaacttattctgtcaaacattcacacacatacgtgaatacacacatacatatatacatacatattaccacttgaagatccatcctagtactagacatgaatagctcttcttcataatatgtacagagccaggtatggtgggggacacctgtagtcccagctacttgggaggctgaggtaggaagagcactagaagccaggagtatgaagccagcctgggcagtataatgagatcttatctctaaaataaaataataataaaaaaagaaccagccagacatgatggcaggagcctgtagtcctagctaatcaggaggctgaggtgggaggatcgcttgagcccaggaattcaaggctttagtgacctatgattttgccactgcactccagcctggatgacaggactaaacctcatcgctttaaaaaaatatattgtacaatttggggagacagttaagttgtcagaacaggactatgcaggcacatatagaacaacgaagtgaatctgctcttactaatgagaaaatgtttggattatagctactttaaaaaatctcgactgggcactgtggctcacgcctgtaatcccagcactttgggaggccgaggtgggcagatcacaaggtcaggagttcaagaccagcctgaccaacatggtgaaaccccatcagtactaaaaatacaaaaattagccgtgtgtggtggcgtgcacctgtaatcccagttactcaggagggaggcaggagaatcacttgaacccacaaggcggaggttgctgtgagccgagatggcaccactgcactccagcctggatgacagagcaagaccccgtctcagaaaaacaaaaaaaaatctccattgctgcttgccatgaacattttcactcctttaaaaaaaacctattaactagaactaatcaaagccagattgacttctcttcattcaccatggctgcaccataaggtagccaagcctaattttaggaactccgaaacagttgtaacttaaaatttgctttgatggattccattaggccaccttcatttccaggtcttcctaacccatcactgggattcaacctgaaaagaacaatcaaggcccaaagttttaaggaagccaagttcctggggtcagaaattgaatctgtagcaaccttgttacttttggaaaaccttaagaacattctcaacctcacagttctggccagccccactagagtagtgctaagagatttttatacagatatgactttttgcaaacctagaaggaaattgtgcaaggtgtacctttgcctctagcaaagaaaacctttggcttggaatggaagaaatgggtaggtgctgttgggagagagctttcccagcatggaataaagcaatttattggtagaaaatgatttttcaatacttcttccagaccacttaaaagcaacattagcatcaagaacctatcagtctaagcatttaatttagctatttcccctgccaacttgatacttaatgatgtccacatggtcccataacctcattttggttgtattcatcctcttctcttgttactcgtattaaacaaatagcctgtagccaaaatcttggcatgggtctcctccttagagctccttgcattatcacaaaggaacaaggagattttcactattgttttttctccagatgcttttccattccattcatgtgggtaataatgactagcaaattttagccattaacctttagttcaagaaaataattaccccatttctacttcattttccctgttgatttttttttcccccaaatctgctacactcaggagctcaaggacaccggcagaccttagaggtggattaggagctgcttcagtgagccaggaggccaggcaaggtggtgacaatgccagtggctttgagcccaagatgagtctccatctgttttgtttttaatgcaaaaactcaccccatagcctaagcaacatccccacaggtcagatacttctctgctctcctcactatgggcagcttttgccagcttgatgggaattcatgagaggtgatggccattctaagggccctcttgatcagaacacaatgagaaacttttagcaaaagaaaactcaggggctggcggggtgtgcaggtatggtgagaatttgccctctgggcagctctcctggagctgcttgtctgtttgatggatggttccgccgcttttatagcttctcattctggctcctactgcttccttgaagatacttccctgcttgtagtcccctagccagaagttgatgcactgagaagaaaaggccctctgatcacagatcagagcttgtgaattattattattttttttatctctggtaacaagctgatagggtgagtgagaaggatcaaagagacatactttgatttatcactgagtaataatcctttcccaagaaagacaagttaattactttttgtcttagacccagttagggtcaccttacagtgcaggtggaaagaaagcaggactgctgagaggagctcaggacccattttccaggactattgccttctcaaaactttggagagcagtgaaaatagattcccaagtgaaagaggtggcagaaataaaaaaaaagaaagaaaaactctttctccccaaaactagcagcaagcaaacaaagacctaaaaattttaatccagaatcttcccccagggggttcccgagaattgagagaccagggccatttgtaagaatattatatcttttggtggtaagtccttgggtactgtaaacccagaaaatctgagacaggtctcagttaatgtagaaagtttattctgccaaggttgagggtacacacctgtcacacagcctcaggaggtcctgatgacatgtgcccaaggtggtcggggcatggcttggttttatacattttagggagacatgagacatcagtcaatattgtttctgtctggaaaggcaggacaacttgaagcaaaggcaggaagacttgaagtagggagggggcttccacgtcacaggtaggtgagaagcaaatggttgcattcttttgtttctgattagcctctccaaaggaggcaatcagatatgcatttatctcagtgagcagaggggtgactttgaatagaatgggaggcaggtttgcccaagcagtgcccagcttgacttttccttttagcttagtgatttggggcccaagatattttcctttcacagtgcttttctcactttctcccagtaacctcctctgagatactcctttggtttgtctgatgagtcggctgccaccaggataggcatcctgttgtcagtgtcactcacacaggcttcattctgattgtaggtgacattgtggagacacatggaagggcgtcatgcagtcctcccacccgcaattagaataattcataaccctgtgggatggctccgtcaagacctcttcctggggagtgaatttatacatcatagaataaggaaaaaagtctctcaaggcttgaaaagaaaccaaggattcaatggctcttcatctgtgtcagtcaaatgaatctgcaaattggttgcccttcattgtgaatcaaaatcctaaaccctgcaaaactcatctgcttctatgaggaatgcctgtgttcttcccttaacttcaaagacacacttaattttaggaaaggccctttgtggcttgcttgaagtgagcataaagagagctttttcatactcggttagtttcaaggacctgaggaagcacagcaggaggctaaaaaccagccctgcccaatccaatttcaatttagaggtgagggcagagaggatggaaatcaaaaagccacaaaccaggaccaggtgtaaacatcaaaacctttccctaagtggtctgctcagttccggagtccatgttcccccatagctcagtggcatgcagtgatgtcccaccatttgtgttgggaggcaccgtctctgttactgtgggccctctgggtgaagcctggagggtgatgcctgcggatcatcttaggtgaccccagccaggctttgctgttagtgagtttgctaaaccacatcagctctcaattctggggatgacacacccttaggtattccaaggatcagagattaattatagaattaacgtcctcagcattagcccctcaggacggaaacttaggaagattttcctctacagtttatgtgtgtggatctctcaatcaacaacaaactgttttacaagttttgctccgttccgtctgtgcagaaggtccgtcactgtgattggattagatggttcatataaccctgtttctcttttccttgtcctgtcatctttacctttctaaagtgtatcgcatgtaccctattttgtttttgttttgttttgttttgccctatggcagggtgtatttgtagggagtcttttttcttatttattggtctatctagctaaggagttaattaagaataaaagctcaggagtcctataggaactggcttccaggggcccagtgggaatagtgggaaggctgtgtttgaatttgccctactgatggtgattgtctgcattccttggctggggagttacagatttgaggagattaaaacacattccaacattctactagtattataaacaatgagcacatgccttttcttgccgcaagaatctagagaagcagaagatggcaggcctggaggcacagaagaggccgctgatgttggcagcattgaatgggctctcggtggctcgagtctcagggcgggaagagaatcgagttgatgccacccgggttcccatggacgagagggtaagtggcaggcttgtcaatgtgattcattctctgtagtcttaggatcccaaaacaccctccttgcccgaatatgccagcattgagatttgtgtgatgcattctttcttcaatctgagattaggaagatcaggtataactgtgttgcattaaatcagtccctttcagcatctcatgtttctccattccggtcttcctgctttgtccggttggcagatcattggttgactaaaaccatcagcccctaacatgctgtatgacttggtcaagtcactcaatttctttgggcccacttcctgttttgtaaaatgcacaagttaaacacttgcagtagctctgaatttctgtgatttttgtgagcaattgccacttcttaggaagtgattattttatccaagcatttatttttatttttaatttttttaaacttttattttagttttgggggcacatgtgaaggtttattacataggtaaacacatgtcacaggggtttgttgtaggtattatttcatcacccaggtattaagcccagtaccccatggttatcctctctgctcctctccctccttccaccctccaccctcaggtaggccccagtgtctgttgtttccttctttgtgttcataaattcttatcatttagctcccacttataagtgacaacatgcagtatttggttttctgtttctgctttagtttgctaaggataatagcctccagctccatccatgtttcccgcaaaagacatgaccttgtatccaagcatttatagagttctttaaaaatgctgtcccctcgtatgaccataaaatgaggctgatttataattgtctggataatgcattgtgacaacatgggttttgaaaagcagaaagcagctgcatggtagtgtttcagaagcgaagaaaggtggatccttagttcccgaaattgctgtcagaaggttaagaaacaggttgtataaatgtaataaagtactaataacaccagggtgttcgatttctgccagtatgtatccagaattagaatgtttttaaagccagaagggacttcagagaaatcatttaacccaattaataccatgttattggaattagtagtttggccaggaaggaggaaaaaagagagtgatttaatcctcagagctatagaactgtggaccagtatcatcttaaaaacagctatataggtggaggaaaggatgtttggataattaagattaacagtctctttatcattaggactttaaacagagttgttaatagcaaaaatattgatttttgaatttcaactcttgctagttcttgcagatttgttctacttataatatgagtaagaaggaaaatggttattagacaagggaaaatatcaatatggttgataatgagacaaaccaagcattgattgtagaacttgaaatctcttttaacacaatcgctaaatatttaaagaaatttggttgtttcattgagtttttggatcagataatttagagagctgaagatcaatttctgttgcagttcagaaccctgaagaagaaactagaagagggaatggtgttcacagaatatgagcaaattccaaagaaaaaggcgaatggcattttcagcacagcagctctgccagaaaacgccgagcgcagccgaatccgtgaagttgtcccctatgaggagaatcgagtagagctgataccaaccaaagaaaataacacaggatacattaatgcctcccacatcaaggtaagaaggcaagcctgttagaaggtttggtaaagatggctgggttaaagggaaaaatgcggggagaagaaaatgtgtgggctgcagttgtaccttttggcttgtccccagaccctcagggattgtttttgaactcctgtgcttttcttagtcaagtggaagggcatgtctatcactgcagagagaaggaagtctagcagcctcaggaagaacttcaggtcagcgatttctgaagctcgctcattacagaggctttaacttttccttctctctgtgggctgtaactctctctatactcagattatccttttcagtttgtaattagcaggtgctggagactttggaagttacaggtattgcgttactgacataaaagtgtcatgttcaataacaatagaaactattgtttttcccttataatactgcaggttatgcattttataaaagcgcgagtcctattattgcatggtatttagaagagtggagtaattttcacctacactataaaagtgtggttaatattgaatcttgaaagatttgccacattagtcaatgaatttgtgttactaaatttttgttgttatttcaaatacttcaaacctttatatgtcagtattacatagtttagcacttctgcagttaaaactttgacttatggatacatgtgtacctgtagttaaatgtttcttaaatagcttaccttcctcagagtccctgttaacagagggacacttatttagaatgtcaccatttgctctgaactctgaagtgggagatttgttcatctattaatgttaaagccagtgttataggtgttgttaaataacacaaggttcaattgatagtccactgtgatcaatagccttagaaacctgtttttggccttgtctagaattacttactttcctcattggacttttcaactgtagcagaattattaacaggtttttttaagcctgtaaaaggcgagttagatatctagcttgtgtatcaattataactagttttgatacagaatgggaaaagtatagtatggttgggtatatactatttttattaatatacacagataaccatagtttttaataattagaaagtactgtcaaaagaaatataaaagagtaactatcatagatcatattactaattttaacttggatttttgagagtgagaagtaaaaagtgaactctaggaaactcttaaataaactgtcagtggtgggtttcatgggcttagtttacattatgaaacaatgaccaaagtaatgtattccaacaaagatgcagatcacacagctgcttcctgatagagtgtctatgaaaatcttacatagaaatattatattatcttcttcttttggccagatctcttccactattttccatctgctctctgaaaaaagctgtcactttgtataaactgtgcccatcgggcattgttaaccgaggagcattcccttccttggtattctctgtggcccacatttcatcctgtggatccgggttagacatgggtgcatttcatagacccgtggaccttgcaagaacttgtccctgtgttttggaatagaggagtatattttgccagtgttttcccccctgggttccaagcagccgttaacacagaacagagatttatttgctccagaggtggaatcacatgtgtgaaatctacctcagcagcactgcttgttgtgtttttaatgcagtttttaatacccttctgtcaatacttggaatatactgaaaggccccaggcagcagcagcattctctggaagtatttatgtttcctatacgttgggtgccagagaggctaatgtttaaaatcacaattccacggataaaccaaactcctagccagcaaatatatgaatgttatctcccaccagtatttggaaaatggatttttcttgccagctttgacctaaacatgccttgtgtaatgagacaataacttacattgtttttgtttgaaccaagttagcatacagttttatcaaataaatgaggggaaaaagtttcaaacaatgattacttcattactttttgaactctccagagatctgcattgtatagatgtagaagggacctgactttgcaatatcaaggcacagacctggaagggagaacagaaagaattcctccaaaggccaccatttcaccttgacagcatgacctttaacactttgggtacaacttcttatttatggttctcagcagctagtatttatagctgtagaattatcttcccctgatcaccctgagctgcaggggtaataattttattatccaaagtcatgtcatgactgtagttcagttggatgctgtggtactaccaaggtgaagctattgataaaatatatgctgttgacaagagcattcgtagcatctctgccgtgcatggcaccacagagcagcagtgacagcagaggtttatgatacacttcatctcagatccacaggagaaagatagtgctccaaaagggatgttgtttcatgatcttttttttttttttattgtttaattggatgccatgaagcactgcttttcaaactggattacaacacagtggtagaatgtgaaatcagtttagtggtcatgaccaggtgtgtgtgtgtgtgtgtgtgtgtgtgtgtgtgtgtgtgtgtgtgtttcaatgaaatcgactagaaaagagaaaagaatggaaagtgtcagagtacattgcacatagtaagcagtaactattatttctgtaacaagtaaatcctaagttatacatgttcatatatatgcatctatacatgtgtgtatgtgtatggtttttaataggcactagtttgcatatactgtgagttgcaaacaaagatcaggtaaaggccaagcctggtggctcaggcctgtaatcccagcactttgggaggctgagatgggcggatcacctgaagtcaggagttcaagaccagcctggccaatgtggtgaaacgccatctctacaaaaatacaaaaattagccgggcatgatggcgagtgcctgtaatcccagctccttgggattctgagacgggagaattgcttgaacccaggaggtggaggttgcagtgagccaagatcgtgccactgtactcccgcctaagcagcagagcaagactcagtctcaaaaaccaggattagataaatatttaataggcttgagtggcaaaaagtattttcatgtgagaatgtgtcactacactagcctctgtagtctcagggtttttgttcattgaactaattcattcggccccaaaaatatatccaaggttttaaggtggatacagatggacaggtgatcagcaggtaatgttgtccggacttggggtttatttaccgatacttttcttggtttttaggtggtggttggcggggcagaatggcactacatagccacccaggggcccctgccacacacgtgccacgacttctggcagatggtgtgggagcagggagtgaatgtgattgccatggtcactgcagaggaggtaaggggaatggcctactccacatcctttttccccaggggaaagggtggccagaagatgggctttgtgctgtcaactttgctaccctatccttcttcctgcagtgctgtttctctgcacatgcttttctctttggtatacatctgttttcttacttccagatagatattttttcccctggagataattgattgttgtagcttttcctcctcccattttcatctggcttttaactcttttccttggattgtaatgcactaaactgaaaataaaacaacagaaaaccaaaaatgacagactttagttcaacctgctgactttctgtgccaaacgaaaacagtgatctttccactggaatttgggagtctcaggctgctctgggcaaatcgacatagacgccaactccaggcacccagctccacatgccatcatccttatcagctgaaaagagaccagaagctgttgttcctggagagtcctctgttctttgggggaagaaaaaatatctttttcttcttttgccaagccaaacatagtttttctgctgtaactagagaactctatgtgatgttataaaaaaccagcctacactgccagtcaatccagtcggtgttgagcttgctgtctttgtggggagaagtgttgtatttcttctcttgtcacattctcaaaatttctttaaccaccttcttttatttctttcattaaattccaatttatgttttgaaatcattcaagggactagtttcatgtgtgtttaccaatatccatggtattgcagtggcctttcctagctatgttaaaggggtcaggaacaaagaaaattggggaggaaaaagtcatattttccttcattgactgtgttgagcatttgcttctcagcacagtccattagaagaaaataatgaaagggacatcaggctctttaaagccagttgtacttccctgggctgacctgtttgaccttcccacaaagagaatgaatcctccttaaagcttctagaatagatttatcaccttatcagctcacaccattgcaaggcattcattcacctaaatacagcataccatctgtgctaacttcaggagtacacggtaaacgagacaggcaccatccctgtccccatagagcttatgtcctagtgggagggacattcaaaagtgaacagataaaatcagtgcagatagcagtaagtgccgtggcagaaatggaaaactatagtccagagtgggtctgggtgagtacaggtcctcctgcctcatccctcctcctctttgtgtgggtttcagctgcaaaactgtcattcacgctaggggactcctactaaagggtggcttcacaatgtgcaaccctgagctccaggctctgtatcatgttgcacacttgctggaaggctggaagtaaaaaccttattaataggagcataaattcaagggagaaaatttttaaaaatggaaaaagggttaagaaagagagtgactggggtctactttagatcaggggggtggccaaggaccctctgagggagtggcattggaggtgagaccggagtgacaaggagccagccttgccaagacaaagtagcatctagtaatctgtgggacagctggggacttatagtcttttaaaatccataactgatttagacactcagcagaaatgtaaattcgaggtaaatctgctttcacaggattggtaaataaaagaggaaggtatgcttccaatttaaggagactcaattaaaccaaatgaagccaggcaaggtaatttacatattccgcaaagatgtgttgctttacaagtgggctttacaagaggaactctaatgttcctgtaaacagccatcagggttcccagagcctgtcaccactgcagctgtatgtgttcagtgctccttctctctcaccacctactccttgccctgaatctcctcagctaccacctcctccacactccgccccttctccagagattttaaaacggtgcaaagctgaaacatagaccttgtgtaaatggttgagaatacatattctcagaaaagtttataaaatcaagggagaaagaatggtgatgtaagcagctgttctcagttctagttgtagattgaactaaaacgcattggtcaggctgaaacaaatgtgaaatcgacactagataaagacagcatcggtagtcagtgtgctgtaacagaaagagctgtgcgctgaacatccgaaaggagtaacgtgacctacagcgattgctggaaccccttcccgccttgtttaaaacctttgaatgacttcccgtgcccatgggatgaaatccaaactttccaccatggactgtgaggcctttccagtctcctctctgatcgcctggcccctcacatgtcacactccagccaccccgaagaccttcgtttcttttttcttttttttttttttttgagatggaatctcccctctgttgcccaggctggggtgcagtggcgtgatcttggctcactgcaagctccgcctcccgggtttatgccattctcctgcctcagcctccccagcagctgggactacaggcacccgccaccgcgcctggctaattgtttgtatttttagtagagatggggtttcaccatgttagccaggatggtctcgatctcctgaccttgtgatccacgcgccttggcctcccaaagtgctgcgattacaggcgtgagccgccacgcccggctgacctttgtttcttgaatgcacgaagcttgttcctgcttctagactgcacttgcacttctctctaacattctactgcacctcggttgtgaatcttttaaattttccattgatgtaactgtcattgtaaattgtgttattggtcttaactagcatgtataggatctaccctgtggtagacactgcagagtgctactgaactagcgatttagaagctatttgcattttcttctgtcttcatatcttaggattaaaaggatgagagcttcccttgacctatttccaattttgcttttatatgtgatttaggagggtggacgaaccaaaagccaccgatactggcccaaactaggttcaaagcacagctcagccacctatggcaagttcaaggtcaccacgaagtttcgaacggattctgtttgctatgcaaccacgggcttgaaggtcaagcaccttttgtctgggcaagaaaggacggtgtggcatttacaatatactgactggccagatcacggctgtccagaggatgtccaaggatttttatgtaagtgtttttcttcccagtctgctacctgactgacttttatgatctgtgtcaataattcatctgttggagatgaaatggaaaaagaggatgctttctcttaagtggcaaaagtattataatattgaaatgtatattcctttcttactatgtagaacagagtataataatacatgtcacttattctgtttacctttcatgcacgtaagctaagactgtgatcaacatattggctctaccttgattcagacctttagctactcatttaatcagtaactattctgacacatgttacaacaaggatgaactttgaggaatgatgctgagtggaaataatccagtcacaaaaggacaaaaactatgtgattccacttatatgaggttcctagaataggcaaggtcagagacagaaagtaggtgagaggttaccaggggctggggcaaagggggattgggaaattacaaatttttttctgaggcggagtctcactctgtcacccaggctggagtgcagtggcacaatctcagctcactgcaacctccgcctctcagattcaagcaattctcctgcctcagcctcccaagtagctgggactataggcacagccaccacatctagctaatttttgtatttttagtggagatgaggtttcaccatgttcgccaggctagtcttgaactcctggtctcaagtgatctgcccgcatcagcctcccaaattgcagggattacaggtgtgagccactgtgcccagccaggaattacatttgatgggtgcaacatttctgtttgggacagggaaaaagtactggacatggatgatggtgatggttgcacaactatgactatgcttaatgccactgaactgtgtacttaaaaatggttaaactggtaagttttatgttgtgtccactttagcacattttaaaaaaaaggagaaataaaacttaaaaataggccgggcatggtggctcacacctataatcccagcactttgggaggccgaggtgggcggatcacccgaggtgaggagtttgagaccagcgtggccaacatggtgaaaccccatctctactaaaaatacaaaattagccaggtgtggtggcgcatgtctgtaatcccagctactggagaggctgaggcaggaaaattgcttgaacctgggaggcggagtgaaccaagattgcatcattgcacttcagtctgggcaacaagagcaaaactccatctcaaaaataaataaataaataaataaataaaaacgaataacattaaaaaaattgttttcatgaaggtttgcatctcacaagacctatatttccctacagttgagcatctcagtactttctcgtactttctcatatttttatgaagacactaagaagtattgaaaccctcttgtagtttttgaaactgaaatttgctcaatggctaattcattaatttctagtttatgtgtacttttagaatgtggttatattagaaactaattcaccagattatgtgcagtatttttagtttgaaagacccaaaattgaggcatgtacccactacgtgccaggcactggaacgggctctgagaatgcagagatgacactgagttcagtcttcacttccgacgtactcagagcctaatgggaaagacaggccagtcatcatcgtccaaagatgagatctgataccctcctctgcttttcagcggtggctgcagctctccctcttgctttccacatgctcatctaactgtcctgtgcttgtcaggagaccccgttctttactcacccacctggaaaggagccccagatgctccctgtagccttgtgcctgctctgttgttgactctccagctagtggaagacctgtgaccaccatggagggaccatgatccagatgttggatcatgtcaaaaccttgattttattttggtattcatttagaatgggagaaaaggggaatgacagagggagagaacaggttctcaagacctaaaaatactgatttacaagttccaataaatattccgatgtgtacttatccagcaatacaagcatttcatttccttgaaagtgacgatggtacttgaggggtttggcactgaaagcagagagtagaaggatgactggagtcagagaatctagagtaagatccagagaggactcgtgatttgcctgaagtcaaatggcttgttatctgtagcttgaaataagggcagtgacctttacagaacttcttttcctcctaacagtgctcattgtatttctttcacctgatcacgtgctaattgacttattaaaattttctccaagaagcagaaaagggaaataatataaatagatcagtttgttgattggctaacagctctgatgaaagagtgagcttataaggcactttaaagtatagtcttttaaatcagaaccaattaaggaaagcctgtctaaattaccaaaaaagacatagtattttttttttttttttgagatggagtctcactctgtcacccaggctggagtacagtggcaagatctcggctcactgcaaactccgcctcccgagttcacgccattctcctgcctcagcctctccgagtagctgggactacaggcgcccaccaccacgcctggctaattttttgtatttttagtagagacggggtctccatcttctgacctcgtgatccgcctgcctcggcctcccaaagtgctgggattacaagcgtgagccaccgcgcccggccaatacatagtatttttaaagaatgtaaatgtatgtattatgcttttaggaaagtcaatacacgtattctgtgcagggcattagaaatgttgaatctgtttctcctaggttttaaaagatttttgcccatgtttaaattagattacctggatgcagagtacctgagccaaattgtttactgcccgccagaagtctttattgagttacagcgtaaggagctttattagtatgactgatagaggaaacatcctttgaatccaccttctctccattacatgaaaagctctatttgaaagtggcatctaccgtattacccaacattccttttatttttcttcttaaatttagctcaagtaaagctttgtctcttgtatgtaaatattgcctttggtcagatagaatactcagttgcctaatgtcttttccccctcgcagaaaaattgtaaagaagattccacacacaatatctagcttgtattggtacctaatagtaactactccctctatgcatctcacggcatctccttttctttttctttttttaattgagacggagttttgctcttggtgcccaggctggggtgcagtggcgggatcttggctcactgcaacctccgcctccagtttttaagcaattctcctgtctcagcctcctgagtagctggaattactagctgggattacaggctcgtgccaccacatccgactgatttttgtctttttagtagagacagggtttcatcatcttggtcaggctggtctcaaactcctgacctcaggtgatccgcccacctcagcctcctaaagtgctgggattataggcatgagccactgagcccagcccttctttcttttttattttgtcctatctcattgtacattactactactagtagtactgctatgactagtactaataactactactagtcatcatcatcgtagtagtagtagtagtgataataatagtttggttttttggtaaagcacttcagattattttgtaattagataagtttataaaggaaagtatggattatttatatatgtctgtaaacaggtgctttgaaattatttgaatggttcaaacctacttttttctcttcaacaatgtaaacatttcccctatagtctggtttacacttttgccttaggatgaggttcactgagtatcaagaacctttaaacctgtttctgtcctgagctactacaaaatctaaattattaattacattttgggggtttttggagtgtctgaggattacatttccatacttttctcttttgtcatggttgtgaaaaagtcattaaggcttggaatcctgtgatttttcttttgtgcctaattggagtcatgaacgcacccctccctgcacagccctgctgagccaagcagatgctagaaggcatggggggtatcatgaccccctccacctcacacacatgttgcctccagaaagggggttcatcttgggctactcacatagccccgtggaatccatgctgaaaagcagactccccaaagtctactttaaaacccaaaaatgaagtcaagcctcagttgacattcactcatcagtgaggggaaggaagaaggggcagatggatgctctctccccaccagaaattggctctgacaggcgggcgtttcaaggggacttagcagttgttctgatcccagtctgttaatagcaggaattgctgtaagtaatgtctagaatcatctgcttgagggacttagggatttgcagaggggaaaacagaatttaatttttaaaaaagaactatttaatttaaagaacaaattctcccacgaactaattgactcccagctggtcctgtctggatccaggactgtacattgggtaccagccaaataattagtgtcttgtaagaactataaattattgtcacttaaaacacacacacacacacacacacacacacacacacacacactcaccatcagttctcttccgctcccccctccccaacttacatgcgaagccatggaggactttggtgacagaatttgcattttgtcctgcagcctacttggaggagatccagtcggtccgtcgccataccaacagcatgctggaaggcaccaagaaccggcacccgcccatcgtggtccactgtagtgctggggtgggaaggaccggcgtgctcattctttctgagctgatgatctactgcttggaacataacgaagtgagtcattctgggcttctctccggatactccaccttggggacaagtctacaccctggccaaacctttgcctgcacccttgcattttcagtggttaatttcctgtctcccaaccagagttttccaggctcctggttcctagtttgactctgacatttacagccctccttatctttttgccctcccactgctccgtgtagatacccagataaaacaggagaaatgagggtgtgcaatagaaaacacttagaaaatgtgatcttaggcggcatctacttccagaagtctttggcattttgtagatagcctggttttattgtgggtaattttccatggtgagttatttgaccccatatagtttcgatgcatcttgcatttctaggatgtgttctggcctaaatgctaggtgaaaatgtgtctacttggaaaatgtttttcattcttcagagtgaggtttgaggggttgtttgcttgtctagtctggttgttgcgtggtgtagcggagcagagtagatactttgagcacgcaaacatccccgtctttgcatcagcgggtcaccctaccccttctccctgcagaagtggggtgctgctgagcctgtgcacacaaggtgcgtggcattcctttgctgctgtaggattagggagttacactgagagactttcaattttgtgtaggtgagacaaacagcagtcaaaagctaaggaatagttctaccttctagctacgtgggacattagaagttttaaggggcttttgcctgccatatcagccaagtagaggagccatgaacatgtcactcttcctatttcacagaagaggaaactgaggcccagaaataattacatgatttgtctagtgccatgtggctcttacgcagtggtactgaagccagaagcaaggtctgtgtctgggtccagagttatttcctgtcttcactctgcctccaaacgctgagtaagatttggttcttactcagttttcaaattatatggcttgaaaaattaaaggaaacttgtggtttggtagtttttaaattacagaatgatttgttgcaactctgtggaggaatttatatgataatatacctatttattcaatagcatgaatcgtttgaaaatcagattaaatattgctacatgaagtttgtcatattgaatcatccaggaaaacaacgaatgctaagcttagacattaaactctctgcccatgaaaagataattttgagaatcttccagtctgtccatgggaatgaatgtttgtgctgctaaaaattggaaaaggggcaatcccaactgtagcccaatgttagaaaaacataaaacaaagcttgagcgaaatgttcatcatggaatcagttgagactacataacagaaatgtcattgccctctgagtttttaccattttgccccacataggatttttttattgtttgcctctctattcccatcactactagaggtctctagaaatctctagaacaatgagtaacctgccactgagtctcaatccatccattgctaggaagacaaaataagatgaggtagaatcagtgtgtgcatggcttgagggcctcatcatcaccttccccacctaatcgtcctttccttcccttcatatcacttttgtcaccaaattccccccttgttttcttttctttttttcttttttttgagacagggttttgctatgttgcccaggctggcctcaaactcctaggctcaagtagtccttccacctcggtctcctgagttgatgggattacaggcgtaagcctggccactccacttccttccccattccctgtgctccgctccctacttccccttttcaactcaagaagccattctgtcttgtctgacacgaaagactattctgttctgagctctttggagacccatcaaaggctgagcctcagtgaggcaatgacatgggggctcactgaacaccagatgttactggtctggcagagcacagacaagcatatcaaatccggaacagtttggagtaagggattcggccagtgtggcctcctgtggacttggtgaaggctcagggtggttaaatgctctatggtgtgtccaaacatagcggatttcctcagtgcccaactgcatgccagaacattctttgctgggacgtggtcaacccaaaaagaacttctgttcccattgatattcaaagatagcaagatgactcatatttttcacttctcttcccctagcacaaatatagccagtcttatctgtcctatttcccatggttgctattggtagatggttagcggggagaaatgctctccttttgttctggtactgttcaggcctggctagtaagatccaagcccctatttcaggagaagagtagaccatgtttagtttattttgtgtttcaagcaaagattttaacaaatatatattaaattgtgggacccatttttctcctgtccaaactcccctgccttctttccacagcttctggatttagcatactttatattttagtctgtaattcatgcagttttaattctgtcaatgaaatggcctttctttttcctggacttgtccctctcagtctcattctaaacacagaaaagttgagcagaaacaatgaaacacagacacttacaatgaggttggtagctgtgcagtggggagtggggacagctgtcccaggctgctctgggaagcctccctgtggcccagtgcttttggtcactgagtgttagctgagactttttaaggtgcatagagtttttcagaaagcactcgttttatggtctgcaggacactcagtcccttggatgtagctgtctgttccagctacagctaattacaaaaggtcaggatctcagtagccaaagggcagatgtcttgatcttgctgcttttctgagtaagttatacctccttcataaagtgaggaggagaaaatgtcttctagacaagattgagcaattgtcaactgctttgtgcttccttggcttgggggcagttaagagcagagcctgtgggagtgaatgaatctttaagccagctgggaccctttcattgaagaccaggagaactttctttgtcatatccccagacttgaacatatcagacaatatactgtcatttaggctcagtcctacaggtaattgagatggggatgatggtagaggaggaggaggaggatgtggtggtggaggaggtggtgatggtgacaacattgaaaataatatcgtaacagctaacttgtgtctagtgtttaccatgtatacgcactattctaagagcctgatagtattaacacaagtagcctttgcagtgacactgtgagctaagtcctgttagtatctgtgttagtccattctcacactgctataaagaactacctgagactgggtaatttatgaaggaaagaggtttagttgactcataattctgcaggctgtacaggaagcatggctgggaggcctcaggaaacttacaatcatggtggaaggataaaggggaattaagcacgtcttcacatggcagcaggagagagagagagcaaagggggaagtgcaacatacttttaaacaaccggatctcatgagaattcactgtcacaagaacagcaagagggaaatctgcccccatgttccaatcacctcccaccaggtccctcccccaacactggggatttccagtcaacatgagatttgggtggagacacagagccaagaccatatcagtatcctcacataacagaagagaaactgagtcataagtaaatgaagtaatgtgcccacttcccacagtcaagaagtggtagagctgagattcagcagatgaagccttactcagagcctgtgctctgaacaccagtgtgatcctgcctcctggctaaaacctttggtgggtaggggagggaacagccttattctctctattcttttatcttcagtgcccaaccgcagagtaatcctcatcaaacatgaaattaagttcattattaggtggctctaggtcacatcttatactggtcactttgcaatataatttaggcagagacctacttgttactgtcagaagcttataacctaggctctgtattttgattcatagttcgaagattcacatgccttttttttcttttcttattaggcagggacttgactttgtccctttgcaccactgtgattgcaccactgcactctagcccaggcaacgtcgcaagtttgtgatatgcattccttagttggtgttgaacaagagtgactgatggcacgtgtcatgtcatacctatacacggcttggaaatagcttaaattattttttaaggttcaaaggttacaaagtcaggcatacagctgagtttttattattttcttttaaacacttgcttagcccttgaaaacttcctgggtgccatcatttgccctgggttaagagctcccagagcagagtgaatgtgctgaggccaccatggcctccacagctcaggggtgctccagccgtatgtgtcctggctagtccaggaggatggacatggtgaaggtgaggggagaggacactgtgacagcctctgatctgctcaagtacccatgacactgaattaatttcctttcattaatgatagtatatatcatcgtatatattctcaaagaattcacacataggcaatctcatttaatactcaaaatgttctcatttaagactcaaggctaggcacagtggctcatgcccataatgctaagacttttagaggccaaggctggaggattacttgagctcaggagtttgagaccagcctgggcaacagagtaagacctcgtctctacacaaaattttaaaagttagccgggtgtggtggtgtgcatctgtagttccagctactcaggaggctgaagtgggaggattgcttgagcctaggaggttgatgttgcaatgagttatgatcgcaccactgcactctagcctgggctacagagcaagactctgtctcaaaataggtgttctcggccaggcgcagtggctcacgcttataatcccagcacttttgggaggccgaggcgggcggatcacgaggtcaggagttcgagaccagcctgaccaccatgctgaaaccccgtctctactaaaaatacaaaaaaaaaaaaaaattagccaggcatggtggtgcgtgcctgtaatcccagctactcaggaggctgaggcaggagaattgctagaacctgggaggcggaggttatagtgagcagagattgagccactgcactccagcctgggagacagagtgagactccgtctcaaaaaaaaaaaaaagaaaaaaagtgttctcagttgaaggcttttactccaagtaggactggtgttcagagatggcgctttgacattttaaaggtctacacttaaattatctcacttgatcatgaccacagtcctgtgagattataattgcattaataacatttattaatgttaataaaggaataatgaggtcaggcggggtggctcacgcctgtaatcccagcactttgggaggcctaagtgggcggatcaccagaggtcaggagttcaagaccaccctggccaacaggacgaaaccctgtctctactaaaaatacaaaaaattagccgggcgtggtggtgcgcacctgtaatcccagctactccggaggctgaggcaggagtatttcttgaacctgggaggcagaggttgcagtgagccgagatcacaccactacactccagcctgggcaacaagagtgaaactctgtctcaaaaaaaaaaaaaaggaataatgagtaatatttattaagcactcactgtgcactaaatgcttgatatgtgtttcatcatttgatcccatgaggcaaatgttatttcataccccatgttattgctgaggaaatgtaactaactagggcaaggccacactgctgttagaggaaagcattattatcctgattttacagatgaggaaactaagaccctgagaggtcttaaatcctgtcattgggttgcaggggagttgagagtaccattcaggtctaactccagcctttatgttttaaccagcagactagtctgtattcaaaataatacaccaggacaggtgtggtggcccacgcctgtaaccccagcactttgggagactcaggtaggaggactgcttgagcccaggagttgaaggctgcagtgaactatgactgtgccactgtactccagcctgggtgacacagcaagaccctctcagaaaatttgaaattaaataaaaataaaatatcccaccagtgacacatgatgaccaggttctccagttgctgatataaactgtttgatgcataaaacccagccagggcagagtcccttgccttctcttgtacctggacatgggcagtgggtgagtgcttcctgaatgagggaatgaggaatgctcaaagggaagcctcctgtctcaggaccttgtgctttctctcttttcttgcagaaggtggaagtgcccatgatgctgaggctcctcagggagcagaggatgttcatgatccagactatcgctcagtacaagtttgtctaccaagtcctcatccagttcctccaaaactccagactcatttaatcaccccaatccagctcctggaggagggacccagctccatcgcgctggaggagagtcacctccagacaacatctgctccccccacaggggtgcaggtggctggcagcaaacaggctctctgaagacagtagccaagattattcacacataccatgtattattttatatgagataatttatttttttcccctttggaataacttttgtgaattattataatgcagtttccctagtaatatagtacttttcatttgaaccacatcttgactgatctgtattgtaatatatgtcagcaggtaaggttgcctgctggatcattttgaggacagaggcatgagggagcacatctcttgtgaagttgcagccagatttgtaaccaaccctgaaattcatcagcttaattcatttatcagcttgattcattcatcattcattgcttatatccaaagcaaagacggtaagaaaatgaattcatcctgaaatataaagaaaagggtctgaaggaacaaacacgattctcttatattttggggctcatgagccttgatagacagtttcctctcgtcttcatttccacccctcatcctcagtagtctcctctcccccacgccccaccccaacttcccccccaagcttgagttaaagacagaatagctaaagacagtgctgcctttacaatgcagtaattgccatctttggggccgaaagacaagctctgtgttgtgcttttcttgaccaccccttatcctgggctctggagcttgtgtttccctgctggcgactgtaccttgggtatttgttgctacctctcctgtttgctcagtaggaccctgtctggtggcattgaggctctggaccagaccatctgtgcagttaaggctctaccctgattgagagaggatagcagacctagaaagagaaaggagttgggcagggcctttgaggattgtgtttttcaggcagggccttgatgatcattgttttttatttaaataagatgtgtgtgctggacagagacctaaaagttgaggtcactaagtcattggaaaggccatcaaggaaacagatggggaagctgatttatgggagctgtaaggcatttagctacataacaggggtcctggccaggaaacacatcaaatgtgacccccgctgtgctgatatcatcttcaggctttggtctgcaagatcagaattaatcccactcgggaccccatagtccaaacttggggccacttgatgaacgatggtagaattgtcattggcagagccctgtgcttctttccttttcttcataaaatccactcgctggtcagttatcttcactttgaagcccagttcttagtttcttcctatggcttcattggtcagtgtccttctgaatttccaaggatggtacacaataaatcatgttttgtacttttttcctcttactgcattttgggggatttatcattctatgtctaccttttcttgagtacagctttgatatgcacctgttgttacgtggtgatgggaagtcacaggcgtgctctttctagttaatttgatgccacatcttccttgtcttttcagcttgggaaaaaggcggcagtggaggaaggcatggaatgcccacagtggtcagttcaaagaacaaacgtgcaattaaaaaactgtagtcagccaggcacggtggttcacacctgtaatcccagcactttgaaaggccaaggcgggcagattgcttgagctaaggagttcgagaccagcctgagcaacatgatgaaaccccgtctctacaaaaagtacaaaaattagccaggcgtggtggtatgccctggtagtcccagctgctcgggaggctgaggcaggaggatcacctgattctaagaattcgagactgcagtgagccgtgatcttgccactgtagtccaggctgggctacggagagaccctgcctccaaaaaaaaaaaaaaaaaggaaaaaaggttgtcaagaaaaactagatgttaggagaaaggaaaatttaattgcagttttttttcttagaattgactgctgtgagagttccatatgcctttcttcattgctgcttttgtcccccgtgagctaaaaagatggagtgacatcaaatcaaccagaaaaagtatgcctttgtgacatcccatcaccacatgccaacaggtatatattccccattaagttcttcggaataggaatcctctgtttcaacctggccaggtgttgtggtggctgtactctagttagactcggaatatctggggatggagggcttcccctgtgtcttctacttcaaggtctgaaggctcagtgaaggagtataatctgctgatctttgtagattctggagttttgttgtatgtcctggaaagaaacccattagtattacatgtattttcagtgaacagagcttataacccttattataagaagctcatcaataagcaaaaagatacttgtttcctttccttggaggtttttccatccttgggatattctgctgttagggatgttttagcaagtggtctcagttactggtttattgcgtgatgaacaacatcagtatttatcttttatctctaagccccaaggtgggcactgttagaatatgtctcatgtggacagcatatagatctggtgcgtctttgaggtcgtcagagctcatgggcttccctgaaattcatccactgtccctgccgtatgctacgggaatatacattagtgtacaaaatgcagggaggaagtaggtttaatattcaactttctagccaaagtttatattgaaacccaaaagaaaacatttaagagttgttccacatatttcacttttaaaaacaaatgcctttggttctttagcacattttgcattccttttcacatctccagtaaatgccaacatatctcctgttaaattagcagcagccatttaaagtcctttcggtggcatctgcataataattgcccagagatgctttatatctgggaagcaagccaaggaataaaccttgaagcaaagtgtattaaattagttatctagttagagcttttggaatgatttcctgatgatgtatcaagtctgaagctggagctgtcagtgtctattgctgcagtttggatttgaagggagaaaatgtaaaatggaggaaaaaaaagttaccatctcacaacaaagccatcaaacattttccagccgctgttttcgaggttttccagttgaactgtttggtttctttcatccacactcatttggatacattgacccgaggtattcatccttgtttactgtggtccctgaatcatgggggctgaatttgatgtcttcatccttgagatgagcctgctggcttagctgaggaatgtcctgctgaggtttcttaggtttccttgggttctaaggatatactggatataccatcttttagcaagagtatctggtagcatttacagatagcatagacattggtatgcacttctttccccagataggaagtaaaggaggatttagttgcatgaaaaaaggatgttaaacattgattacataggagtaaagatgaatgagctgcaatattcagtcggagctaaacaataagatcagggaaggtaaaaatacctatgtggaatattttgaatcgtaagcttttgaggagcttaaattgagagaattttacttttaattttgtagattgagaagaggaaccgctttttaaaattatagctaaactgtcattgttttcctaagagtcacttggccatctctggccccctctttcatcagcctgaagagagggtctttgtagactgctgagggtgggccttgtaggacttgaccatggcttacacctacttaacctttatcctgctttctttcagcttgtgcttttcagttataaactccagtgggtacagcaggctggccttttcatccagctgattatttttccagcttaatatagattgacccatatgaaatttccaataatggaccatattttctgcaaatagacagtattcgcatggatcacctatatcttccccctgatacactgtgggtcccaacaccagatgtcatttctccagagcagtgctaatgaacacaaaaggtataccctgggtggcccagctcttttcacgaacgtgctgccctgctcatagtgatccttgcatcacttggtgaatgggccatctcctgggacatggaagttgcagaggtagatagtgcactgcagcttctcttaagccggattggccatcaggcatatcactctggagtttttagctgctgtcctttcccgatgagcagtctgtattagctgacctcagcctacttgttacgtgacgtatgggtcccaaaagtgtcctttgtcaaaaagcagaatgtgccttctagtctccctttccccatctaatggtgtattcgatggtgaagatgagtacagttgaccacccctatctgtgggttccacatccctatattcaaccaagtacagattgaaaaatatttggggaagaggggaaacccacaaagttccaaaaagcaaaagttgaatttgccacatgctgaatactacattgaattcacacaaatgaagtgatgtgtaggcattgagttaggtattgtaaataatctagagatgatttaaagtatgcaagagatgtgcataggttatatgcaaatactgtgctattttatataaaagacttgaacatccatggattctggtattctcagagggtccttgattgccccctttggtaaaggacaactatttcgttactgattttcgtttggggaagatctgtcaatcccttgaggtgcgggggttggggggatggagggtacagggcattctaggatgtgtgccagggagcacagattcaagggatgggattgagtcagtcctgtgttcttactcagtgtcagaaataactctgtggagctcctagagtaagacatttccggaagcaccacataattactgttgggctcttagggtagcccttttagggaattgagcattcccatgttttaccaacaattattctgctgctgtgttttattatattgccaatggttttgagacactcatcatgctcttatttagtgatttcttttcatgagcagagcaacagctcatccagcatggtttccaaatggagaaatttgggtcttctgtagaaaccacacaaattctccaatggcctacagccttatggttggcacactagttggccctatagggtggaaataaagctgtaagatgttaaactgcatttgatacttctcttgaacgctgagcaaggaagcaaaatagttcttgtctttacttaagcttctaagacattttggggcaaaggaccttacagatggcgtctgttgaaagtaacagcaacgtgccagggagaaatgtgggggaaatctcatcaaattctgccacctcaaatgtgttgtccagaagtcagtgttattcagggggccctgtgaaacttgaccaccagcttgcgccatcaacactcagcctttatccagcctgctctcagcttttgtgtttctgttagaaactcagataggtaagtatttttattcagtagactacctttcttatcttttcagcttaatatagctgcatcttctttctcaaagccaaactaagatattccctattaaaatgtccatgagcctagcattgagtgtctggcatccatcaatttcatagactggaaaatgattgttgtttggtacagtaaagaagaggatgtgcatcagttcctaccgtttgcagctttgtttttagccttcccattttaaaaataaattcaaggacattgagttacaaggcaggagggctggagctactgggcagcctgaatatgacaagcatttgtgtggaaagtcattgctccttctgccacactttgggccatcaggatcattctttcccagaagtgccataaacttgctcaaaagtttctataaatgggaagagggagaggaaggatttttgcatcagtcctgaagttgctatccaaaagttctctgtttcacaaataattttctgaactctggaatgcctctcctactccctgcctccctttctgtaatgtcagagtgatggaaaccaccaagtggcatgctagggaaagcctgcagcagtgttggagtctatttcaccctagctcatagttttaaactgtcttcactgttgaggtagagcttgatgaatgtcatggattatgatgtgtggtttatcatatttgcctggatttgctgatcaaaagcaccatcttccctcgcctgctgctggcagcctttccttgccttgcttgttagcagagcattctgcttacccatgtggctcccagagttagcagccccggctcttggatttcttgattcttctcccctgtgatctcagaggtgctgcagaggacattcccctttagagcaagtcatgtttctattcaggccacaaaactgggatgtacatgcagtgactttggtgttccttgtcttgttcaggggaacgggtgggactgttgtgtgctgtcaccctcttcattccatgagcaccttgttcacttagggtctgctgcctttttttttttctttttctttttttttttttttttagtttttgagaccgtgtctcgctcctgttgcgcaggctggagtgcagcctccaaagtagctgggattataggcgtgcaccaccacacccggctaatttttatatttttagtagagacggggtttcgccatgttggccagactggtctcaaacctctgacctcgtgatgacccccctcggcctcccaaagtgctgggattacacccagcctctgctgccttttcatatttccccatctgctttatggatcaactctcaacagtacactttttcttttctttacctaccctatgagtgcaacccagatgtaagagttaatcctcgtcagagaatcattgccttaaacctctcagaaatatgtaattaggaaatcttattttaattttttaaaaattgcttgtatagtttcaaagaataagatctggcaaatggccagatgtggtggctcacacctgtaatcaaaccagcactttgggaggctgaggcaggcagatcacctgaggtcaggcgttcaagcnnnnnnnnnnnnnnnnnnnnccgggctgtggcaatcctgtattcccgttcgcaggggctgagcccggtaatgcttgaccccggtggcgggtttccatgagccgagatcgtcctctgcactccagcctggccacagagtggactttgtcccaaaaaaaacaccaaaaaaaaaaaagatctggcggatgaaaataaccagaatgaaaatagctagaaaactcagcaagcaggaagctccctttctcacccttttgttcccttgccgatagaatcagtcactattagaaaaaatgaaagacgctctgtttaaaacaatgatgacagcagtacttaatatgtatttcgaggtgaacttatatagattgagagaggctgcatttggcagactgatgtataggaagacccatttgtttctagcttctccctgcagggaaaatgctttcgtcattatagcctctttacacagactggccattctagtgaaacaggtggtaaacctttgggctgcccagaaacattttatctgttttcacttacctaggaaggggaaagattagcgggtcatccaaaatctgtatgtaagctatcttcattttcttccccaaccttctcctcctgggaaacacaaatgctatctcatctgacaaaaggttttagaggataaagctgaaaagattggattgggatctttttgtggcttggggcggagccttttgctaaaatctcaagaatgctgctttgagtttagctagggtggctctcagaactggggtgcctggcattctcagcatttctcaggggcctcccacctctgacaactgcagtgttagctaatacataccttgagcatagaactgaatgctgtaattcagagccattttttttttcaacttgaacattgtacaattttactgcaatttcctttgaactttcttgccactgtttggaatcttaaaaattcattagccttctcctttctgacataaagctactcttcatcagagatgagttcctatgtatgtcctttgttccttcaatagctaattaatgtgcttgaggatacttcagtggaaaaaaaggtttaaatatgcaaattactaataaatgtgtaaccttatgtaacttgtgttacatcaagtaacaagctaatctagtttgtttcactggactaggcttgtgctccctacttcagtattttgatgctttccttgatctttgtttcacaaaatgttgtgaattttggtatcattcaaaacaaatgacatttattaggtttcattttgaaacgatgtacagacaagtccccaacttagaaaccggtttgttcttaaggttcttgcgtcagcccatagaagcccactgacctccaccacagcccaaatggagggctgtgatagccagatctggttggcttttgtgggctgacccagacatttaatcaccatctcttatgttgttgccgtaagaaatgcattccaggttgggacttgggatcctgagagcacattcgccccctgtggtggccgcttgccaccttgcaagatggaagcccagtctccttactaccaaactgtagttgtaagcagagggaggggtgagatgtttataggacattccctaagctggggagtgatttttatcactattcatgtcaactgtactttggtatagactccctatcaatttaataatatgaaaagcctaaaataaaactatgcatgctattctatgtgctattttatatcagtaaataagcttatgcttgccagttgtatacacagttatgaggtgtatagaactgactttgacagtattttttgcactgtttcctatctgtttttataaagtcttatttagatattggaccttgttgatgttctcactgcccttgtgcttgctataaaatgtttcatatgtgcctttacaaatgtgagatctttattctaacctttttttgtaaaagatatctattgatttccatatgcaataaacctttttttcagagaaaagttacatcttctcttttctgtactgtatatgtttgcattagttgaaagtgcctgggaaaacctgcatgctttgttttctaaagcccatttattgctacccagtttttagtcctgcataaccttatcatactgaagatttagtttgaaattcccaaggttgtcactgttagaagaaacctgaaaggggtgatcactaggcaagtggagtgaagaatacatagaaatgggtctttctcacaaatgcagcaataagcctcgttaagctccaagcccctactcactcctccttcactgtcatttactcaggtaccaaactgttgatgtggaaaaggcaggcaccaaccaggctgctgtagaaaatttaaattcttgcttttgcctttcagctttataacagctcaacttgtgtccaggtttaaaggtggctgtcctgtcccagactttcagccagtaaccaccatagcacattcacggtgaacccctcatatgtgggtagatgctttatgtatccttggtaagtaacagaaaagtataacaacttctcccagtaatgcattgacaaccccatgactatacaagcagttgttgaactaccagagatcccaactagtttcacatcaaaaaaatgagaatactgtaagccactctggggtgagaggatatggcaagcaaatctcattaaacatacacttaattctctatggcgactgtggcaacaaagcaattataattattgaaagaaaggctacataatgttaaaaaagatgatagtagacaaaataggccaatgaaaatggagataaatcgggtagaatggcaggagaacagatacactaattcattttctcttttgtgagctgagcaaatagaaccagtttcttttctttggttgataaacagaaaaagtagaggtttgttacataattgagagagaaaacagtaacctggtagacgtatttgtctccaaatatactgttagcagagctggggaagaaaatttttaaaaagagagaaacagaataattccccacaaaactaaagataagtataagaaacagcaacgcaca

SEQ ID NO: 603 - DNA, 4010 bp, Homo sapiens
tcggctccgccgccgcgaaggacagcctttccgcgcgggactccggggcgccacgggggccatgtaagcagctatcttccagagggccacactgggcatggacacccttttccctgcctggaggagcacaggtgatagtgtaattttccagtcacgaaactgctaaggccatctcaggggcgtgtgcgccaggataggcaggcggcgtccgaggaccacatagccatgccttttggtctgaagctccgccggacacggcgctacaacgtcctgagcaagaactgctttgtcacacggattcgcctgctggacagcaatgttatcgagtgcacgctgtcggtggaaagcacagggcaagaatgcctggaggctgtggcccagaggctggagctgcgagagacgcactactttggcctttggtttctcagcaagagccagcaagcacgatgggtggagctggagaaacctctgaagaaacatctggacaaattcgctaatgagcctttgcttttctttggagtcatgttctatgtgccaaatgtgtcatggcttcagcaagaggccacaagatatcagtattacctgcaagtcaaaaaagatgtgcttgaagggcgattacgatgtacattggaccaggtgattcggctagccggcctagctgtgcaagctgattttggagactataatcagtttgattctcaagatttcctcagagagtatgtgctatttcctatggatttggccctggaagaggctgttctggaggagctgacccagaaggtagcccaagaacacaaagcccacagtggaatcctgccagcagaagctgaactgatgtacatcaatgaagttgaacgtttggatggatttggacaggaaatcttccctgtaaaggacaatcatggaaactgtgtacaccttggcattttctttatggggattttcgtgaggaacagaattggaagacaagcggtaatatacaggtggaatgacatggggaatatcactcataacaagtcgaccattctagtggagctcatcaacaaagaagagactgccctctttcacacggatgatatcgaaaatgccaagtatatttctcggttgtttgccacacgacacaagttttacaaacaaaacaaaatctgcactgaacagtcaaattctccaccccccatcagacgccagcccacctggagccgatcctctctgcccaggcagcagccgtacatcctgcctcccgttcacgtccagtgtggtgagcactactcggaaacgcacacctcgcaagacagcatttttcatgggaatgaagaagccttgtattgcaactctcacaacagcctggacttaaattatttaaatggcactgtcaccaatggcagcgtgtgtagcgttcacagcgtcaactccctcaactgctcgcaaagtttcatccaggcctcccctgtatcctccaacctcagtatccctgggagtgacatcatgcgggccgactacatcccgagccaccggcacagcgcgatcatcgtgccctcgtacaggccaacccccgattatgagacagtcatgcgccagatgaagagggggatcctgcatacagacagccagagccagtctctgagaaacctcaacattatcaacacccatgcctacaaccagccagaggatctggtgtacagccaaccggagatgcgggagaggcacccctacactgtcccttatgggccacagggggtctacagcaacaaacttgtcagtccatctgaccagaggaacccaaagaataatgtggtaccaagcaagccgggggcaagcgccatctcgcacacggtgagcaccccagagctggccaacatgcagctgcagggcagccataactacagcacggcccacatgcttaagaactatctcttcaggccaccgcccccctacccacggccacgacctgccaccagcaccccagacctggccagccaccgccacaagtacgtcagcggcagcagcccggacctggtgacccggaaggtgcagctctcggtgaagaccttccaagaggacagctctccggtggttcatcagtctctccaggaggtgagcgagcccctcacggccaccaagcaccacggcactgtgaacaagcgccacagcctggaggtgatgaacagcatggtgcggggcatggaggccatgacgctcaagtcgctccacctccccatggctcgccgcaacacgctccgggagcagggaccgcccgaggaggggtcaggcagccacgaggtcccccagctccctcagtatcaccacaagaagaccttctctgatgccactatgctaatccacagcagcgagagtgaggaggaggaggaggaggctccagaatcggtgccccagatccccatgctccgggagaagatggagtacagtgcccagctgcaggcggccctggcccgcatccccaacaagcccccgcctgagtaccccggtccaaggaagagtgtgagcaatggggctctgaggcaggaccaagccagccttcctcccgccatggccagagccagggtgctgaggcatgggccagccaaggccatcagcatgtctcggactgacccgccggctgtcaacggggcctctctcggcccatccatctcggaacccgacctgactagtgtgaaggagcgggtcaaaaaagagcctgtgaaggagagacctgtgtctgaaatgttttccctggaagacagcattatagagagagagatgatgatcaggaatctagagaagcagaagatggcaggcctggaggcacagaagaggccgctgatgttggcagcattgaatgggctctcggtggctcgagtctcagggcgggaagagaatcgagttgatgccacccgggttcccatggacgagaggttcagaaccctgaagaagaaactagaagagggaatggtgttcacagaatatgagcaaattccaaagaaaaaggcgaatggcattttcagcacagcagctctgccagaaaacgccgagcgcagccgaatccgtgaagttgtcccctatgaggagaatcgagtagagctgataccaaccaaagaaaataacacaggatacattaatgcctcccacatcaaggtggtggttggcggggcagaatggcactacatagccacccaggggcccctgccacacacgtgccacgacttctggcagatggtgtgggagcagggagtgaatgtgattgccatggtcactgcagaggaggagggtggacgaaccaaaagccaccgatactggcccaaactaggttcaaagcacagctcagccacctatggcaagttcaaggtcaccacgaagtttcgaacggattctgtttgctatgcaaccacgggcttgaaggtcaagcaccttttgtctgggcaagaaaggacggtgtggcatttacaatatactgactggccagatcacggctgtccagaggatgtccaaggatttttatcctacttggaggagatccagtcggtccgtcgccataccaacagcatgctggaaggcaccaagaaccggcacccgcccatcgtggtccactgtagtgctggggtgggaaggaccggcgtgctcattctttctgagctgatgatctactgcttggaacataacgaaaaggtggaagtgcccatgatgctgaggctcctcagggagcagaggatgttcatgatccagactatcgctcagtacaagtttgtctaccaagtcctcatccagttcctccaaaactccagactcatttaatcaccccaatccagctcctggaggagggacccagctccatcgcgctggaggagagtcacctccagacaacatctgctccccccacaggggtgcaggtggctggcagcaaacaggctctctgaagacagtagccaagattattcacacataccatgtattattttatatgagataatttatttttttcccctttggaataacttttgtgaattattataatg

SEQ ID NO: 604 - protein, 1183 aa, Homo sapiens
MPFGLKLRRTRRYNVLSKNCFVTRIRLLDSNVIECTLSVESTGQECLEAVAQRLELRETHYFGLWFLSKSQQARWVELEKPLKKHLDKFANEPLLFFGVMFYVPNVSWLQQEATRYQYYLQVKKDVLEGRLRCTLDQVIRLAGLAVQADFGDYNQFDSQDFLREYVLFPMDLALEEAVLEELTQKVAQEHKAHSGILPAEAELMYINEVERLDGFGQEIFPVKDNHGNCVHLGIFFMGIFVRNRIGRQAVIYRWNDMGNITHNKSTILVELINKEETALFHTDDIENAKYISRLFATRHKFYKQNKICTEQSNSPPPIRRQPTWSRSSLPRQQPYILPPVHVQCGEHYSETHTSQDSIFHGNEEALYCNSHNSLDLNYLNGTVTNGSVCSVHSVNSLNCSQSFIQDVSSNLSIPGSDIMRADYIPSHRHSAIIVPSYRPTPDYETVMRQMKRGILHTDSQSQSLRNLNIINTHAYNQPEDLVYSQPEMRERHPYTVPYGPQGVYSNKLVSPSDQRNPKNNVVPSKPGASAISHTVSTPELANMQLQGSHNYSTAHMLKNYLFRPPPPYPRPRPATSTPDLASHRHKYVSGSSPDLVTRKVQLSVKTFQEDSSPVVHQSLQEVSEPLTATKHHGTVNKRHSLEVMNSMVRGMEAMTLKSLHLPMARRNTLREQGPPEEGSGSHEVPQLPQYHHKKTFSDATMLIHSSESEEEEEEAPESVPQIPMLREKMEYSAQLQAARIPNKPPPEYPGPRKSVSNGALRQDQASLPPAMARARVLRHGPAKAISMSRTDPPAVNGASLGPSISEPDLTSVKERVKKEPVKERPVSEMFSLEDSIIEREMMIRNLEKQKMAGLEAQKRPLMLAALNGLSVARVSGREENRVDATRVPMDERFRTLKKKLEEGMVFTEYEQIPKKKANGIFSTAALPENAERSRIREVVPYEENRVELIPTKENNTGYINASHIKVVVGGAEWHYIATQGPLPHTCHDFWQMVWEQGVNVIAMVTAEEEGGRTKSHRYWPKLGSKHSSATYGKFKVTTKFRTDSVCYATTGLKVKHLLSGQERTVWHLQYTDWPDHGCPEDVQGFLSYLEEIQSVRRHTNSMLEGTKNRHPPIVVHCSAGVGRTGVLILSELMIYCLEHNEKVEVPMMLRLLREQRMFMIQTIAQYKFVYQVLIQFLQNSRLI

SEQ ID NO: 605 - DNA, 720 bp, Homo sapiens
atgggagagaagttgagggaactcactcaggcatgggaggaaggaaacgggggaaaggaaggtgtggaaagctttgctgagggaggtcacaagcaacaactgtctctccaggagagcccttctttcttggctacttctgtccctgcagggcgcacctctccggaaaagagcgaagcaagctcaagttgctttactgagacaaagaccctagaagttgaagagtccagggtttactgcactttccctgtcattccccctgtactttgtattccaaattactttcatcacggaaaggggcgtgtgcgccaggataggcaggcggcgtccgaggaccacatagccatgccttttggtctgaagctccgccggacacggcgctacaacgtcctgagcaagaactgctttgtcacacggattcgcctgctggacagcaatgttatcgagtgcacgctgtcggtggaaagcacagggcaagaatgcctggaggctgtggcccagaggctggagctgcgagaggtaagaggggtgtgtctgtgtgcgcatgtgcgcgtgcatgcgtgttgggtatgtgaaggagaactcaccgaagggaccagccatctgtttcttggcatctgttgtgttttttggcctaagcgacgatgtgtttataagaatcctgttattcttagcacggctgtgatcttatccatcattggatggggagacttgaacaccgcc

SEQ ID NO: 606 - protein, 240 aa, Homo sapiens
MGEKLRELTQAWEEGNGGKEGVESFAEGGHKQQLSLQESPSFLATSVPAGRTSPEKSEASSSCFTETKTLEVEESRVYCTFPVIPPVLCIPNYFHHGKGRVRQDRQAASEDHIAMPFGLKLRRTRRYNVLSKNCFVTRIRLLDSNVIECTLSVESTGQECLEAVAQRLELREVRGVCLCAHVRVHACWVCEGELTEGTSHLFLGICCVFWPKRRCVYKNPVILSTAVILSIIGWGDLNTA

SEQ ID NO: 607 - DNA, 42960 bp, Mus musculus
  misc_feature (1)...(42960): n = A,T,C or G
tgccaccaccgcccggcaacaacatgaactcttaagctctgagtcactgtaccatcaaatttagaaaacataggtaactggaatataaaacaggcctctctatttctcaaatttgagtcataattgatttgatcaccactttgatttggttttcagttccatgacctatggaagcttacaggctattttaggatgactttcagagatgggggaggtaccagagtgctcaagatgtgaaactcagccccatttcacctttgtatttttagttatattttatttattacatttatttatttatttgctatttagtgctcacgcgcgtgtgcacacacacgcacacacacaatgtacaagagtcagtgtaggtcctggaaattgaactctggccctcagactttatgagtaagcccctttacctactgagtcatctcatcagcccctcatctgcaatttgtttctatttcctggtgttttgacaagttattttgaagaccccttttaaaaacaaagtaagggataatctgagaaaaaagttgcatagacggtaactcattaaatcagtatggtaattaaatcaaacggggtgggggtgttctctcccacaaatccagatgtgagttctgtggtctgacagcccagacttccagatggggaggagaatcgtggcaatcaaagctgcatgcttatcacgtaaacccgcagtagcaactacagaagtcaaggtttcttttcttcccatgaaatcagttttgatcttcaaactgtgccttattttttaaaagataagatgctggaggcccagtggaatttggtgattgtttcctttgtatgcacagcaagtccctgaaataagatcaaaccaactgcctgatctaggtaggcaagcgttgacaaagaccttctattctcatgacctttgtgcatgaatcacctctcaatgttgtcctctgtgaggccagactcagagtgagggttttttgcaacctctgtctgtccctccagaatcttctctgactctatggtagaccctgaaaaccactatcacccagataccagtccacaccaatgctgtcagtccctaagaatccagcactcaaactttatacaactgtatagttagacacacagagcaggagaggggatgggagaggggatgggagacaaagaaggagagagaaagactctgagagagatatgcactcacacaaagcacctgggcagtggaggatggagaaagatgagcaggaatttacatgttcattttgaagctttgttcattcggttattctgagacagtgtcacctgttgccaaggacggcttaaatctgtaaaccactttttttgggggtgggggggagttgttttggtttggtttggttttggttttttgagacagggtttctctgtgtagccctggctgtcctgaaactcactttatagaccaggctggtcttgaactcagaaatctgcctgcctctgcctcctgagtgctgggactaaaggtgtgagccaccacgcccagcttgtaaatcacttttaatcacacttcaactttcatttcctgacatggctttgaaatctgtcagtttctttggtttcttgcatctcggtttattcaatatgcaatctaatttattaaaataaggaggtaaactctaaaagtcttattagtggagctggggattgtggctcggttgaaactcacctagcgttcacaaagcctagattccaatccccccaactctatacactgtaccaggagatgcagggctgtaaacccagtaccagggaagtacaggcagaagggtgagatgctagaggccatccctgtaacgtctcaagtcaaagcaagtctgggatacacgagaccccgtttaaaaacaaacaaacaatcacaaaactacagtcttataatagcaatatgggaaagaaaggcaaattcaaggcagcaagcacccttgcaggggagagctggctacttcagaatacgcactcttgtatctactatacgttatgttttgcacatttagaaaaataataagaaaaatactcaatttcgctaacttaggcgacaaagctattagggctcattttctgtacaacatcccaccattaacaaaggtaggctggcgcaccatggtagagcattggccgattctcatgggattccacctttgtatcctgaaggatcagctggccagggttaaccttagctacacagggagacctgggccagcctgggtacttgagaactgtcacataagcaacaacaatttcccagtaaaagagggacaacttgaaggcagcttctccccagcacacaggcctcagcctggcttcaccagaggcccacagtctctgtcatatccttagctggggtgtcagggaccttgttcagagaaagcaggtgcttgtctctctgtagatagtgtcttcacgtctgatttttctgtcttgttctgctcattaagttgactttcatatttgttttcccatcatccatagctgcttgataggacaggtgagacagcaatcaaaggattcgccatctttaaaattgctgagaaactaaacgagtctggtttgatctgtgtaactctgcttggctagagcaccaccatgtgtctctggagggaactgccatttcagttggctacccataatcactttgaatcaaccattcacacacttcctgtctgcagacatcggaaagcatcatggtagcagatacaggcatagttagggtgtgaagcttgcccttaagaaacccttagtgtctgcagcttccacaatgagattttcttttctctgttgtgtggggtggggccagggggttcattgaaagggtgaaagatggttatgaagagtaggagagatgagaagaattggggtgcatgatgtgaaactcacaaagaaccaataaaaggttaaaaaaaaaagcaatccttagtgtcataggaaacagcagatatggagaaaaaagaactgcaaaaaacctgatagggccagatgtgagggcacacatctgtaactcctgtatttatgggtagagaaagagccaatgtcatctttggctacttagtgagtctgaggctagcctgggatggaaaagaaaggtggggagacgctcttaaatgccataaataaaaatgttgagaaggctagaggacaacaaagtgactttcagccgaggacatctgaacagcttcaggacgaggtatttaatacttgctttaaagagtggacatgatacagggctcagccaggagatactgtaagcagcagctagtgtcatcgaggaagaaacacacagaaccagagaaagaatagctagctttgtgttactgaggccagtacttggacagtggtcagggccagctccagctatgttgcaaattcaaggctaacctaggctacacaagaccctggtatttagagagagagagagagagattgagagagagagagagagataagtaaataaataggatgacacacaaaaatcacctcagacaccctagatatatacaattgttacctgtcaataaacctaataaaatcaggcagaaaaaaatgtgtgaagcagggttggtgtgaacatggaacagaaacaggagaaggaggatggcagggtcatgtagcaggaaactgactctagtccgcactagctttgtaaggccctgcaatgagcctgggatcagcaccacagggagtggctaacagctttatctctctacaatttagaaatagcatctggaaacagatgtggaccacacagtgtccctcaaagggcctgactcctgagatgcctagtcgtgatgctgtgtgcacacatgcataccactcttccccatccctcacggaaggtgccgagtttgttctacctaaggcaaatgagtgaactcaacagtgtgtgcacctttaaccccagcactcaggaggcagggcaagtgggtctctgggagtctgaagcctgtctggtctacgtagcaagcttcaagccagttaaggcttcagagagagcctgtctcaaaacaaacaaaaataatctgtgctcaatagcaaaaaagagagctaccttcaccccacgtgcttcccctcaactgatttctaatataaccaccactcaacttgaggcgtaggtccttgggaagaaactgaagtttaaaaagagcatttgggtaatggttgctggattataaataaaatataaaatagttatgtttgggacacaaagaagcatgtgtagctacagggaatcatgaagattggaagcctctctggttgaaagggtttgacccttctacaagcttcggagatggggagacagacacagggaagatgggtcaaaacacagagatgcagccaggtgtggggtgggggaatcataactgaaggtaagttcctagccacctcttaccctttgtacctctgaactaccccatcccatttctttctaagagagctgagacaatttttagaaagttcaaaaatcattccaaaaggagtgagaaaatctgcccttcactttcctttctctgcacactgaagaggccgggatcttccttcatgcccacatcaaaccccagacgccaggctccctgcaagtctctgtattcagcctggtttctccagcagtctccaagcacctgtgggtctttaaagggaacaaaaagcaaagacacatcctccaccacagacacggggctcggggaaacgatgcataaatcaaagccagagagaagcctgctagcaacccggaaatcaaattgtatctgcgagaaggtcggagtggaaaatagattagaagggctctgaacaagagaggataaagacagacagcccctgaaaaaaattaacaggaggaacatggggcctgtagcagcagactgaattcacaaagagccttgcattgcctcaggatagaccaatgtttaagccacttataccagttcctgcctggataatggactgtcagtctctgcctgggtaacgtgacaggcacccgtctccacatctttctttgtgtaaagttgttgctgaacatggcatccacactctgagagccctgctttattccctttctcagagccttacacatcccaacctccgtgtctacactttccctgtctgatgttggagacagacacacttcatcgtacttatattgctctccccatccctcacctgaaggtgctgagtgctttctaagactaacagggaacccaagagcctgtgcccaggctggccttggacctctggcattcccccctctgtctcccaagcgctggcatcgaaggtgtgagcctcctcctcctgctcacatgcacaaattctgcaccacagattcaaaactgggaaaaaaatgtaagatatacaaaaagctgttggatgtggtggcacgagtgggaggtagaagcaggcagatctgtgagtttgacaccagcctggtcatagagagttccaggccagcaaagactacatagtgagagaaaatctatctcaaagcacacatacacacaaagacaaacacccatgagcaaaagtatttatgatgaaaccacagcataaaatgctatatagacttagtttataagaacccagagattgtttaaaatatttagaggatctgtgtgaatagcacaatgttttataaatgagaatgtacccatggattttggaatcttttgggagtcttagaatcaagttgctccaatatcaagcaatttttgcacatcggttctttattttcttcatctctgttaaggtgaagtctcttgatctgtttactgtcccccaaccaactcttccatcctctcagagaaactgccttttcaaaggtgagaaaagtctttatctgactatggcccgtgatggaattcagctaaggcatttgctcttgtgtgctctgcatcacttgggggaacagtctggttaagaaaacagactcaggcagtccctacaagccaccaggagattctgctgagccttgcctttcccagtcagcaagttgcaactttttctttttcctgtctcttttgcatgctggccagttgtaagtatgaattgttttatttgttttagttttcaagacaggatttctctgtgtagctttgtctgtcctggaactcactctgtagaccaggctggcctcgaactcagagatgctcctgagtctgccttccaagtgctgggattaaacatgtgcaccacccctgcttgggcataaaccgggggtaagtatggtttgtctgataccttgtggtctcttgctctttgtctaaaccctgccacatggctgcctgctaccaagtgctgattcctaagccaatataactcaactggcttagatcctcactcctgcttcctttctctattctcccctcctctaagtggccagcttgctttgggactgtcgccttaaactctaatcaaactgccctcaagctgagagagataggcagagggagaaggggagagacagcaattctgtatcgatcactacacagatctctacacgttctgagcttaattgtaagaacgtccttattacagttagttagtatgtgcatctgcgtgtgcttgcacacctgcacatgccacatcacacttgtggagtcagagaacaactttccggagtgagcactatacttctaccacatgggccctggggactgaactcaggccatcaagcttggtatcaagcagccttacccgctgaaccatcccaccagctctatgagataaatgttatttccaaaccctgtttgacttatggaaagaactaaacctaagcccatttcaactcgaattaccaaaccctaaacagtaagcataaataagctaagcataacaaggcattgtactgagaggtggccctgcctgcctgcctgcctgccattaggattgtttgcaaagattctggatccttcttcaaaattcccccatacgcctgcagttccgtgtggtaatgtggcttgctttagaaataaaacgtgagaaaggggcatatccatgaggacattttaaacgcctgttcatgcttttcctgtgcattaaaattcaatttcttctctcctgctgccatggggtctaacaagttcccagcaatggcctacttgagggcaatgcagatgtgatccaaagccaccagctaatctgtagcagaccctgcccttgtgagaaatgagtctctgctatttgaatctctgtgtgtgtttttcttggttttgctttgcttgaggcagggtttcactacatagcctaggttagccttgaatttgtgaccttccttgttattgtttttattgcctcacatattttggcatgactgtaggatataggctgtgttaactctgcttctcggcagagagaggggcccattggttgcacctgagccagttgggtccctttgcctagataacctgagataaaccaccttaactcaagaaaagggttcccattgctcaggatgtcagagcttggtccatggtcgtttggtctggttgcttataccttttagcatcgtggcaggaatgtcacagggaacatgttcatccaggctccctttcaaaggcatgttgtcagcttagctttcggtacctaggcctcatttcttaaaggttctacatagtagatccaggggttggtacacaagccgttgatgcatacataggtttggcaagggagacacttctaatctaaactttagcacagaatgtcatttcatgaagctgctaagatgtccttgtaaataactttgttttttaaagttaccccaaaatgccacttatttgtttgtttgtttaatgtatgtaagtacactgtagctctcttcagacactccagaagagggcttcagaacccattacagatggttgtaagctgccatgtgattactgggaattgaactcatgacctcctgaagagcagtcagtgctcttaaccactgagccatctctccagccccagtaccttgttttcaacatgtcgttctatatactatttccaagcccttcttagaatacagggagcattctgtagcaacagcagcacaccaggccacaagaaaccctgcgtggtgtccaggcctatctgccctgacactgggatcttgtatcttctctgagagtctaccaaagaaaaaggatcccactgcctctatcctagctgaggctctcactattccattctcagctagggaaaccttggctagctctctttcccataataatcaccttcttcttccctttctcataggctcttcttgccctacacttgccccaaaccttagtctggctgaaagcttgttctgagccacctggccccccacagacctccccctctggcacccaaccttagcatctgcctggtactcttaacacgcacgacctgaagggtaactcctgcagctacctgctactcagtggtcacatcacaccaccgaggtcagggagatcatttcaaaactcataggccagctctatcaaggcaagtctaatttattatgcttgctttgtagccttccatccctacgagtcaagctttaaaaacccagaggtcaagaattgcaaccctctaaccagctggattcttctggattctgggtttcttcacagaaacaaagaataatctagctttttagatagaacaacagtcaaggaaatggaggggtgaagggtagtgggagagtcttcaatgatattttgaaatatcaccttatacactgttttgtcctgttataaagctgaggatgacagcttcgcagtgggcagtgacggtatatgcttttaatcccggcactcacgaggcagaggcaagtggatctctgtgggtttgaggctacccaagttccaggacagccaagactacatagagaaaccccgtttcaaaacaaaaggaaaaaacaagccccttgtgtgactttttctaggatgacatccacagagcaaagaaacgattctacccaaggctagcttagggaaccggtaagtctactggggttacctctgtaggtaggggtgaggagctacttgcaggagcacaaaagactcaaaggcagctgcatggattaaaatcccacagcagcacacataagactcacagaggctgcatccctgatgccccttcaatgccttgcaggttggtcatcttataggacacccttgtaaatctttttactttctgagatttaatgaatgtattgtatatactgtatatcttgtatatactgttatccttgcagaacccattgggaaagagttcgggctcctgggatggcacctccctctagaagcaacaagatcttaagagctaagattatttattctgtgtctcccacaaatacccacatttgcaagaattaccacaccgcaaggatttacttaaaagcctttcactgtaggatatgcctctcatctagccactgggatcctgaaacggattccaggcttcccctgggcgaatgtggaaagcccaagctataaataccggtctcccgcgtctgcacgggaagatgcaaaacattcaaagttatagtaggctaaacactccttgtgatccaggatcacccacaaggcataggagagtttcctgtgggaggcgtgggcgcagcaatgtggtacatagctcctgccactcatcaccggatgacactcatttcacaacatccggcacattcctggtgtcgctacacaaagaaacgagccaacccagttctcccctcccttaaactccttcacagcctgactaaatcaaacaaatcactggctctggcaaatgagtttcattctgtgacctacacccagggcagggccccgagcccctccaccccacccgccccgctccactagtttcgcagcccgggtttgggggcgtggctccaggagaaggacaccggggcagggctttgggggtggggccctgaaggcggggctctgagtgaccaggtctaaaagggaaaaacccgaggcctaggctgcttgcacagtcaaccttgcttttcttggctgcaatggctgtggtcgcaggccttcgggcctttggggtgaagtggcccagctggctcaggcgcaacccatgggcccctctctccgccggcttctgcagcccagggtcagcaggacctgcggggtcggagtcagagccaaggctcaccagcacgcgacagcaggacggaatcaggtcagcctgcaggcagtgccagggctctccctggagttgggagccaggactcgggatcaacaggccttgccgccactaatcctgagttatttgtcactgttcttttcgatttcatctcgaaaagatgacatctttggtggaggaatccttgcatactgagtttacaggtgtcccttccctgtgcacactaatacgaggcacatgtgagggttgtaagtgaaaacttcctggtggccccctaacacggctaccgtgcccagttgcccagtcgtttctgaacatttctgctggcatgagcacacatctatcgcaacagccgttgccatgacctccaagaaagcctatcacaaaagatccatgcccttacaaacaaaatcagcaggctccagggttaagggcatgctgaaatgcagggtgggggaggtcaataagtaaggatacagggcacatgccctgatctctgcccccttgtgccacaaacctaaaagccttaaagttttgtttgaatccgtgcacaacctggatgtaatgaagacccttttcaggcctgggcagcacaaggctgtgaagagctacgtttccttgtttaagagctacaggtggagctgtttaagtgatatgccccctactccagtaaatagctcttcttaaccctagaagatcatgtttcactttttaatcctcacccaaacttttatgtggtcctccaaaagaatggagagccaacctctggcctttggctctccccacacctccccttcaccctcagacctctctattactacagcctttaaggagcttagcacacaggtctgcggatacccatccaaggtgcccatattctgtctgtcccctaactccctacagacaaccatgggtggccaccacaggggctaagcattggtggggctcagtaactaaagagcaatcccatttcctgtggactccttggccatcaacagagatagaaacactcccaaagagagccttagggggctctgaaatgtagagccttcctttctgatttttttttttttttttgagacagggtttctctgtgtagccctggctgtcctagaactctctctatagaccaggctagccttgaactcagaaatctgcctgctcctgcctctgaagtgctggggttaaaggcgtgcgccaccattgcccggccctttatgatttttaaagagaagcttctaatactaatactatagtcataagctgggtgtggtagcacaggcttgtaatcacaccactcggaaggctgaagcaggacaaacctgagttcaaagccctccaggactacatagcaagttcgagactagcctgggctgcatcccctcccccaccaaataaagtctgctcatatctgctcagaaattctggcaagagatggaagactgagtccttcagaagtaaacatgaatcgggaatcagaagagaagggtgatgagaccagttgattatagatgataggaatcatgtattaatattctacctgagccaagcattagaacagtactatggtaagcagggggacttgtgtgactcggtcacttcaagtctcccgtttcaaactgtgcctcagagcaataatgccgtcctaccgtgaagaccagctatgaaatgagagctgtgtcaggcacttgcactcattgtccctgagtcacacaatggcctgcaagatgtctgtcacccctctttacagatgagagttaagttcagagatgactgtctggaggtagtgaaccaggaggctgaaagagatcgcctctgcctcccaaggtgtttccccctcatgtgccatcatggcagagtgggcctatgagactagtccagtcctctacagtccagtagaaatagctgtgaaaaacaaaagtggtattttaaaatgatgatcttcggatagctatttggaccacttatagggaccattatgtctctataggtgtcctatgggagagagacctcatcagagagacatttttcctttaaattcagagtactggtgaaggtctctgcttaaggcacgccacattgaaacagtcatgagagtgctgaggctggtgagaggctgaggaatttcgatgtcctgggaaatcaaggagagctgcagagcaacataaggtgactttctggttccagctagggtgacaacagcagctcagaggagaggggtgcgtggggaaggaaggttgcccagagaccgtcagagcaaacacacagatctagggctctggagaagggcttgaactagggggcatgactgggagatctcagcacagagtgtcacagaggtgtcaccagtgaagttgcctgggcagtgtgcatggaacaacgatagggcaagggatggcgctcctgccagagcctgggagcccagcaaagaaggcacgaactgactagagaagaaggaagccctgcccagaggtgacggcttcctaaaaggggagtggtgcaggccacaggtgcatctgggtctggcaatgaggagatgatcactgagatggatcagtggggcggtgggaagagaagtccgcttgtgagaactgtctaacagcgagtccggaaggattagcaggattcatccgaacagataccaccaaacagcagaccgtgtgggttgggatcttcttgtgcaattttaccttaagctgatgtaaatactggggtggcaacttccgtgtgtatgtgtgtactctcacatgcacatgagacatgtgtgtacgtgtactctcacatgcacatgtcaggaaggaagccaggtgatcatctggattcctcccatgtcgcccaccctgttgagatgggtttcccactggtctagagtctgtctccacctccccagcactaggattcaaagtacatgtcacagtgccctgctgagagagagagggggggagggagagggaggaggaactagctctagagatggaacacatgttctcatgcttgcaaagaaaccccttgaggcttagggtgacagtgtcttctgtttgcaaccatgagcacactcattattctgccacaaggttacaggtaatttccaccacttccatagataaaggttctaagcatcagcagatgagctgcaagggattcctagacttgggagagagtgtgcttctgagaaacaaaacagccccacagctacctgggaactgcagcgaaactgaacaggtatcccaaaaggaatgattattcttattttgtggagataaatttagtcatcagagttgtttaaaaagaaagaaaaaaaaaaaaaacctcctaagtgttatttgtggaggacccgattgaccgtgtaacaatacaatgccatattcagaagagaacggagcaggcttagagctcgtgtgggcggagaccaacgggaaataggaagcatgtgatgagaatctggtttggttcactgcccatttctaaggacagcaaaaataagacatttctatataaggctgtaggatgacaatacaggttgttgtattctgagcatgggccattttaaaatagcagagaggccctggaggtgccagctctcttcgagatgctacatctgttgcacgggtttgcccgtctgcgctctctctagcatctgttccccaatggcacaaattatcttgcacgtttaccagaaacctttgtaaatgctgcagtgtgtatacccctgcagccagacctctgctaccttttctttggattgtgtgggaggagagagggaagggggacttttacttccttggctcctctcctaacctcgttctaaagaacagcacctggaaagaagttgtgggtagggcctgtttgtcagattcacctaacctggccactgtcacctgaaactcacatcctctgtggccacagatgatttggggactgttgtggcacagccttgctgtggaggtggcagagtttctgacagtcgagagggcgggagggagcggggggagcaaaaacaaatcaaggaaccaggaagaaaaggctagcctgcctctcaggtcacctctcttccttgttttgacagacccttgaagctgtcgctccaggatgctgacagacccttgaagctggcaccaggcctcagcagctctttcttcttgagtttcaaaattgctcctaaattagaaaggaattgcaggggtcttctctcgttttgactggtgcatgacccggggactatcaaatgctttttacaggaacattgtcttaagcaatcccaggaggaggaatgcgctgtcactggccatgctgaaatctctccgaagtgacattcttcacgaagctgaaagtgaagacctgaaagtcattataatttcaggtatttctctgaagcctgtcgttagtggtccagagcgcccgtgtaaggtttctcaaaatgtgccggtgagctgggactccttgcctcacttcactggagaattgctctggcctcctttgaaaaacattgagaacgtctatgccactgcggtcttggcccttgttagccatggggattgtagcaaaggtctttgctcagtaaaatcatggcttctccttgtcatcaaaatcagacagtcttgggctgaggagatggctcagtttgcagagctcttagcctagcatatacacacaggcacatacacacccgtacaccacacacgtgcatacatacatacacacacacacacacacacacacacacacacgcacacacccatacacacacacacatgcatacatacacacacatacacacacaaacatttaagacagaattctaatttagcaactcagtctcttcatggaccttataagatggctttaatcactactccccttggtggctcaccagcagccagcaggtgggctgttggagctgccagctggcctgtctcttctgtttgctaaatctttctcatacctaaatctgcagtgtcacctttagtggtgccaaaagtgtgacattttgtcgatttctttccttttcttttccagtagttttttggggtttttttggggggagttgttgttgttgttgtttttaatgtgcatgcatgtctgtgtgccacttgcatgcctggtgtctgctgaggccagaagagggtttcgggtcccctggaactgacattatagatgttctgggctgccgtgtgggtactgagatttagagccaggtcctggagaagagcagccagtcattttagccactatctctccagcccctctaatagactatttttttaataaaattatcattttggaactggagaggtggccagtgcttctaaaacaattattgctcttaaagaggacctgagtttggttcccagcactcatactgggtggctcacaatcacccaataactccagttccacgaggtccatcctctggtccccaaagacacctgtactcaaatgcacatacacacagatacatatacattattaaaaatatttttttcctaaacaaaggtttcgctgtgtagtcctagctgtcctgggactcactctgtataccaggctaggtttgaactcacaggaatctgtctgcctctgtctcccaagtgctgggcttaaaggtttgtgtcaccaacaaataaacatacactcttaaaaaaataaaactatcacctcatatacactgccatggcatcaattaaagtagcatagcatcgtcacacagcccagaaaagtacagccgacgctgttcgctggcactccatttgtttaagtgtccgtgtttcctgaggtactcggagctaccttattagcaatggccaaatagaaattttcaactgttttagacggtaaaggggaatagagttggaatgagtagcccacagcaggtatatgaggtgtaagctggccaaagcaaggctgctaacgtcttacggacacctctttctcacttataaaagcaggatatcgttgctgtcaccagggaagtgggaggaaaggttctcagtgacacatggttgttaaggattgtgacaggagccacatcctcggctcctttctgtgaaatgaagagctggagccaggtggctcccatgtttctgtccacatactgaccgcgatggatgataggatcaatgcttagggcatggcggagttcaaaggactgcagagtccatgtacggagcccagactgagtgcaaaactaaagtcttcagatccaacagggcttcgtaagaagctccaatccccaagccttctcctgccattacatcttgccacttggccgcctctgattgttaactttttttttcttttctcaattgtaaatgctcacagccgagggccctgtgttttcatctggacatgatttgaaagagctgacagatgcacaaggccgtgattatcacgctgaggtatttcagacctgttctgaggtaagccagggtgagggccagcagggtgagcatggaagctggtattgtattaaatacagaggtagctttctcgtctcagataagagtctatccacggggtctgctcaccggaaaggtgggtgtcggaagctttgtagttattggtaagtccttcagccaagcaattactgggtttagactgttaaagaatagccgtgctagctggggagatggctcagtggttagagcgcttcctgtgcaaccgtggggacctgcgtttggattcctagcttccatgtgagacactgcgtggccacagatatctgtgggcatgcagacacagaagacccagacagccagaaacccctgagttcttggttcagggagagactctgacttaagggagtcggactgaatgatagagcaggacaccagaaatactcctctgacctctgcatgagcatactgggtatgtaacacacacatgcacacacatgcacacatgcacatatgcatacacatacacgcacatgcatgcacacacacaaagaaaaaaaaaaagcaaccatgatttgctgctgactatatgtgccagcagaataaaatgatgtacccagagcggctatctacagggttaccagatgtcttagtacactggctttgaatgagattaaagttggtggtgcacacctttaaggaagaagaacctacgagtataatgataatcattttacatatttaaactgtgcttggaagagtgctcagtcagtgaagtacttgccatgcaagcatgagaagcctgagttaggtaaacggcgtgcatgtttaaaaatatatatcacctccaaagacgaaattaacatcttcattttgttttctggttgtgggggtcagaggctgataccaagtgtcttcctcagcacttgggatttgagatcgagctctctttgaacctagagctcagggattaggctagccttggctggccagtgggcctcagagactctccagtctccacctcccctgtacaggcgcatccgggaatcacgcacagcgcctcgggattacacagtaagcactttaccgatcggcccgtctccccagccgttcacatacaaaaacccacaagcacaccagattatcactttctcattacatgggaagacaagaagaaaaggtgattccctttctgttttatggagaagtagaaacaaactggagtttagacttaggatgttagctgggcgtggtagcacacacctttaaccccagcactcgggaggcagaggcaggaggatttctgagttcgaggccagcctggtctacagagtgagttccaggacagccagggctacacagagaaaccctgtctcgaaaaaccaaccccccccccaaaagacttaggatgttgtctgttttaggaacagggtctcaaagagtagctcaggctagccctaatgttgttatagagtcaaggctggtattgaactcctgatcccactgcctccaccacacaggcactgggattataagtgtgcatcacttgcctgacaatacaaacaaaagacctggatcttttgtttcatatattagcaatgttggcatggtatctgattctctgctttgccaaggcttgatgctttcagaactattttcccccagggaggagctcgcctagtagagtgtctatccataaagcagctatttttttttatcactctgctctgatatctcgatgaacaaagacctgcacaggttagcagagggctgcatgggagtctggctttctcagaatgcaaaggccaggtttcttggaagcttctagtccattcatgcctctggctcctcagaaaatcctcactatacacatagggcttagtcctaaaagtctaacaagaatacaaggctactggcttctcctaaaggtattttattatttttaatatgtgtatgtgtatggaggggcatacccacatgagaacaggtgcccacaaaaaagtagaggcattgaatcctctagaagtggagttaggggcagttgtgagctatccagcatgggttctgggaaccaaactccggaagggcaactcaagctcttatacagggagccattgctctaagctgctctttagcactaattctgggaaactcaaattgtcttggacaaatgtgaacaccaggaagttgtgtaaactctatgtcccggtgtgatcagggagcagactagaactgaaagagctacaagcctcactgttcagttcatgcacaggacagctggcttctaaaggcagacaggattcaccggggcatcgtagcctcaatgcaagctagagtgcatttgttacagaccacaggttctgccgacagccaattatttacaagtcgggaggaggacaaactgagtaagaattggttatggaagagcttgagggctcgtctgggtgccgatgtggtaacctagagactcatttctttctcttctcttccaacgtgttgacagccggagaatctttccttgaagagacccttccttcttgtctactcctcaccaacgaagtgagagtagcttgctttagaaaggaatatggagagaaaagaaaagagtacagaccctcagttgtgtagttatatatggctgggccagagtccagttgatgcaccttttggaacaggaagaattctaaacagtactaattcaggaagattgggaaggcggcattaattcttgacttccatgggtttgattatcctggcttgttttttatctttttgtttcttttgttttgcttttgcttgcttgtttgtttttgagtttttgaggcagggtttctctgtgtagccctggctgtcctggaactgtctctgttgaccaagcctcagactcacagagatccacctgcctctgcctcctaaatgctgggattaaaagtgtgttaatcccattggctggcttgtttcgttgttgttgttgttgtttatcaaagttccctttgtctttcacacaaacctagagaagactacactatattgttatgttcaagtttagtgatttttccccctaaacacataagtgtttaatgttcttctgtggtgtttaaatgatcgtctgtaggtgtgattacagtatgccactgtgtgtgtcacatgattgcagcactgaatgcttcctaagccaggtagagttctgttatagactccaggtttgctgccacatgtcccggctctgttgtgttagggtagagctggtgttatacctatctcagtgctgtaaaaacagaagggtcaaatggcttgttcagggttagtagttagtgagtaagattgagacagggcaaatcctagcaggctgactccatatcgctacataaactctaaaccacccaagtgggtttttcccccttagaaatcttcattcctaaggggagaacactgcatttatttaatagttatagttcagtatacacagacattacatttgtcagcttcatattgctataaagaaatagctcaggcaatgaatttatgttttaaaaaatgggttttgacattcaaatttaagattggaggccaggcatggtgatgcatgcctttaatcccagcaatcaggaggcagaggcagatggagttcaaggacaaccccgtctacatagtgagttctaggacagcaagaaaaagagatcaagagcccacaagtctttacgttttttaaaatatttgtttttattttatgtttatgagtgttttgttctcatgtgggtaagtgcaccatgtgtgtgcaatgcctgaggtggtcagaagagtgtccgtacttgtggaactatattacagatagttgtgagccaccatgggtgctggggactgaacctggatcctccgcaagagcagcaagtgctcttaactgcacatctatcgctcctgccccaccccaactgttttgaaggaatgtgccaatgacctaaggacctcccaaaagaccccacgctcactggttcaaatcacctctcgatgacatcaccctgagataaatctttaatacatggacttttggagagcacccacccaaccatagtaatcatttactttaaaacattgtttaatttattattaattctcatttttatatctgtgtgtgtgtgttcatggtgtatgtacgcactcaccccatgacacacacatggaagtcagaagacagctctgtaaaatcatatccctccttcctcctttatatgggtattgaattcaagtcaccaagcttgcgtgggagtgctttgcccaccaagcaaactcactaactgtacatttgaatcatttcgagttttttttttcactgtaaagatttggtgagtaggcttgaccatagaactctttacctgtttaagagttcttacaagtaggatccctgaatcaatggtataaaaaaacagtattcaaaatgaaggaaaacctttttttctttgcaaccagacttcagacagtgtgtgagttcttcctctctttactgcagtcctctgcaggaatgagacctaccagtaacctgccccccactaccttccatggcaggcaaaaaccaattacattcacagacgatactgtgtgtgtttatacacatgtacatttttctgggaagacagtagttaacaatgtcaaaatctcaaaagatgaccacacccaaaagaaagaaatctactatcaaatattatggaattcccttaaatccaccacagatatgtattctttgatgatgagggtgagcttggagaaggcatagatagatacttttatagttcagccaacaacagagtgtcctacacaaacattaacagtaaaatctacattacacccagatgcatagtgtatagatgggacagcctaccccactcatgcatgcagatggtaaagcccagttgaaaacctcctagcagggctgaagagatggctcagtggttaagagcaccgactgctcttccagaggtcctgagttcaattcccagcaaccacatggtggctcacatctgaagaaagcaatggtgaatacatttgaaagaaagaaaggaaggaaggaaggaaggaaggaaggaaggaaggaagaaagaaagaagcaagcaaagaaaacttcccaggtagagttgtatacaggacatcaagctctctataaacttggctacatatcttaaagatggtaaagccagctcacacctacaaaatagaccgtaaagtctgtgccacacctaagaggtgccagatagttggcaaagcctaaaacctgctccacatcaggtcccagatacatagggaagaaagcctactctacacctagactaacagtatataaatggcacagccagctctatacctaggctacgtgctaggcagatcttatacaagactagatcaagcacaggcccaggtgagtgttacaatagacaggtagacatgagctgtatgagatggggcctgcagtgtaccgtggcatacagtcttccaggaaacttttgtaaataagtagacggaatacacgctacagtgactgtctttaaagtgtgtattcataaactcttaggtggcctaggcagggatattacaaatgcacttcctccctgagctgcagagtaagttcggaagccagcttgggcaactcggtgagaacttgtcccaaaatataacagaaggagggctggggatgtgattcagtgatatgctgggcgtcctgggtgcacaccaatccaaaatataaagcagtgagccacacgaagcagcagcgtggcttcctatcattgagcattgtgcactgacatcaccatcctgctacgtgttcacaatacttgcagtagcgctttctctcagtcagcactataatgttaggatgggtagtcacttggatggttggaattatcagtttaatcgtaatatacatttacatatacacttacatatacatacacatatatatacacacacaaatgggtgtgtgcacatgcacgtgtgtgtatgggtgtataagtgtgtgtgggtgtgtgtacacattcatgtttgtagaggccaaaggacagcctaggtgccatcctcagggccccacttttgagacagagtctctcgctggcctggagctccttgattaggatagaagactatctggctagtaatgccaaggacctccctagtgctggagttgtaagtatggtccctgtagtggctattcctggttgtcaacttgactatatttggaatgaactacaatccagaattggaaggctcaccagtgacccttatctggaggcttggagatccttatctggatcttggtatggagatcttgagccatagtggctatggattccagaagattgaatctccgagtttaaggaacacacctttaatctgggctacacctttcatctgggattaaaggtgtggaggaacacacctttaatctgggctacaccttctgctggagacaatataaggacattggaagaagggagtctggctctcgctccttcgcctgcttgctgcgtgagactgagtaactgctagatccttggacttccattcacagctgcgactgaacaattgttgggaattgggctgccgactgtaagtcatcaataaattcctttactatctagagactatccataagttctgtgactctagagaaccctgactaatacagaagttggtaccaggagtggggtgttccctatgatcgactgaccgaagaggagaagactagagcctggtttactgatggctctgcacgttatgcaggcactacccagaagtggacagctgcagcattacaacccctttctgggacaaccttgaaagacacaggtgaagggaaatcttcacagtgggcagaacttcgggcagtacacatggtattacagtttgtttgcaagaagaaatggccagatgtacgattattcactgactcatgggctgtagccaatggattagctggatggtcagggacttggaaagatcacaattggaaaattggtgagaaagacatctggggaagaagtatgtggatagatctctccaaatgggcaaaggatgtgaagatatttgtgtcccatgtaaatgctcaccaaaaggtgacttcagccgaggaggagttcaataatcaagtggataagatgacccgttctgtggacagtcagcctctctccccagccatccctgtcattgctcaatgggcacatgaacaaagtggccatggtggtcgagatggaggttatgcttgggctcagcaacacgggcttccactcaccaaggctgacctggctacagctgctgctgattgccagatctgccaacagcagaaaccgacactgagccccagatatggcaccattcctcgaggtgaccagccagcaacctggtggcaggttgactacattggaccacttccttcgtggaaaggacagcgttttgttcttacgggagtagatacttattctggttatggatttgcctttcctgcacgtaacgcctctgctaaaaccaccattcacggactgacagaatgccttatctatcgtcatggtattccacacagtattgnnnnnnnnnnnnnnnnnnnntcatctgggattaaaggtgtggaggaacacacctttaatctgggctacaccttctgctggagacaatataaggacattggaagaagggagtctggctctcgctccttcgcctgcttgctgcgtgagactgagtaactgctagatcttggacttccattcacagctgcgactgaacaattgttgggaattgggctgccgactgtaagtcatcaataaattcctttactatctagagactatccataagttctgtgactctagagaaccctgactaatacagtccccatgccaggctcactctctctctctctctttctttctctctcgtatgtgtgtgtgtctttctgtctgtctgtctctctctctgtgtatgtgtgtctttctgtctgtctctatgtctctctctctgtctccctctctctctctctctttctctctctgtgtctgtctgtatgtctctctctctctgtgtattgtctttctgtctgtctgtctgtctgtctctctgtgtgtgtatgtgtgtctttctgtctgtctgtctatctgtctctgtgtgtatatgtgtgtctgtctgtctgtctgtgtgtgtatgtgtgtctttctgtctgtctgtctctctgtgtgtatgtgtgtctttctgtctgtctctatgcctctctctctctgtctccctccctccctctgtgtgtgtgtgtgtgtggtgtatgtgtgtctttctgtctgtctgtctatctctctctgtctctctgtctccctccctcccccccccccgctctctctctgtgtttcactaggggatcaaacagtgggccacacactataaggcaagcacatagctcatgagctatctccccaatctttcataatcttataaggccaccatcatggatacagtttgtacctgaccgaaaacatccttgcgcagggcctgactgcataattggctatgggggagcggaactgacaaatgtcaagtgtttatgaatataaaagacaagtttcccaggcaaagctcttcaagtctgtgaaggtcgtttttctttcaattgctgccttggggaaaagcccagatgtagccctatctcccctcccaacttgccaaggttcaaagagcaataatttagaaatcgaagttgccatggcaacacaatctgtttggagtgtcatgaaaaaataagcttcaaatacaagttcgcactctggccctccgtgggggtgggggacaagtacatggggggcacaagtacgtgggggggggggtcacaagtacgtgcctttgtctctcctctccgtaccaagggctctgttcaggaattttgcttatttttatgacagcagggtgtctcccctccccatttaatggaactgagagagtttgctttgcagcgtggtaatttgagaagtaattactagggaaattgccttcgagtccccttcccaccttaattttccaaggaagcaccaatgccaatttcagacttttaacagaaaggttgtcccgagatgcagagaactgacagttgtgaaggagttcccacagttctccatcggggcgctggggaggcaggagccggctgcttaaactctgctcccacccacttgccatcatgttctggccctaggtaaatgactcacccccgcccccatgtccttgttccttaatagggtctttcctcatgggaaccagttgtgaaccggactccacagcctgcttcatggaagatgtaatgcaagttggtggttttatgcttagattctgatgagctaattcatgagaaaggtgttctgagaagtcagtcaggtcatgtgacaggtggttggcacctcgtgctgcatggaagtgaagtggctatatctgtcctgcaggtcatgatgctgatccggaaccacccggtccccatccttgccatggtcaatggcttggccacagctgcaggctgccagctcgtggccagctgtgatattgctgtggcaagtgacaagtcttcttttgcaactcctggagtgaatgttggacttttctgctccacccccgcggtcgccctggggagagcagtgcccagaaaggtaattgaactgcccttccgtgctcatgggttccagatttagcttgggaaaagtacctctgtgggggtggggagatgcttgccaaacaagcatgaagacctgagttcaatccccagaacctacataaaaagccaggtggagtggtgcactcctgcaatcctgatgctgggaaggcagatatagctggatacctggagctggctggttggccaggcaaggctactcagtgaatctaggccagtgagagatcctgttcccccaaccccctcccccatacaaacaagatacatagcacctgagaaacaataccagaaattagcctctggcttacacacatacacacacacacacctaccacagtatcttccatcttctatattggacattctgcccaaaaccactagtgtccttctgtgctggggagagcagcactcactgcctgttcctctgtagcatcaaacagcacgtgtcaacctgtgaactcgccatatctcaatcttacaagcccctcaatatgacagtttaggtttttccttttcagaaaagcatggcctttgtgtaatctcatttgaaaatgcaattgaaacagttttgttccaccaaatggctgcccaggagacacagtgcacagcgcgctgacacagcgccagtgacaaggggctgaggctgaatctctggctagtgatttcttgacaaccattctcattccagaaaggagttacagtgtctgatttacagtgctgggcttacagtggttagaccagaactagcctgtccatactgtgggactctgcacaaggagcagctgtgtgtcggagctgtcttgtcatcactaatgacaatcaagtctgtttccccttgtaaagctgtcttccgtccaaaacctcacagaatagcgttcagtgggcatccatgaagcggaaaaccacagtgtctgttctgggaggaagacatcctgttctcagtgggaaatctggaaacgaaggcgcaaacctatatatgcagcgagcaaggagaacaggctatctggtcttgaaacaactgccaaacttaacagtggctcacaggcctgaggcaagaaagaagtgagacctgaagggaaaacagcagtagagccaaggggtgcctgggagaattttgcccttccccaggtcctcctggttagttttggcagaaacgggtgcacctatgaagatactgcagtttactacaaaccagtatgcggacaccaggctggaagtgggctacaagctgcaagaggtgagggtttgctcaagcatctttcaaaggggaggtgcttgcttattattttagatagatatttgccttaagtgcagccatgtttagtgaatatttcttatatcattgcctggacttcaagtcaaaatagattacaaatctcctgtgatactcaaggactgtcttgtaactgcagatgaaaccatgaagcctttcatagcaagaagttgctatactggttcatcctctttccaacacatgacttgctggaaggttccatggtaaaggcatttaagtcctattgacagggtaaaaaatagcaagccttctaaattaaggcttatcagaattcctagaaacttcagactgtcaaactttacaattgtttttgaaaagaaagaggagaaatgtaaccaaaatatcccttgaattccatggaagcccagttctcggaaccacattgcgtaatctgcacagtgtgacagatgaaggggcaagggcatcgtgagaaccagaatcgctttttccctgccaaagaacgttttgtcaggaagcaggccttctcaaacgacaacagtctgtcctgggggtggggaaggcagctccatcagcaaattccagctgcacaagcaggaggccctgagttccatctgcagagcacactcatcaaagccaggcctcgcggtgcacacttgtcatctcagagctgaggaggccaaaacgggaggatccccgaagctctgggaccagccagtctaagtaatcagcaacttctacccactgaaagacatcctgtagatgcctttcaaaaaacaaggtagacagctcctggcaaacaccacccaaggttgacttctgacctctaaatacacgtgcacacgtgcacccagtccaatatgtgcatgcacacttatgagcgcgcgcgcgcgcgcgcacacacacacacactcagaattatagtttctcttcatattctggccccccagaagaagagtgaactcaagcacacactgtgaacgtaccattgcatctgctggtgataataggtccctgtgtttatccgcagagaagcaggcaggtgcttttgcaaactggcctggatggacgtctcagtcctttcctacttaggtgttaggacaacatgtgttggactctacttccctctgctgggcactctaggaaaatgttctgctgtgctggaaagttaaagactgcagttcttctactgggcaaaagccatggagttgagcatactgtgtcaaggcatgattattcatcttatttttaaagtcgttcccttgaattcaaccatgcatcttcattgtgctatataaaagccctgcctccagatgttctcttcccgaggccgggctggccatgcacagctaagagccagcacatcaggcgtcccataagtatatcagtaagtattccaggaaagctagaaaggactcgagtctccttccaacaccagtcccttcaccacggggaaaatccttgcttccgcttacctacccacctggctgtgtgtttgcacacccttatctcccacaagtctaactcagagttcgatcctcacccataccacaactcccacagagactcggacatgactcatatcgactatttaacagtgagttgcatgcctaacataatttagaaaatgcagcttaaaagcacccatgcatgctagcaacttttcctagtttcccggcgagatgagggcagtgatctggtgtgtgtaacctgtgcacacctggtgggtgtgcaccgtatccaaccctcccccactcattcctctttctccctgcatctcctcaagctgcagtccacagtctcaagaagacagacaccattactacagcctgaatgtgttgttccctgagttcatatgttgcagtgcaatcatcaaagtgacagctgttggaggtggggccttgggatgtgatgttgggtcaagagtagaacctcatgatgggactagagtctgtgggaaaggggtgtcaggtcccatgtgaggacacagtgatacatcagtctctgaacctggagtcagctttctccctggacactaaatctgctgatgccttgaacctgggcttcccaacctccagagcatgagatcttcctgcttctcagccacacagtttatggccttttgttcttacagtctggataaaccaaggcatggggcccacccaaaagataagcagagaggccccaggatgctgcagcacacagccatcacatctgtgtggtcccctctgctttgctgatccgctcaggtgctgtgaagccttgaagccagtgtcagagtcacagaagtatccagtaggagtgaggatgttaatattagtcactccactcactggcatctaccgagaattccgttatctcggattaatctgttatctggaataatcaccagggcgtggagaatgcaggtacccattcgtctgtccagaggacggatcagactctgaagggtcagttggtttgactctggtgtctgtctccaaacctctcctttctagaagattgtctgacaaccaggttaagtcacagcctcaaatcttaattgtcattttgaatgaatgtccccctagagtaaagaactactgacttaccaacttcttagggtgaccaaagaggtgccgccctgaatggcagtatggggccattagcatagaggtgaaggtatcttttcttctagttcatctgaagatcctgtaaactcacagtgtaaaaacgtagatactaagatatgactgtgctgattagctgggaaaacaacctgccttttccttactgaatgtcaccctctaacctcatgctgtaaaaacatgtggctccagtaggcagaaagggaaactgaagcctagagaggggatgagcttggcaggatggcttaggatcccaaaggcaggggtagaatgtcttctggcctttgatcttgttccgcacacgtcatccttgagcatgaggtattgatctcatgaattctttcttggtcttctgggatgaagggagagaatccaggattgtagacacagaggcttagtggggaaatgtatccttcttctggtctaatattttatcctcaaacatgtggagaagagcaacatgccagagtgctctaggctaacctcttccacccttgtgttgtaatccctacgaggccctgagtcctcttctccccaccttgtgtccatcccagtgcatcagcagccagccccctgccttccaccagctttttctctgttctcttggttctttgcctcagcagctaagacttctgggacatgtgcagggtcactgtggtgtctgttgtgctgttttgtatgaggtagggaatgtagcgatctgaacctgactgcagcccagaggcaaagcagagatcccagaacaaggttctcaagggagccagacaggaaaggcttctctcaccagcatgtggtaccaagagaagggcggatggaaagactgcacctttcatcctgggttggcagctgtaaggtgctttgtgctgcactctgcttgccttcctaggctcattcattcctttaaggaaggttgtctgcattgtgcaaggaagtctcttagtgctggggataaagaacaggacgtgcacccacaccccctcccttgtgggagttacatgctagcaaatgcaaccaacacataagcatgtatactgtacagtatactgaatggggaaatgcataaagggtgaccgtgtaaccgaaaatgagaattttaagatggcagcagtggagggcctccttgaaaaggtgacaaacaggaagccttgagggaaaaacattccaggcagagggggaaacgagtgcgtggaccctggagtgagaacacacttggtgtctgagaatggccaccaggatctgcagagatggagaggaagcacccttgctctctgtccctgtgcacccctcttgtccacataggcttgaagctgtagatgctgacgttttagggtcattaaatggggttcaccctgtggcaggcaagctgtagaatccaggggaggggagaacttgcaccccatcttcctgcaagcttagcatcggggaaagggcctgagagggcagcagttcccctccttgccttatcctgcctacttgagcatcacggtcacgccaggctctgcatctgggccctgaagacatttaagtctcttcatgtccctagaatagaaactactctttggggatcctgctgaggaagtagcacccatggacttgtgttcctgtggaaaatggccccccgtaccattcgtaggaggttttgagcctttcccagagggatccatggtggtccctgtcagaggggctgcctttctacatgtggcctttaaggggtacatggactccccaggactaccagggcctactaatcaaatctgtgcagcaccaagaggacccagggggagaccccacctgttcttggattcttgtcttttcttgggtcttagaatgatctggttgtctccctggcaaggagttgggtgttgacaacatcaaggggtgtcatttgacagatggtgtgtcatttgaggaagcagatacctgagctgaggcatgcaagtctagagagtgactgtctcagtacggctgggggctgaggaagccttgggtatgaagaacgcttgactgactccacctgtcccttcctcaggtggccctggagatgctctttactggggagcccatttctgcccaggaggccttgcgccatggccttatcagcaaagtggtaccagaggaacagctggaggcagagaccatgagaatagcaaagaagatttcctctttgagccgctctgtggtggcgttgggcaaggccaccttttacaaacagctgccacaagaccttagaaccgcctacttcctcgcctcccaggccatggtagacaacctggccttgcaggatgggcaggaaggaattgaagccttcatccagaagagaaagcccatctggtcacactgagcccgcatgaggagtgctgagttaatggtcagccctagctgacccccagccctcccatctcctcctctcaacccaaccatatactgccacctcttgattgtaagagaacattgccagcctttctaacttggatgttggtttctcagtgtgtgatctgtattgaatgccatggttctgtgggaaatgaatacaggggagggaacgacttgctaggtcagtgggcaggttaatatgcactggggtgtgcaggctgtgacagaaaccccagtacccaacggagcctgaagtgaggtgctgcccatacagaggacagtcaagtgaagcgtgaaggaagggtgccgcccccatgcttctgcagtgtccttcaggcacagtccgttctggttgttcatggcaagttgaacagttcaaatctccatgagaccatctccccactgaaaaatttcttgattctaccaggaaatcatcacacctgtagtttggaataatcttatgtgatttgaataaattaaatatttatagagctgggtcatttcatttctaacccaccgcaagctaagaaaagaaaagagagaatattctctttgtatgtccactctgatgggcacaaagcaagggccttgccctcactactaaaccagaggataaaagctgcccagaacagggcaaggacccagagcagaccccatccaatgagagtcgcttcctcaggacacagttcagaactgtgctcagcttctggtaataaacccagactaaactcatatttagacctagtcatatttttttggcatctggtctaatgtagcccaaagagtgttcaaattttctgtgcctgtaaacttgaccataaatcaatatccatctatcctcctatccgtctatccacctaactctgtctctatctctccctaccttcccctcctttcttttgagtgctaaaatttgaacccagagcctcatgtacacaacaagtactctgacactgagctagaccccagtcctggtttttagtcaacttttgtcacctaagagtggaatagaacaaggcctaatgccatacccctgtaatcacacctactgcgtaaatctgaggcaggaggatcacacattcaagatcggactgcttaatttagcaagactctatctcaaaacaaaacattaaaaggcaaagatgtagcttggtggtgaaaactagtctagaatgtattaggtctggggttttatccccagcactagaaagagaaggatggtgagggagaggagaaaggaacaaaggagagagaccgacacagagactcatatggtctaacctgtggttattactctaattgctgggataaaggtggctcatgacgtgggcatccactgctattattgttacaggcttctcttggggtgggaacttgtttccttctctgtgctttagatggcaatcatggtaagattgcctcatgtgcagaaaccatcggagccaccatctcctgcagccccagaatatgccaagttctcacgaggcctcagcagggtcagaggagtctgcaccacagagatcgttatctcaggtgagtctctgaggccgagacaaacctcagggctggagtgtgtgaggatcccaacatgtctgcctgcgacagccaccgttttccatcccccggctgcactgccccgtgggaaatgttccagatcattagaccaaaaatccagaaaggaaaatgtttagttcccaatgcgcacacttgctctcttggggagctcggttgcctagtgttagtctgaattcattaccagaggctgagcacagtgtggaactgtgtcagcaggaaattgctctgatcgtgtaggagacgcgctgtgtctcactgtgctcctaagtgtccccaggggtgctctgagcccagcctgacctcaagaacaaatgattgtcctactccacagtactgtcttcaagcaagagagtggacaggagaccctgggtctgttagcctgcaagacgcaggcgcagattttactagtaggcaatgggcagctggctgacattcttagttagattgcaaggactcattagggtggttagtccaaaagaaatggaccactcaactgtctgttcatctttggtgcccacactgagaaaattccacccaggtgggtgctggatcatactgaagagagatggagggtaggagacatcatccaggctcctgagagactcggctcacagagccttctcacacatttaacaaatgaaagaaatgctccattctgtatgcatgagccctgctccctcagctcacgagctccccagcctgggaactgatgtgcaattgacaactagctataaataccagttgtcactggggcagaaaataatccagtaagaaatgtgccaccgacaccccgtgccccccaccccagcatcagataatctagcccaaggctaacatattctcggtttatttgtatctgtttccttttaccaggatgttgaatgaaaacttcctgataaccacacaggatgactgtttctgaaaagacttttatatttatctttccctcagcaccatttacctctggggagctagctgagcccagcagaccaaaccctagaagccagtgcctatcaagttagtaggaaggggcatttgattctgctagccctgagagaggtattgttcaaaggctggcttggtccctgagaaatagaaacaggccacatgacaaaaggccagagactttgggagagcctaaagccatcccaggcagccttagagttgttcattgttctccctcatgctatgtatgaggcttagagaagtaaaggcatgcccttggaccagccagtatgtggttttgaatctgtatgaatgcaagggttatgttcccaattgctggactatatactccccaaaatatccaaaaactgatacccagcctgcagctagatctgtgatgtgctccaaagagaccaaaattaagtggcagggcaaagggaaccctgctcttcaatggagatctgaggagaagcatccatttggtcaccaagaacactgactggatgctggtcagttgcgtgggcacatgtaagggaggcagcctccatcaacgatgtttcccttcctataaatgtgccaccgctgctggcatgcgtgtaaatcctgcatgcaggaaactaagacaagaggattaagaattccaagccaggttgtgctatacaacaaggccctgtttgtggagggaagacaggaggagaaaaggaagaaatcatggctgtaatgcttccacttgtccttctagcttgtataccctggattctacaagaccaatgaacttcttctttgccattgtagaagttaagaacttgactctgagcagtggcaaacagtggaaaaacatgattccctctgagacacagagatccagtcacagagattagtgtttaggtcacaccgcaatctctgaaaatgtcagtggtcaagtggaccccatataaagctgaaatccatcagactcaatcattctccttggttctgtctctgagttcccagaagcccttctgttattcagtccacttccttctctctcatttttctgaaatcccattacactaagacaagtgtggcaagtatggctaaagctccaactataaaagtgcggatgccaaagcttcacaccagaccaactgaggggaaagttttgatttctgcttgctccaaaaatatttcttacaggatttccagatgattctaccacacactaaagtttgtgactgcctaccctggggtgaaggctacgagtcaagttttcccggaaatacctgcatttaagaagttgaagcagggtccagcaagattcttaccaaacagggaacttgccctctaacctgtccagctaagtttgatccccagaatacacatgctggaatttacagaacagactcccacaagctgacctttggcccccataatactccatggcatgtgtgtgtgtatgtgagtgtgtgtgtgtgcacacacacaagtaaacaagtaaatgtaaaacttgaagcaatgtggtaatcatgatgaaatcatgggcagttgcgactggtctggaaagagtgaagagcgacccaagggaacccaggaccctcttaaaatcctcacagatgctaagaccactaaatatcagattatacccactgccatactttacacttatatttagaagaaagtataggcttagattttttaaacctacttttaataagggttctcaaatgtgttgacagcccccatctagcacatagtcccaaagtaagggggaaaggataataaataggacaaggagatgtgggcctgtttagaaggaattttatagggcgatttcaatttccatttgtctggctagtagcagtccagttcagttgtgtcagcatagcaaacacaaatcagcagcagtggcatgatccagcagaaactgctaggcctccaccaaatcagcatgagtcagcggaagcaacaaggaccagccagccaggacaccagaagttctctgctgtacctctctcaacgaaggaaagatcagcaaagacaaagacaaagcattgcaaagctagctttgtaagtacttagccacagtcccttgagtcctatttatactttctgcaaacatcatgtgtccccacccccatgggtcttgcctcagcaaaacaccacttgagtctgtatcatctgacatatccaaaactgccgatttagaaagcattgagcagtttgattttcaaataatgtcgtgattacttggcaaccaaatgtattgacatcttaaactctattattgaaattgatttttattttgtgaatatttaagaaaatgtcaaactttcatcttgtaaagatttttcttttatcatttgaggcttaaaggttcattttattttctgtgtgtgtgtatcaattctgctttgccaaaacaagcccaaactcacacgcacgtgcacacatacacacacgaacacaagcacacaagctcttgatataatggatacatgttcatggaaacaagaggacaaccttaggcgttgtccttaagagttattcaccttgtgctttgaggcagagtttctcactaggacccagggtttgcaaatttggcaagagtaattaaccagcaagctctaataaagatctacttggctggatggtggtggcgcacacctttgatcccagcacttagaaggcagaggcagccggatttctgagttcgaggccagcctggtcttcagagtgagttccaggacagccaggactacacagagaaaccaaaacaaaaaacaaaaacaaaaacaaaagaaaagatctacttgtctcagccttctgagcctaaacactaggattacaaacatgttcccccatgcctggctttttattggtacagggaattaaatgcagatcattatgctaacacagcaagaactttaccaacccagccatctcctcagccctcaaagtttatttttcatgtcccagatgaagactcatgaaaagctggcagacagtctgggctgcgtgtcctacgtcttttgggtggaatgtcggcccattctggctgcacagtgaattgttaccatgtttcagttcttggcgcttagacgatgcccagggaagaacagatcttcagagtcacttgctgtgtgctagatgttggcaatgtatagttttgtttcataaacaacaaaccatgcatggtgacatacaccttaaatcctagcacttgtgacgcagaggcaggaagagctctgtaagttcaaggccaggctttcttcgcgtagtgagttccaggacagccaagaaaacatagagagcctctgcctcaaaaaataagaaccaaaatcaaccaaacagaagaaatgcgaggacctgagttcagatgccctgatgctacataaaaaaataaatacagtgagcacagcgtgacagacacgtctgcaattccagcagtaacgagctgagcgaggacacagaagcaaccttgaaagtttgagggtcagctagcaatggtccaggccaatgagagagattgaaataaactacttttctgaggggtcactacatccctttttattcctaaatacctattgggtgtttctaccccacttttgcctgtttagttctcaagtaaacaacacagggatactacagtttattagtaagctgtaggcaccatgctgggcaggttctgagctattctaatcctttgaccagttaaaatccacacaaatgacagtcacttgccactctgatgtctcctcggctgcttctgctccatcagcctgtcctcagacctcagggtgaacttcccttggctgtgtgctcctcctggtctatcgtgtctaatgggcgaccccccccccccatctcttccctgtggcctctcttaaggtcccttactcaattttaagtctgccttcttatccattctacccagtcatttttgaccaaacattattttgaccaaacattattgaccaaacaggaattaacggaaagcattctttatagcacatacaagataatcccaacagagaaattctttctcaaacaaaaagggtagaaggtgcctgaaaccaactctaaagctgttctctgacctccacatgtagatcatgcacacacgtattcatacccacatatatatatatatatatatatatatatatatacatacatgtggggagagagagagagaaagagaaactcagctggagctgcagtctcacttgaggtttgaaaaaggaagggatctcttccaatctcctgtgactttgggtgcaaactagctgggtatagtgaatgcctatgatctctgcaattgtgaggccaaggctggtgaatnnnnnnnnnnnnnnnnnnnnnnnnnnnnnnnnnnnnnnnnnnnnnnnnnnnnnnnnnnnnnnnnnnnnnnnnnnnnnnnnnnnnnnnnnnnnnnnnnnnnnnnnnnnnnnnnnnnnnnnnnnnnnnnnnnnnnnnnnnnnnnnnnnnnnnnnnnnnnnnnnnnnnnnnnnnnnnnnnnnnnnnnnnnnnnnnnnnnnnnnnnnaactcagaaatccacctgcctctgcctcccaagtgctgggattaaaggcgtgtgccaccactgcccagctgagggtctgtttcttgctgggtgttgaccacgtgtgactatctacaggtggtaattggcagcatggaagtttgctgcgttgaagagttttctagcaagatggatgcttacagttttgtgtaacatgagacatgcatgaaatcacatatatcccgtcacctttgccgtattctatcagttagaagcagggcacatggagaacacagcacgagagatggttacaggaacttgggatcatgtgtctgtcctccacagagggaatgtaatttctctcaaattttgactatgaacatcttgcacagaggacaactgaatgtaaaatcttccccagtgactatagcagaatgaggtgagaacctaggtgtgacctcgttaccctgtgtctctgtgtcttcttatatgaggtgacacatccttgttgaagtcattgtgaatcgagtcttctttacattcatagtaaagcattctctactacatgtttctggatgggataacaaaaccccagataactaaggaacccaaggtagatgccctcggatgcagatgtacctgtatgctgagtccagagaactccatccagagaaccagaagtttcgtgaaggaggctgtcagcatgagcgtggaccaggaagatgtgcaccaagggtaaaggcagcagaggtatgaagggacattggagggttaggtatgtgatgtcttctaaaggaggccatggtgggtgtgtgtgtgtgtgtgtgtgtgggtgtgcgattgtgagtatgtatgtgtatgactgtgagtgtgtgtgtatgtatgtgtgtgtgtgactgtgagtgtgtgtgtgactctgagtgtgtgtgtgactgtgagtgtgtgtgtgagtgtatgagttgtgaatgtgtgagcatttgtgagtatatgagtgtgtgtgagtacatgtgtgtttaagtatgagtgtgtgggcatgagtgcatatgtgtgagtgtgtagatgtgtatgtgagtgtgtaagagtgtgtatgagtgtgtaaatgtatgtgtatgtgagagaatgagtgtatgtgtgtaaatgtgagtgtgtgtgagtgtatgtgagtgtgtgtttgtgaatgtctctgtgtatgtgtgtgtgagtgtgtgtgttagatcagagtcagattcccagggtaaaaagctatggagtttaaactattcctgctaagcagcaggaagtcatgtaagattactaattgagaaatgggctcaaaaatacagaaattctaacctttttgggttttgatggtttgtagaaattcattttaaatttataatttggtgaaaccccagtcaatggcatgtgcaatcttctactccagatttccatggaactgcatttgaacagcaagctgcttgtccactgctccatgggagccctgggcttttaggataagggatctaccttagtgtgaaacttacaccgtgcactggacacaagcaagccgtcaggacaaaagagacaacgggtagctagaactttcaaaacactcctttagtgagtgagatcttatgcatctttcagtcatcctcagaggtgtttgtcacagggtctgtcagtgctaaaaatgtgtctgtatgtgccttccatgccagacatttggtcaacagctgacaaagaattctatctctgagagaagggatgctttctctcaacatagcagacagaaggtttgtggcttcatcatttataaatgagaggaaagtttaatcaggcacggtacacacatctgggatcctagcccttgagcagctgaggcatgaaggtcataagttcaagaccaacttgggctgaataacaggctcaagcccaccctggtgtacactgggagaccttgcttcaaagattcaggggttgaaagtggggggagcgtgagcagagccacgagatcgcaaccctgcacaaagaacatttttagcaactcctatttacatcacttttcttgtgaaaatatctaaaaaagaaacaactttaaaaataaggaccttcttttgtcttatagttcagagggacacactccactatagcaggggacaaatgacagcaggaccctgaggtaatcagtcctaggaagtaggaccaactggaaaaaaaaaaaaaaaacaaaacaggcttaccccctgagtgaccttcctcttccatcaaggctccacctcataaaggtttcacaacctcccagacagaaccaagtgtccaaacacatgagcctatggggccatttcacattgaaatcatgactcccccaagtgaaatctaatgcctgcccacagtcaccgtccagatcatcagccatgcatccctgaacctagtgaggagacatgtttgtttctgccatattgcttggccgcatgcacgagcacatacacacacacacacacacacacacacacacacacacacacacacaaagatccctcagtcggtatggccatcaggagtcgtgtaagtcaagacgctaagtcatatttggcaatcatgatgccatgaagcaatggggctagctataaagtgagccttgtgggcaatgagaacagagaaacacggaagaatccacttggctcgttactgagcaaggtacagtatccctataaagctttcaaactgggctatcacacacagacctctctgtcactaacgtagagatctagcctctgttggcacccaatacaggatcctctgaccgggggctggagcagtctccttgttaataacctcccctcaaaaataaataaatgaaaaccactggggaagccaccattagcgttacaggctttctggggcgggttaagtggtgctgagaaggcagtgcaggtgtgctgtccccagttccctccagagtccccttgagaagaaattcatgagctactacatttccactcccttccttggcatttattggctttttgatgaatgttagagcaatttttctgtcaacagctcctcattaggggcctggcggtgttcactccgaccattattttgctcaatatcaggcctggtcactgccaggagaagaggtcccacttagaagccatccatcttcatggcagcagaggctccaataatccacttcccacccctgctgagggatacccctggggcatacacagggaattgagacaaacagccagaatcgcacagcacatcttcctgcaccgagcttccctgcgaatcgcactgcacatcctcctgcactgagcctcccttctttttttcttttcttttctttttttttttttttttggtggggggggtctcgagacagggtttctctgtgtagccctggctgtcctgaccaggctggcctcgaactcagaaatctgcatgcctctgccgggctgctgtgctgggattaaaggcgtgc

SEQ ID NO: 608 - DNA, 1438 bp, Mus musculus
cttttcttggctgcaatggctgtggtcgcaggccttcgggcctttggggtgaagtggcccagctggctcaggcgcaacccatgggcccctctctccgccggcttctgcagcccagggtcagcaggacctgcggggtcggagtcagagccaaggctcaccagcacgcgacagcaggacggaatcaggaacattgtcttaagcaatcccaggaggaggaatgcgctgtcactggccatgctgaaatctctccgaagtgacattcttcacgaagctgaaagtgaagacctgaaagtcattataatttcagccgagggccctgtgttttcatctggacatgatttgaaagagctgacagatgcacaaggccgtgattatcacgctgaggtatttcagacctgttctgaggtcatgatgctgatccggaaccacccggtccccatccttgccatggtcaatggcttggccacagctgcaggctgccagctcgtggccagctgtgatattgctgtggcaagtgacaagtcttcttttgcaactcctggagtgaatgttggacttttctgctccacccccgcggtcgccctggggagagcagtgcccagaaaggtggccctggagatgctctttactggggagcccatttctgcccaggaggccttgcgccatggccttatcagcaaagtggtaccagaggaacagctggaggcagagaccatgagaatagcaaagaagatttcctctttgagccgctctgtggtggcgttgggcaaggccaccttttacaaacagctgccacaagaccttagaaccgcctacttcctcgcctcccaggccatggtagacaacctggccttgcaggatgggcaggaaggaattgaagccttcatccagaagagaaagcccatctggtcacactgagcccgcatgaggagtgctgagttaatggtcagccctagctgacccccagccctcccatctcctcctctcaacccaaccatatactgccacctcttgattgtaagagaacattgccagcctttctaacttggatgttggtttctcagtgtgtgatctgtattgaatgccatggttctgtgggaaatgaatacaggggagggaacgacttgctaggtcagtgggcaggttaatatgcactggggtgtgcaggctgtgacagaaaccccagtacccaacggagcctgaagtgaggtgctgcccatacagaggacagtcaagtgaagcgtgaaggaagggtgccgcccccatgcttctgcagtgtccttcaggcacagtccgttctggttgttcatggcaagttgaacagttcaaatctccatgagaccatctccccactgaaaaatttcttgattctaccaggaaatcatcacacctgtagtttggaataatcttatgtgatttgaataaattaaatatttat

SEQ ID NO: 609 - protein, 294 aa, Mus musculus
MAVVAGLRAFGVKWPSWLRRNPWAPLSAGFCSPGSAGPAGSESEPRLTSTRQQDGIRNIVLSNPRRRNALSLAMLKSLRSDILHEAESEDLKVIIISAEGPVFSSGHDLKELTDAQGRDYHAEVFQTCSEVMMLIRNHPVPILAMVNGLATAAGCQLVASCDIAVASDKSSFATPGVNVGLFCSTPAVGRAVPRKVEMLFTGEPISAQEALRHGLISKVVPEEQLEAETMRIAKKISSLSRSVVGKATFYKQLPQDLRTAYFLASQAMVDNLALQDGQEGIEAFIQKRKPIWSH

SEQ ID NO: 610 - DNA, 41683 bp, Homo sapiens
cattttgtaggttgcctgttcactctgatggtaatttcttttgctgtgcagaagctctttagtttaattagatcccatttgtcaattttgtcttttgttgccattgcttttggtgttttggacatgaagtccttgcccatgcctatgtcctgaatggtaatgcctaggttttcttctagggtttttatggttttaggtctaacatttaagtctttaatccatcttgaattgatttttgtataaggtgtaaggaagggatccagtttcagctttctacatatggctagcctgttttcccagcaccatttattaaatagggaatcctttccccattgcttgtttttctcaggtttgtcaaagatcagatagttgtaggtatgcggcattatttctgagggctctgttctgttccattgatctatatctctgttttggtaccagtaccatgctgttttggttactgtagccttgtagtatagtttgaagtcaggtagtgtgatgcctccagctttgttcttttggcttaggattgacttggcgatgcgggctcttttttggttccatatgaactttaaagtagttttttccaattctgtgaagaaagtcattggtagcttgatggggatggcattgaatctgtaaattaccttgggcagtatggccattttcacgatattgattcttcctagccatgagcatggaatgttcttccatttgtttgtatcctcttttatttcattgagcagtggtttgtagttctccttgaagaggtccttcacatcccttgtaagttggattcctaggtattttattctctttgaagcaattgtgaatgggagttcactcatgatttggctctctgtttgtctgttgttggtgtataagaatgcttgtgatttttgtacattgattttgtatcctgagactttgctgaagttgcttatcagcttaaggagactttgggctgagacaatggggttttctagatatacaatcatgtcgtctgcaaacagggacaatttgacttcctcttttcctaattggataccctttatttccttctcctgcctaattgccctggccagaacttccaacactatgttgaataggagcggtgagagagggcatccctgtcttgtgccagttttcaaagggaatgcttccagtttttgcccattcagtatgatattggctgtgggtttgtcatagatagctcttattattttgaaatacgtcccatcaatacctaatttattgagagtttttagcatgaagggttgttgaattttgtcaaaggctttttctgcatctattgagataatcatgtggtttttgtctttggctctgtttatatgctggactacatttattgatttgcgaatattgaaccagccttgcatcccagggatgaagcccacttgatcatggtggataagctttttgatgtgctgctggattcgttttgccagcattttattgaggatttttgcatcaatgttcatcaaggatattggtctaaaattctcttttttggttgtgtctctgcctggctttggtattagaatgatgctggcctcataaaatgagttagggaggattccctctttttctattgattggaatagtttcagaaggaatggtaccagttcctccttgtacctctggtagaattcggctgtgaatccatctggtcccggactctttttggttggtaaactattgattattgccacaatttcagctcctgttattggtctattcagagattcaacttcttcctggtttagtcttgggagagtgtatgtgtcgaggaatgtatccatttcttctagattttctagtttatttgcgtagaggtgtttgtagtattctctgatggtagtttgtatttctgtgggatcggtggtgatatcccctttatcattttttattgtatctatttgattcttctctctttttttctttattagtcttgctagcggtctatcaattttgttgatcctttcaaaaaaccagctcctggattcattgattttttgaagggttttttgtgtctctatttccttcagttctgctctgattttagttatttcttgccttctgctagcttttgaatgtgtttgctcttgcttttctagttcttttacttgtgatgttagggtgtcaattttggatctttcctgctttctcttgtgggcatttagtgctataaatttccctctacacactgctttgaatgcatcccagagattctggtatgttgtgtctttgttctcgttggtttcaaagaacatctttatttctgccttcatttcattatgtacccagtagtcattcaggagcaggttgttcagtttccatgtagttgagcggctttgagtgagattcttaatcctgagttctagtttgattgcactgtggtctgagagatagtttgttataatttctgttcttttacatttgctgaggagagctttacttccaactatgtggtcaattttggaataggtgtggtgtggtgctgaaaaaaatgtatattctgttgatttggggtggagagttctgtagatgtctattaggtctgcttggtgcagagctgagttcaattcctgggtatccttgctgactttctgtctcgttgatctgtctaatgttgacagtggggtgttaaagtctcccattattaatgtgtgggagtctaagtctctttgtaggtcactcaggacttgctttatgaatctgggtgctcctgtattgggtgcatatatatttaggatagttagctcttcttgttgaattgatccctttaccattatgtaatggccttctttgtgtcttttgatctttgttggtttaaagtctgttttatcagagactaggattgcagcccctgcctttttttgttttccatttgcttggtagatcttcctccatccttttattttgagcctatgtgtgtctctgcacgtgagatgggtttcctgaatacagcacactgatgggtcttgactctttatccaatttgccagtctgtgtcttttaattggagaatttagtccatttacatttaaagttaatattgttatgtgtgaatttgatcctgtcattatgatgttagctggtgattttgctcgttagttgatgcagtttcttcctagtctcgatggtctttacattttggcatgattttgcagcggctggtaccggttgttcctttccatgtttagcgcttccttcaggagctcttttagggcaggcctgctggtgacaaaatctctcagcatttgcttgtctgtaaagtcttttatttctccttcacttatgaagcttagtttggctggatatgaaattctgggttgaaaattcttttctttaagaatgttgaatattggcccccactctcttctggcttgtagggtttctgccgagagatccgctgttagtctgatgggcttccctttgagggtaacctaacctttctctctggctgcccttaacattttttccttcatttcaactttggtgaatctgacaattatgtgtcttggagttgctcttcttgaggagtatctttgtggcattctctgtatttcctgaatctgaacgttggcctgccttgctagattggggaagttctcctggataatatcctgcagagtgttttccaacttggttccattctccgcatcactttcaggtacaccaatcagacgtagatttggtcttttcacatagtcccatatttcttggaggctttgctcatttctttttattcttttttctctaaacttcccttcttgcttcatttcattcatttcatcttccattgctgataccctttcttccagttgatcgcattggctcctgaggcttctgcattcttcacgtagttctcgagccttggttttcagctccatcagctcctttaagcacttctctgtattggttattctagttatacattcttctaaatttttttcaaagttttcaacttctttgcctttggtttgaatgtcctcccatacctcagagtaatttgatcatctgaagccttcttctctcagctcgtcaaagtcattctccatccagctttgttccgttgctggtgaggaactgcgttcctttggaggaggagaggcgctctgcgttttagagtttccagtttttctgtgctttttttttccccatctttgtggttttatctacttttggtctttgatgatggtgatgtacagatgggttttcggtgtggatgtcctttctgtttgttagttttccttctaacagacaggaccctcagctgcaggtctgttggaataccctgccgtgtgaggtgtcagtgtgcccctgctggggggtgcctcccagttaggctgctcgggggtcaggggtcagggacccacttgaggaggcagtctgccggttctcagatctccagctgcgtgctgggagaaccactgctctcttcaaagctgtcagacagggacatttaagtctgcagaggttactgctgtctttttgtttgtctgtgccctgcccccagaggtggagcctacagaggcaggcaggcctccgtgagctgtggtgggctccacccagttcgagcttcccggctgctttgtttacctaatcaagcctgggcaatggcgggcgcccctcccccagcctcgctgccgccttgcagtttgatctcagactgctgtgctagcaatcagcgagattccgtgggcgtaggaccctccgagccaggtgtgggatatagtctcgtggtgcgctgttttttaagccggtctgaaaagcgcaatattcgggtgggagtgacccgattttccaggtgcgtccgtcacccctttctttgactcggaaagggaactccctgaccccttgcgcttcccaggtgaggcaatgcctcgccctgcttcggctcccgcacagtgcgctgcacccactgacctgcgcccactgtctggcactccctagtgagatgaacccggtacctcagatggaaatgcagacatcacccgtcttctgcgtcgctcacgctgggagctgtagaccggagctgttcctattcggccatcttggctcctcctgaacttttatgctctgcttcttctcgaatgctttgctgcttagaaatttcttctggcagataccttaaatcatctctgtcaagttcaaagttccacagatctctagggaactagttctgcatggctggggaggcctcacaatcatggtggaaggcaaggagatgcaaaagcatgtctcacatagcagcaggcagctacagtttatttttaacatggcattcaggagaataatttgaacacgtaagttgggtcatgtcccaaccgtgctaaaacttcctgtggttctctctctctctcagagtgaacaggccaagcacccatcctccctccctctgctcacccaccctgacctctcgctgttccctgacctcactgggtcctcctgcttctcagcatctgtgctcgttcccgctgcttgggcagctgtggccctagatacttgcgtgactcactccctcgcttcctctggtctctgctcagacatcaatttatcaatatttccccaactcccccaccttgcaatagggtcgcatccctctccctctgccccgacctcctccaaggttcttcagagcatccctcaccatctgacacatcatctactctgtttattttctgcttccctgcactagaactcaagccttctgagagcaaggacttgcttttgttccctgcgataaccccagtgcctagatctgtacctggcacataatgggctcaacaaatattctttgaaatgaatgatagtattattcttctcgtttgacagacaaggaaacaggctcagaagtaacatgctaaggtcatcaacctagtaatatagcaattaccaggagctgagcctgtcccatccccttcgctcactgacctaagtgtgaagtcattcccctccttccagtcaggaaaaatgccctcccatctcccaccccaccaccactacaggaactcttctgcagaggctgtccggaatgttcaagcaagtatcactctttatggtagaatgtttcatttgactgaaggttaacctgatcaatgtcagaatggcaactacttttcctttctccttgaattattacttttttttagagacagggtcttgctctgtcacccaggctggagtgcagtggcacaatcatagctcactataacctcaaactcccgggctcaagcaatcctcctcacacagcctcccaagtagctggtattataggcacaggccaccatgcccagctcattttttttttttttgtattttgtagagttgggggctttctgtgttgcccaggctggtctcaaactcctggcctcaagtgagcctcccgcctgacactcctgaagcactgggattacaggtgtgagccatcatgcgtgttctcttcttgaattatcgaaatgtaactgaaccttctctttgtgttgcaggattaaaattattgtgagatgcaggtcatgtagctaagatgctgtattagtccattttcatgctgctaatgaagacacacccaagaatgggtaatttataaataaaaagaggtttaatgaactcacagttccacgtggctggggaggccttgcaatcatggcagaaggcgaaaggcacatcttacatggtggcagacaagacagaatgagaaccaagcaaaaggggtttcccctcataaaaccatcagatcttgtaagacttattcattaccatgagaacagtatgagggaaccacccccatgattcaattgtctcccaccagagccctcccacaacacatgggaattatgggagctacaattcaagatgagatttgaatggagacatagagccgaaccatatcagatgcagatgcaggaggtgtagaagataggggtgagtgggtaccagcccctgctgtggctttgggacttggcttgatccttggtctcctgctccgtcctcattgagggacaatgaatggtgattagcagcctgggttctgcagctgccccacagctgtccttctttaacagcagttaacgaatccaacattaaacattcctctcccaagcgacttcttgcccccctagatggtgtctatcactgtcactatcacgatcctttaacttttcaagctcatttaaagtgttatctgtaaccaggatgctgtgaaacacatacctcttcatcagtttacacagctcttccagaccttacctgaagttactgagtctgttttgatgtttttttttttttgagacagagtcttgcactgtcacctaggctggagtgcagtggcgcaatctctgcttactgcaccctctgcctcccaggttcaagtaattctcctgcctcagccttccaagtagctgagattacaggcacgtgcccccatgcccagctaatttttgtatttttagtagaggcggggtttcaccatgttggccaggctggtctcgaactcctgacctcaggtgatccacccacctcagcctcccaaagcactgggattacagttgtgagccaccacgcccagccgagtccgttttgtttaaggcatgtgagcaacctcaaaaatccatgccaagtggggagcaaaggaagctcatttcacccccacacctccatttatcttctaaactaattttcacccaactcaaggtctgggtccttgtgaagacatttaagtttgcaagaggcacgtgggtaatgactggtggattattaataaaatacagaataataaaaccaggacatggccaagcatctgcagctgtgtggaccaatgaaaatctgaaatctttctggtttatgggcgcttgatcctcctttggctttgtggggctgggggggacagatgtggagtggaggatgagggtgggaaactggaatctgatcatgttacatgcccaagggctctcactgaaagtaggcctcaccatcttccccattgcacctctgaaccatgtcattacatgtctaccttagaaaggcctgaaattaaaaaataataataaataaaaaataaattcaaaaaccactccataagaagctgaaaatctgtacttcacatttctttccctgagccctgaggtggtctaagtcttccttcattcattcccacggcctcccgggaaccgtgtcttcatcctgagttatttctgcagtgttccatcaggcatctgcgggtctttaaaggaaatgtgaaaaggtagcaaagacacatctgtgcagcagagacatgtggcacaggaaagaagtgcagaaatcaaagccagggagaagcctgctagccacctagaaatcaaattgtgtcagggagaaagcctgcgtggaaaatagattagaaaggcactgaacaagagagaagaaagaaaggcagcccctgcaaaagttaatgagaagcagaggaggccgggagaagcagcctgaatttgaaaagagtcctgcactgcttgaggaaggactcaagattcagtaagttctatcgacttctgcctgggtaatgcggtggccgtccacctgcatgtccctctttgctcaccacgctcaaactgggggctgcaggctctgaaagaaaaccagggaggagggagacatgaaaggaatgggaacgcaggcctaggacttcagatgagaggggaccctccatccacagcgccatccttcatctgacctccagccccgtcctgactctgtaactactgggcctggtgccaacagggctggtgaaattggtgggaactgcgataatgatacctgcctggacaaccccgaatgttgaaagagacggcataggtacaggaactggcagagtggggctccacaaagagcgacctgttattattaaatgtagaagcaggtggaagtggcctctgagcctttccattttcttttgagacggagtctcactctgtcgcccaggctggagtgcagtggcacaatctcggctcactgcaacctccacctcccgggttcaagcgattctcgtgtctcagcctctcaagtagctcggtctataggcgcgcgccaccatgcccagctaattttttatatttttagtagagacggggtttcaccatgttggtcaggctgttctcgaactcctgacctcaggtgatccacctgcctcgacctcccaaagtgttgggattacaggcgtgagccaccgcgcccagccgtctttccattttcatctgcgcagtccaggctcggagtgctctcctagctccttcgtcttcccgaaaccccgtgtatcagttccctcttgcaccagctcccctgtggagtggggcctcctcatctcctcccagccagcgaaagtcatcttagtaagagaccagcagtgaccctaagccctgggggcggtcacttttatcaggctctgcgacccccgtgctcccccgtgctcggcctcgtcggtggcacttggcatgactgggagatcaagctcaggtgttccggaaatttaactttattttgtttatgaactcactttccatttccagatacctggaggcagaaacttaaagtgtggacccccagcgtctggatgagaggacacaaaggattaaaaagtcaacatccgcgcagccaggccccccacgtgctcgccctccaggctcggggcgtttcccaggcaggtaggggagcggttgctaacagtgcagcgccaatcacccctgacgctcgttttcctaatgcaggcaaacgccacattcccggtgttggtgcaaaaagaaatcatcctactcctcccctcgcttaaactttcccacaggccttgtcaaacaacccctggagccggcctgcaggttttcaatgcgcgcctttcaccgtgcggggcgcggcggggagcggcgagccgggggcgggcctcgtgggggcggggcggggcgtgccggggcggggaggggcgtgccggggcggggcggggcgtgccggggcggggcgtagtacggactgggcctggcctggggcgtccccgcgaagcctgggcctgtcaggcggttccgtccgggtctcggccaccgtcgagttccgtcgagttccgtcccggccctgctcacagcagcgccctcggagcgcccagcacctgcggccggccaggcagcgcgatcctgcggcgtctggccatcccgaatgctatggccgccgtcgccgtcttgcgggccttcggggcaagtgggcccatgtgtctccggcgcggcccctgggcccagctccccgcccgcttctgcagccgggacccggccggggcggggcggcgggagtcggagccgcggcccaccagcgcgcggcagctggacggcataaggtcagccccgggccgcgcgggctcctcgcgttggtgccgagtcggggtcagggcgccgccattgacccggggaggacccggggaaccggagccccgtttacgcccctggggagggaactccccgtgtcccggacccgggcctggcagcgagacgcgcaggtgggattgtagggccgtcggtgggactgcccggggctccaaagccctcagggcagcctgcggggtcactgggcctccagtcgctgggcctgcggagaggcctggagaggagggctctgggccccagacccggccctaggggaagtgtgggcttggtcgagctgctccttggccctcacacagaggcgcggggctgggggccaggacagtaaataggacaaagtgcacagcttcctgagcgctgcccttgtggctacgggcccaaaactcttaaaaatgtgcttgtacgccaactggaatctgggcgatggagtcatgaaggtggagggccctaccccctccaggcctgagccgggtgcttgcctggccggggcaagggtgcaaagggaggcctgcgtaccgtgtttcagcatgtttcagttctaaatcaagctattaaataaaacgtcgtcttctcctaccctgagatgttcaccttccgaagaagacctagaaggccgcctgtgaactgataatcctcagatgaccaggtggttccccgcaggggtagagagccagcccatggcttcagcgttttccttttctcctcaccctcctctcatcctttcctacctttgcacccgtcctttctgctgctctgcaaggggctgggtgcacagatctgcagacacccttccagccctcatgctctacagacagctgctcttggccacctttgggcttggggtgcccacagcaggggcagggaattccagggtctcagtaatggccgcagggtttggaaaggggatggttcccttccctgtggaccccttgctcatcaactacaggagcacaggccagagcagggcccaggccagggtctttcttgcccattgctaagtttctgcttctgtaaatctggtcacatctggttggaagcctgacttctgggcatggcggccagatgacaaaaaggaggccggtcgagttctccagaattaaatatgaatcagcaaaggtggtgactgaaacactctcacatgaatgctagggtttgtttagtaggaaaggaaacttcttaaccaagcattaaagcagcattatgttgggcactaagcaggtgaacttgagcaagaacttgagcgacccaccactcttcaagtgtcccttttccatgctcctcctcccagcagcactgctgtcatggacccagggccagctctgtgctgggctccctgcatccatgatccctaattcttaacagtggcctgcaaagtggataattttatgcccactttactgtgaggaagcaagttcagagaggtgacagcctgttcagggccacacggccagtaggtctcaccagggttcagagaggtccctctgccccaaagtggtttctactctgtttctactcaccacttggtttgaaaagagatggcgaaaaaatgggatgtgatgtcattccactgcattcggtggaattggctgtgaaaaaatagaaatgctattttttgtcattaggtcaacagatattgagtgtcttctctgtgtgagaacatgacagtccctcacttcagggaccttctcgtggtttacaataatgatcttcagacagctcatgggggcatttatagggaccatctcttaccttgacacttatcacatgctctggtggtgacctcattcttaaagaggttttctcttcggataggtgatattggtggagctctcggtgcaaggcatcgcatgttttgaaccaagatggccactgggagggttcagtgaagagatttttttaggaggtattattaacaggctttgatgccagttgaatcaggaagggatagaaaactagaatgactttttctctcattcaggcaactgagtggcactgctcagataagaaagagaggagaggggcaggtttgagaatggggggatgcccaaagacacctagatggagaaggccagtagacatcggcatgaacgcgtgcacctggagctcagctcagaggcagctgttgacatcaaagtcatcggtgaagttgcctgggaagagtgtggaggacagaattcaggatggctgacattcaggggtgaacagagggctagtagcccacgaaagaagtcaagaaggaccgaccagagaagtacaaaacaaccaggagagaagaaatctgtctccagaaggagggagtgatcgagatggccagtggatttggatctggaaattaggagatggttggtgagaagagcttgggtggggcgggaggagctgagcctggttcctctgggttggagagtggactctgcagtttagaacactcacagtgtgggagccaaacagctaacaggacacatgaacagattccgcggcgcacgatggcctcaggggctggaatctttttatacaattttgcctgagaccttagcactaagattaagcatacgtcaccgatgggatggcagctttttatatttgctacaagaagcaccctcaatatttgatggagaggtttataagcagttctcccaccacccccaccaaatataagttttgaagtctatcagcaaatcagtgcaagtaatttttgtacttaggagagaacaatgtttataagaaacaacaagatgaatagcacagccacttgaagactgcagcaaccttgaaatggtattccaaagaaagtggttattcttattgaaatcaattcagtcatcaaacttgttttccggaaaaccatgacacagaatactatttatggaggatccaagttggctgtaccgcggaaggaatatcagattcaaaaaagattgaggaaggtaggaaacctgtaggtgaaaactgataggaaacatataaaatatataataacaatctggtgtttggctctttgcccatttcttgtaacagccaaaaataagacatttctgtgtataagcagcaagatgacaatacaggttattttattcagcatgtgggctgcctcaaaagagccaacaggccctttggacgccagctttttgtgagaggatatgtccagaagagccctcttgctgtgtggcttgtacttttttccttcatgtatcagcccacttgcagacagcatgaattgttttgtaaacttacaggatgccactgtaagaaaagacgggcctaggtgcagtagctcacgtctgtaatcccagcactttgggaggctgaggcgggtgtatcacctgtagtcaagaatttgagaccagcctggccaacatggtgaaacctcagctctactaaaaatacaaaaattagctgggtgtggtggcacacacctgcaatcccagctacttgggagcctgaggcaagagaatcacttgaacccgggaggcagaggttgcagtgagctgagatcatgccagtgcactccagcctgggcaacaagagtgaaactccatctcaaaaaaaaaaaaaaaaagatggagtgggtacagaaaaatagaatgaatgaataaggccgagaattctatagcacaacagggtgactatagtcaataataatttaattgtacatttgaaactaactaaaagagtatcattggattgttgatttatcctttgtcatccacaaaggataaatgcttgaagggatggataccccatcttccatcacgtgattattgcgcattgcttgcctgtgtcaaaacatcccatgtaccccataaatatatatacacctactatatgtacccacaaaaattaaatataaaaaattgggtcgggcatggtggctcatgcctataatctcaaaactttgggaggctgaggcaagcggatcacctgagatcaggagttcaagaccagcctagccaacatggtgaaaccccatctctactaaaaatatgaaattagccaagtgtggtggcgggcacctgtagtcccagctactcgggaggctgaagcaggagaattgcttgaacccgggaggtggaggttgcagtgagccgagatctatagagggagttattttcattctgggctcgttttctaacttttttctaaggaacaatggaaagaaagcagtggaaggtagccactgtttgtcagatttctccagcgcctgctatcatgctaagcttgcagcctctctgggtggtgttgattttggaaccgctgtgcattgccctctccgtggaggtggcagtcatgtttctgacagcaaacatggagaaaaagagaaacaaatcaagggaagagggaggaaacccagcctgcatttcaggtcgcctttttcttgttttgacttggctgtaactccagagagttgacagaccctctaaattggcactaagccccagcagttctcctttcttatctgttaaaaatacctcctaaattagacaggaatcgcagcggtcctcacttgttttgactggtgtgtgaccctgtgattgtaaaatgttcttcacaggaacatcgtcttgagcaatcccaagaagaggaacacgttgtcacttgcaatgctgaaatctctccaaagtgacattcttcatgacgctgacagcaacgatctgaaagtcattatcatctcgggtatgtatctgatatctgtccttagtattctgcagtgcccagaagagctttctgagtctttagtaaactggggcatccctttatttaactggagaattgttttgaagctcctttacaagaacattaattatggaaaacacctgtgtagttggtggtttggtcctaacgctattaactgcagaatttataacaaagatgactgttcagtgaaactatgtcttttcctttttgtcagatactaaaacatttctgtacttggctatactggtcttcccctcaaaatcagagaactgatttcttcatggaccttataaaatgggtttaaccactaatcctttggcgcatttgattggtctgacttttcttttcttaccaagctttcgaactgatatctgcagtgcctttaatggtgctggaaaagatgacatattctgctaatttgtttgcttgctccaaaaggaatttttacagaattattttttcttgtgatgatgggactggtataaataatagtaatattagcattttaaagcatacacaaaaaaatatgatgatgatgctttgtgatgctatgtttgtttggcaaatcaagcatcagtgtttctggaggcagaaactcagaatgttaccatcttatccatggttaatcgaaagtgttcaactgttttatatggtgaagagaaaagaaattagaactagtacagtccagcagccatgtgggatgttacctggatacagcaaaggcagttaacgtcttctttttttttttatttgatacatagtcttgccctgttgcccaggctggagtgcagtggcatgattatagctcattgcagcctcaaacttctgggctcaagtgatctcccacctcagtctcctgagtagctgggactataggtgtgtgccactacactcagctaattttttattttttgtggagatggtgtcttgctatgttgcccaggctggtctcgaactcctagcctcaagcaacattgccaccactgtgcctggctaatttttcaggttttattttgcagagacagggtctcactatagcttcttaactacataattacctcacttacaaaaagacaataatattgcctatcaatcaagataactacaacagccaggcatggttgctcatgtctgtaatcccagtactttgggaggccaaggcgggcagatcacttgaggccaagagttcgagaccagcctggccaacgtggcaaaaccccatctctactaaaaatacaaaaattagctgggcgtgggggcaggcatctgtaatcccagctacttaggaggctaaggcacaagaattgcttgaacctgggaggcagaggttgcagtgagccgagatcgtgccactgcactccagcctgggcaacagagcaagactctgtctcaaacaacaacaacagcaacaaaagggaagtatgagaaaatgttatcagctcatcagtaggatgacattttcttgttgatgacagcagtgatagcagccacatcttatgatccctcatctgtaaaatgaagaccagaaggcttccgaggtctcttcctaccctcaccttcccagttcagccatgacggctggccactacttgtagatgaaatgacatggacactgcctttggcatgggggattttgatgagcttgtgtgactcaatacactcaggccagagcgagtccgcaaataaaggctctgtataaaataccttcgccttggtaactgaatcttctccttatgtaattgtgtatttctatcattttccatgaagaaattttaggacacggaggcacctaaaaaatgcctcgccttgcatttttcatcacaaaactctggctggaacttttcaagcaaactggaattattcttctcaaaattaggccattaacttgctctaagtgaaagtttgctgaagttattcagtagacaaggaagggaactaactgcccaactctgggtgtttacatctttttgttttcttttctcaattggaaacatttgcagctgaggggcctgtgttttcttctgggcatgacttaaaggagctgacagaggagcaaggccgtgattaccatgccgaagtatttcagacctgttccaaggtaagccaagacgacagtcgacagtgcaaacctgcaaatgatcattacattaaatgttgagttcgccttcgaccttacagataagattttatccatgagacccaaacacccagagcaactggaaactgtttggtcatcagatcctttatcccagcaattatttggtttagaccttttttttttttttttttttttttgagacagagtctccctctgtcgcccaggctggagtgcagtggtgcaatcttggctcactgcaacctctgcctcccaagttcaagcgattctcctgcctcagcctcttgagtagctgggattacaggcatgcaccaccacatctggctaatttttgtatttttagtagagacggggtttcaccatgttggccaggctggtctcaaactcctgacctcagatgatcctcctgcctcgaccttccaaagtgctgggattacaggcatgagccaccgtgcacagcctagtttagacttttaagaagtgaccataatttgctattgattttgttttataccaaagaaagtggaatataggatggtactcatagttgccatgtctagcattgtgggagtatgtcttggtatagaagtttggagtaagaaggaaaaggtgaaaatgtgcgtctttagggaagaagaatctcagattataataattttaaaagattttaaactaaaacaactctattaaatgggaaagaacattaataaatggaataacaataatggtttttaaaattatttttgaatgcttctttcaaccagcctttataatcaccacctccaagtaggaaaattaacctcttcgttgttgcttcttttctgcctctttcaccatattaaggaggaaaaataccgacagccacagaggaagaagaggcacaaaagttttgaatgatttataaaggcatgaaatcaaccccttgggtaatgaaaaattgaatagtgaatccagctttaagtaatacattgttcatctaatgaccatttattgagcacctattatagtacctgcaaggcattgagggaaacataagaaaaaattgttttctgccaaactgaaactgaaaatctatttgggaaacaacacatataaaatggtttcataacctgcctctaagatagtttaacctaattttttattcattcattgacttattcattcatgtatttggtcattaatgatttcacagatgtttaatgatacaagacagaagtgagcaacagggatgtgaatgggaagatgattaagacatccccatttgttttccttgcccttccagaaacccataaagagatcaggttatatttttctcactccatggaaggataaacaggaacagcaatttactcgaagcttcatggggaagtgggagcaagttagagccgagacctgggtctttcgtttcctacattaatgatgtttatgtaacattccactcttgggtttgccaagccttggtgctttaaaagtttttttctaccaatacccagtatgtttggctaaagttgaaaagcatcagagagaaccagtaaagcccttttatcctccttaagggtctgcttttatcactctgctctggtaacttcatgaactgggatctaaacagcatagccatgggccacaggggagcaggccttcttcagaggataaagcccagatttcttggaagcccctaacccttggaggcctctgactccctgaaaaagactcagtgcataaacagggcctaccccaaagtagtaaaataggactgaaagtgtattgatatctttaaaccatttctaagaaaataacattgtcttggataaatatgagtgccatgaacttgtgcaagatttccatttccaagtgaaatcaacagcagattggaacagaatgagctagatatttcattgttcagttcatgcatgagaaaatttgattttagaaaggaggatagaggtatctgaattagctaagcatctaaaaactataccaattggttacagatgacaagtactgcatgatagttaattatatacaaaccaggagtagggcaaattaaggatgagtagaatgagaatgagaagaacttgactctggaagagtgaaaatgacctgccatggcgctcaggttagagacttcttccttgtctctctacttatatcctgttgaagtttggagacggaaactctagtttaggagaagattctgcactttgctctcataccccgtcaatcaaatgacaatgggacaagatttcttgctttggggagataacatgaaacccttagcgatgctgttaaaggaggttagggcagagttctatttatgtcacattttggagtcagcagacccaaaacagtacctaattcaggaaggtcaaataggtataatcagttcttgactatcaagtgtttgattattctagcttgttgattatttaaattccctttgtcttttttgaacttctctctaactttatattttaaatagtctttttttttttcttgagacagggtctcgctctgtcgcccaggctggattacagtggcatgatctcggctcactgcaacctctgcctcccgggttcaagcaattctcctgcctcagcctcctgagtagctgggactacaggtgtgcaccaccacgcccggttaattttttttttttttttttttttttagtagaaatggggttgcaccatgttggccaggctggtctcaaactcctgacctcaaatgatccgcccaccttgacctcccaaagtgctgggattacaggtgtgagccacagcacccggcctaaaatagtcttaatcatgaaagtaatgagtacttgtaaacagttttgaaagtctagaacagtaaaagattaccaatgtcataccataatcataccacccagagagaaccgtgattaatattttgctgtatttccttttagatcatttttccatgtgaacctgtttttctaaataatcatatatagatgagattacagtatagaattacataatatgattatagcattgattgcttactatatgccagataatattttaagtactttagatatgttaatttatataactgtcgtgttctataaggttggtgctattatcatgtccattttacagatgtgaaaattgaggggttaaatgacttgtccaggattaggcagagtaagtgacagactgggcgtcaaaccctggcagcctggttccagaccactgcataagctccagactgccatgctggtgtttctcttggaaattttcatttcagtgagaatacagcatcctagtcgatgtagtttagtttccactgccatttatttattttgtatatttatattatttatagtttgttactattacaaaataatgatttggtgagcatctttggcatagagctttttacctatttcacattatttcttagaagtagaattcctagatcaaaggtgaatgtatgcatttttaggccggtcacagtggctcacatctgtaatcccagcgctttgggaggccgaggtgagtggatcagttgaggtgaggagtttgagaccaacctggccaacatggtgaaactctgtctctactaaaaatacaaaaaagttagccgggtatggtggtgtacacttgtaatcccaggtactcgggaggctgaggcaggagagtcacttgaacccgggaggcggaggttgcagtgagccaagattgtgccaccgcactccagcttgggtgacagagcaagtctgtttcaaaaaaaaaattaataattatatgcttttttaatgttgaatatatacatattacctatttttctgccaagttttatgaaatcctagccattcacagatgatggacaggacaggtagactgttcaactctaatcccagtcaattggcttttcattagtaacttcagttccttgggtggtgcaacaacactcagaacgaaaacaaaatcttttctttctttgcagcaagactttagaagttcttgggatttcttccccttgttattcattccagttcactggtaatgagcactctcactagcccatccccagtctcgccttacagtgcatgaaccccctaaatccgtgaatagtgttgtgtacaggtgtttacttatctgtgcattcttcttctttttatttttatttttatttttatttgagacagagtctcactgtgtcacccaggctagagtgcaatggcgcgatctcagctcaccgcaacctccacttcccaagttcaagcaattctcctgcctcagcctcccaagtaggctgggattacaggcacgtgccaccacacccagctaatttttgtactttttttttagtagagacagggtttcatgattttgaccaggctggtctcaaactcttgacctcagatgatccacccacctgtgttcttctgaggaggatgtatttcctcatttatcctagggaagagaaatgtcattagcgtttatcaggttctcaaaaggagacctcccccaaaaaaagtcaaaaagcactactataggatatgataccatagccttaaatatataattggttattttagaagaaagctaacgaatatcaaatgtttatggatataaaagataagcttcttagacaaaatcttcaaatcaatgaaggtcatttgtctttgaatacctgccttggggaaagtaacccaaatttcattcccatcctctctccctgccaaggttcaaagagcagcactttagaaattgaagttaccatagcaacacactctgtggcatgaaaacataagctgcaaaaataagttaaagttctggaaatgtattggttggaggggtcacattagcatatttttgtctctcctctctgtgccaatggctctattttaggaattttgtttactttgatgacagcagagtccccccacccccattttaatagaattgggagcatcttcatggtggtaattggagaagtaattattaagaaaactgccttcaaggcccttttccacctcaatttttcaaggaagcaccaaataccagcttcagacctttaacccaagagcttcacacaagcacaatgaggacagaactgtctgtgaagggtttgatttgttccccagagagaaaaatccacactcttcttcagcacatttgccaggaaggcaggcgggggtctgtcactactcaagagctgagcttggggccaccccctgcggcagcccccaccaagcttagtgtccttgttgtacaatagggctctgtccccatggggctctcagaaagaccaaattacagtgcctggttcagagtagatatttaataggagttagtgctttctgtgccttttttcacccttcttccatagaatcggataaactcacgcttatgaaaagtgctctggaaacaggaaagtcatataaaatgatagacgttggctgggcgtggtggctcacgcctgtaatctgagcattttgggaggccaaggtgggtggatcatttgaggtcaggaattccaggccagcctggccaacatggtaaaaccccatctttactaaaaataccaaaaaaaatttagctgggcgtggtagcccgtgcctgtagtcccagctactcaggaggctgaggcaggaggatggcttgaactcgggaggaagaggttgcagtgagccaggatcttgccactgcactccatcctgggcaacagagtgagactctgtcaaaaaaaaaaaaaaaaaaagcaataggcgttaatgtcgtgcctccctctgggtggaaatgaagtaggtgtgtttgtcccgcaggtcatgatgcacatccggaaccaccccgtccccgtcattgccatggtcaatggcctggccacggctgccggctgtcaactggttgccagctgcgacattgccgtggcgagcgacaagtcctcttttgccactcctggggtgaacgtcgggctcttctgttctacccctggggttgccttggcaagagcagtgcctagaaaggtaatttaactgcccccacccacctctgcctcccagccttctccggagttcctcctccagtgcatgcgatgattcaagatccgcttgttaaaagtgcctttcatatcaggacgttctgcccagagtgcctctggctagatgggccaggatgttccctctaatggcagggagggaagagccgaccgcctgcctgttcctctgtagcttctgacgccaggcgtcaatttgtgaaatcactgcatttccatcatgcgtactctcagtaccactgggtaggtttgccgattagttttgtttgtcttcctaatggcccatattttgtaatcttatttgaaatgcaattgagactcagttttgttgcactgaatggttgcccatgagatagaatagcgtactgacataatgccagtatcaagagcctaggatagtagtgtcgctggctcactcttcatcaacagtctgtcttgttccagaacggatttagaataggtgatttctggagtgtgttgggtttacaacggttgcatttcaggaacatgaatctcctgtgcgtggtatgttgaatctgcccaagaaggagccgtgttgcaaagtggttttgttaactacagtgaagtctgtttccgccacaaagctttcttccttcctataacatcataaaataatatttcctaaacttccctcaagtgtaaaccaacagtgttcttgttgcggaaaaagtgcatccttgttcttaattggaaatctataaaaaagggggcagaatcttagaccacaccaagcaaagaagctaaattgctttctaatgtatgtgatctgctttagcatcagctgtgaaaatcagcaattgctcacatgcctaagacgcaaaagaaataagatccaagggaaatccagtagtaggaccaagaagtttagggaagtattcctttcttttgcagtgcccctttgttagtttttgcagaaatgtgtgtttgtggggaaattctgaagacagatacctgcgaacacacacacttaggacagtgggctggaagtgggcttcacactacagtaggtgccggctggctaaagtgtcttcagactaagaggatgttttcgattctgtcaagatagacacttaccttaaactcattcagtaattttttttttttttttgaaacagagtctcgctctgtcacccaggctggagtacagtggcgctatctcagctcactgcaatgttcaagggattctcctgcctcagcctccatagtaactgggattacaggcacgtgccaccatacccggctaattttgtatttttcgtagagatggggtttcaccctgttggccaggctggcctcaaactcctgacctcaagtagtccgtccccctcggcctcccaaaatgctgggattacaggcgtgagccgccgcacctggcccattcagtaaatatttcttaagactctactttgtgtataacaaattgattgtcagagcttattcataaactatcttataatggtgcaaatcaactcacaaggcctttgtctaataaaagacagctgtgctgacagctgcttgtcctcttcaacacctgatgtgctggaaggttccacagtaaagcacttgaaaccttgaagtcagccctactgtctggataagaacccattctctcttaaacttttgaaatcaaggcttattaaatttgattcctagaaacttaacgctagaccatatttatcaagttttaaattgataaaatttaaagtttttgagaagaaaagggggaaaatatgacaaaaacaggccttaagttccaaggaagcccagtcttcagaaaccccatttcataatcacccagttggatgaaccaaagtagcttttacctcccaaggacagagcttctcagaaaatggggcaaaaaatctccagacagccctactcaggttcctggtctctgttctcatgttctgacccccagaaggcctctaaatcactcaacttggagactcgccagttttttctaatcagctgcctgaaagcggttcagagttctgtcaacaagcccttgcacgctgggcttattaatgctgggccactcagagccatgactcaggaacatggcttggggtcaacactgaaaagcagaaatcacagtactgataatgggaattttgtaggaggaaacaggcttttggaacttaatgcctttgttaggtttctggatttgcagatctcattgtgtgggcctgctttaggaggaaaagctgggattcataacaatctaataaacctgacccaaaccacctgcccgttgtctttgctgattgtgcgcatgtgaacccatccacggacatccatgcacaggcccaccgagtattttggggggtgggtgcgtgtccctcatacacccacagggaagctagcaggtactttgcaaactggcctgggcaggaagttgggcctgtctcacactggataagacaacatgtatgggtcactagtgccctctcctggccgccgcagggacctgcttggctgtgctggagactggggcagaaactatgcaatcaagcctgtctgttcaaatcagaccaagcctggacatgaataatattccccatttgtaaagagcttctctccttgggcatgatctaaataatgcatctttctggcaccctataaaacaccctgcctggcgcagctgctccgttcccaggcagagctggccttgctcagaccctgagccagtgcctcaagcagctggcctcactggagagcacgtgggaaatgagaagcccttcctcccagaacagtcattttcttgaggcaggcagactctgatttcctaatcagctaatgagaacagagtggggtttccaagctggaaagatggttaaagcccgctgctcaaactggtgcagttgttagagagcctgggagaaaggctgggtctccagcctgccccagacaggctgcgttttagcagtgatttgtgtggccagaggttgggagtgaagttttagaggacgcacagttccacacccagtttgcaagagggtctgggagtttcagggcctcgtgtcctgtgtccggccagtgagatgggacccatgaccctcactccagtgtgcttccctcagagcctggccatgtggcagccccagggacagaccctgctggtgccacggtgccagtgcgaatgcatgtgtgtgtgtgcacaagtatcccatgggttctgttcaggcctgactctttccgtagtgctccttctgcagctcctcaccctgctgctggtgctccctgggagacagatgctatgtgctgtggtctcaatgctgtgtcctccccaaattcctgtgttgaatcctcactcccaaggtgatggtgctggaaggtggggcctttgggggtgatgagatcatgagtatggagcccttgtgaatgagatcagtgactttatgaaaacagccccaggctgggcgtggttgtctcatgcctgtaatcccagcaccgtgggaggccgaggcgggtggatcacctgagatcaggagttcgagaccaacctggccaacatggcgaaacctcgtctctactaaaaatacaaaaattagctgagtatggtggcgcatgcctgtaatcccagctactcgggaggctgaggcaggagaatcacttgaaccctggaggcggaggttgcagtgagccgaggtcgtgccattgctctccagcctgggcaacaacagcaaaactccatctcttaaaaaaaaaaaaaaaaaaaaaaaaaaacacgcagtcccagagagctgccttaccccctttttctccatgtgaggacacagctagaaggccccgtttacgaatcaggaagcaggtcctcaccagtcgctgagtgccggcaccctcaccttgaactctccagcctccagaacttgtgagatataaatgtctgttgtttataagccaccaggctgtggtgctgtgttccagcaggctgaatggactaagacaccacacccatgcaaaggggcatgacgtggggagagtcccttgtgggctgtagcacacggttcttgccatttgggtggcctatgagatccagaagacccctctgctttaaataatcacccccgttccaaggctggggtaaccatttaaaagccagcattagagatcatggaccatctgcagttggcctagttgtgttaaaaaataggtgttgcattcactgggtgcctactgagtgcccaggactgttattatacgagccttgcacctgctatctctaatccttgcaatactgcaggaggtgctcatttttgttttccagatgaaacaaactccaaggcgttagttgaaggtcttgtggttagtaagtggcagagctggggttggaactcaggtacatctggctcagccaggtcccttgagctcaaaccaggtccctgagcttttcttctgcaagcaaaatcttcatagtgacctccctgatttatgtctggctcagatggacaatttttcccccagcctttccattgtacttgatgtgacagtgtgccctgctgtcattagttagtggcttcttcactgtgtcccttggtgatggtcatttgtacccgagcgtgctggctgcggaagtgagaggtgagaaatggcttgctcagaggtcccaggaggaccagtgcccagcaggcttgggaccaggccccgcctgtgaagcttggactccaaaggactcaaccccaaaacatctggggcatttggaattccgtgcagttctgcagctacacactgccggcccaggctgcaagccccccacctgggatgaatacttgcccatctgctgagccggccaggaaggaacacttactactttggatttactctttcctccttccagctctgactccattcttaacgactctgagagtcatctaggacttgatcattgcaagtgacaaagggatcgataaggttgacttgggtggctttcgttgttttttcttgttgcatcagtttttcaggcttggccacttcctgacatttggtccctctgagttccccaagagccgcctgtgtcagtggagggtaagtggctgggaggagctgtgacacggtctccaccttggcttctgatcccagctgacacgcagttcaggggcagagatggagcagagcactgtcctggccccgtgctgtgacctgctaggtgtcttcagcagggtcctatttcacagctgttcacaacaggatccgctttttagctcctggttcaaccagggcttcagacacgctttggcatgaagtgctcttcctggtcaactaaaaatggtctgccctggaacccccatagctgtcacgttcctgcttcctccagcgtaaaatcagtacagttccaaaacagaggtggtgatttagtccatgcctttaactttacagaggagaaaaggaggccctgcatcacccgtccctggctgccagcccagtgcgtgtggctccatctccacccacggtggcaggaggggccttgggccaggcttctggtctctctatccaagttcaattctgggggatccaatctagtcctgtgacttaaaaaccttctagatccgtggttctaaactgggagcagtattggcccagggatatgtggcgatacctggagacattcttgattgtcacagcttggtggggggtaggtactactgataactagagagtggaggtcaaggatgctgcagaacgtcctgcaatgcacaggacagcccccaccctccctgcaaaagttatccaaacgtcagtatcaccagggttgaaaaaccccactctacatgctgatgcctcccctgtgtgtgtctccggctagtccagctatcaccaggcaacaggccacccacagtatagtagctcaagacaacagaatttgcaatttggacagggcttagcgaggaaggcttctctctgctccagaaggttggcagcctcagctggggattcatctgaaggctgcttgctcacgtgtctggctgtgaatgctacctctcagctgggcccccgcaagggtggttggcggcacactgcacccggcctctccgtgtggcttgggcttcctcacagcatggaggccaggtcccaagagcaagagccagagccagctgcaagctgtatcacctccttgcccttgtctcaaaggagccaacctgccacttgtgctgtactctattttcctgcctgcctgcctgtcttcctccctctctccttccttccctcataaatatttgataagttgcttgctatgtgcaggacagtcttccagtgctggagatacagaaatcaacagaagactaaaaaaaatggccaggcatggtggctcacacctgtaatcctagcactttaagaggccaaggccgtggggtcacttgtgcccaggagttcaagaccagcctgcgtaatatagtgagaccccatcttggaaaaaaaaaaaaaatcctgtcctactggagtttacgtgctacaaaggacatacactataaacaaacgtgaaatatatagggtgttaaatggagagaagtgcaaaagatttaaaatgtagccagacgggggtcgcatcagggttcgttttacacttggagcagggcggccatggaagacctcagtgataggggatgcaggaccagaggcctgcaatgagggcgtgtgccaggatgacacccagggaaaagtcaccccaggcagagggaccagcgagtccgaggaccctgaggtgacggtgcatgggcgtatttgaggaacatcagggatgccaccaggattgtgagagcctgagtgacgggtggggaagggaagggcccctgcctgtgtgtccttgtgcacctggggacccctcttttccattttaagtttgactttagaggagccaggcttggtagcgtgcaacagaattggttggtgcagcacgcagtggttgtgaagcagaggacacggtgaggagggagggagctgggctcccccgctcttcaccagccctggaacctcaggggagggtagtaggaggggagagggcatcctttccttgccacatcttaccgattggtgagttaaaaccatgctgggctctacgtctggtccccgaagacattgtctgtaaatccttgcctctccgggaggctgggtctgctctttccagtcaggccaaggtgacagccccgtgactgcttattgtgggaggtggccccagtgggttctgagaggtactggaacccccactccccgccaccccacccccatactgcagtgtctgtggggcatcccatctgatgtggctgccgtcctgtgcttggccctcaaaagaggtagacgaaatccccagccgtggcagggctcagtgaccagatctttgcaggagcaagagaacacgggacagccactgctcccctgggcctggtgtggtttcttcgctcttggaaagatccgctctcctcccgggcaggagttagggcactgaagacgtcagggctggcggatgacgtggtatttgaggaagcaggtcattgagccgaggcgggactcaggtggcgggggcgggtcacaggagagcacctcagtgacatcccgtgtctccccgtaggtggccttggagatgctctttactggtgagcccatttctgcccaggaggccctgctccacgggctgcttagcaaggtggtgccagaggcggagctgcaggaggagaccatgcggatcgctaggaagatcgcatcgctgagccgtccggtggtgtccctgggcaaagccaccttctacaagcagctgccccaggacctggggacggcttactacctcacctcccaggccatggtggacaacctggccctgcgggacgggcaggagggcatcacggccttcctccagaagagaaaacctgtctggtcacacgagccagtgtgagtggaggcagaggagtgaggcccacgggcagcgcccaggagcccaccttcccctctggcccagccaccactgcctctcagcttcaacaggtgacaggctgctttcgtgacttgatattggtgtcatagcatttggcctacattaaaagccacaatttcatggggaaaggacaaaatggagagtgactgaggtgctgacctcagtgcaaggctggtgaaccctgcagcgggccagctatggtgggaagcctggcatttggggtgctccttgcaacgtcttaagcaagcgaccccccgacatagcaaaaggtggcaacccatggaggcagaaagaaggacgccagcctgacccttatctgaaacgtcctaagcagagttaatcctggctgctcaggagaggcgacacatttcaaatctccacgagatattctccacacagaaaatcttcttgattctatagagacttaatcatgcctatggctttgaataatcttatgtgatttaaataaattaaatctttatagagactggtatgttttatctccccagctacactgcaagctgtctaagaaaagaaaaaaaaatcaattaactgtttttgtatgctcacgctgatggcatagagtaggtgcctcctatttctataacaaatgcccttgttatccacgtttttgtgaaacccggaccccaggctcaacctgaggatgaaaacactggggagaggaggtggggtgcacacatcctacgcattaagagcacctcctcccggctgggcgctggctcccgcctataatcccagcactctgggaggccgaggcaggtggattacctgaggtcaggagttcaagaccagcctgaccaacatggtgaaacccgtctctactaaaaatacaaaaattagccaggtgcagtggcgtgtgcctgtaatcccagctacttgggaggctgaggcaggagaatcgcttgaactcagaggcggaggttgcagtgagccgagatggtgccactgcactctagctctggggcaatagagcaagactccgcctcaattaaaaaaaaaaaaggaacacctcctccagacacacttccaaatgatgctcggcttccaggagagatcacagaccagaaccaggtgcagtgcatgagtttcccacctgagcaagggtttgactggggacctaagtctatgacctgctggcttcaggtcaaacgtggcccaagaaatgtcccaaatctcttgtcctcaagattgccgtaaggctgattgtttaaaaccagtttatttcacctgtgagtagaacgtggcctttcatgggatgagtaccacgctggggatgaagagctgtaaggctctagcctgtggttattcaaatggccggggcaagggtctcatggtatgggtgtccctgagttgttctcacaggtttctgttgagaaagacaatttgtttctttcctagattttagaaaacatagagtgtgctcttgaaaaaaaggagtttgttacaactccttacgcacagaaaattatgagagctgccacttcctggacaaacactgtgtgctgagcaccctctgtacattctaatttcatcctcatgccagcccagtggtgtaggtaccgcagcgacctccagctcatgggtgagtaggtgaggccagctttgtccaaggtcaaacagctgagattgtagagtgaggattgcagacaccatctgcctgataaagccacagataattgtccccctggccacactgccccgaagggggccactgggctggtgtgaggttaacctggggtcagcaagcctgaagaaatggccgtcctaccctgtgacagtttcccaagacaaaggaatggccccagcattgaaccccttgctaccgaacactgccagtgtgcaagggaagggacaccagctttgcttatccacagagcaccagtggagtttttactgccaagctcataaacaccgggctgaagcttctagatgagggcgtgatgcactggctgtcgtgggcagctcaagaatcctgcaggtccgtgggaccacctgctgtctcttccccttcagaggacctgctatggaagtcaccaccttgtggttgccagcccacaccatgtaggggagagtgtgatgtcaactctcagggccttggagaaagtaacaaacccttctcaaacacttgacaaaagaaaatcaaaagttgactttcccatttccttatgagcgctatgccctcaaaccatggcctccagtctggcttcccggccccaagctgatgcacactcaggggctagctatacattttaatggccgcctgtgcagaaagtaatccagaaagaaaatctgctccccaccctgcaatgtcatgtaatttatccccaggcaaatatcaattctgggtttatttgtatctctgcttccttcccccgggatagtgaatacaaattttcgataaccacacatgataattgctttcggaaagcctggaaggtttatctttccctctgtgctgtttacttcttggggtagctgagctgagctctgcccagtaggtcatactccatcaggttcaggggccatgcagtaacatgggtatccgtttctgtccgccctggctgagagatccttggagagctggcttgaccctggaaaacaaaaacaaatgaagtgaatgagagaacaccagctccctgactgattctacaccagtgactttaggtctgttacaatgcaaaagcacatggtgatttaggctgaaactgtgccaggcagccctaggaagtacgtcgtcgttgtcttctttttttttttttttttttttttttgagataggttcttgctctgtcacccaatttggagtgcaatgtcatgatcatagctcactgtaacccccacctcctaggctcaagtgatcctcccacttcaacctcccaagtagctgggactacaggtgcatgccaccatgcctggctaatgttttatctttagtaaagacgaggtctcactatgttgcccaggctggtctcaaactcctgaactcaagcgatcctcctgcctcagcctcccacggtgctgggattacaggtgtgagccactgtacccaccctagaatcagtttgttgatatccacacagtaacttgctgggattttgattgggattgcgttgaatctatagaccaagataccagcccaaggaggtgagtctgtgtccacatttttatgatcaaaaatgttagaaaggttgaaaaaaaaatagtacaactgtcaaccatagccaccatctagagtcaattaacatttaatatgtttccatatttgctttaatctgcgtgtgtgtgtgtaaatagtttttggctaaactattcaaacataagttgttgagatcttgatatcttagtcctcgatacttcagtatacatcttctaaaatataaggatgttctctcacacagctgtcatacttctgtctcaactaagaaaatttaaaacagttccttaatattaattatctagtccatgttcaaatttctccagttgttcctgaaagagactttatgctagatttttgaaccaagattcaatcaaggtccacacattgcatttggttgttaggtaccttttaaaaaatgttttagtgttaaaaaattcagaacagtccaattcacttttttaatgacattggctatttaaagtgaccaggccggttgtcttgtaaatgtacaagtttttggatttgcctatgtgtaacaataacacttcactattttccgtatgtatttatttttagaagtaaaccttgattagtttgtgccaaattcggtaattctattccctttcccagtggctagattaagaatgacccatgatataattccaaaaagatgactgggaggcttcttgaaaaaaagtactcccagcttgggcaacacagcaaaacctcatttctacaaaaacacacacaaaaaattagctgggtatggtagcgcacacctgtggtccctgctacctgggaggctgaggcaggaggatcacttgagatgaaggctgcagtgagcaaagattgcaccactgcactccagcctgggcaacagagcaacaccccatcttgaaaaaaagcactcaaggaagttcaattcattattactgtgtaaccatattaccacaaacttaacagcttaaaataacccgttttttggtttttggtttgtttttttgagacggagtctcgctctgtcacccaggctgaagtgcaatggcacaatcttggctcactgcaagctccgcctcccgggttcaagcgattctcctgcctcagcctcctgagtagctgggactacaggcgcgtgccaccaagcctggctaattttttgtatttttagtagagtcagggtttcaccgtgttagccaggatggtcttgatctcctgacctcattatctgccggcctcggcctctcaaagtgctgggattacaggcatgagccaccgcgcccggccccaccagttttttaatcttacaatttctgggggtcaggagtccagggacagcttagctggatcctctgcttcagggtctcagaaagatggaatcccagggtcagccaatgccgcagtctcatccaaggcttgactggagaagggttcacttccagtctcacatggcagttccttgcaggctgccagactgagggcctcagtgtcacactggctgctgagcagaagccacactcagttctctaacatgtggctttctccatgtggcagctcacaacatggaagctgcttcaccaaagccagcaagggagagagagggtctcctagtgacgtggctgttacaattgtatgtaacgtgagcacatgtgtgtaatcacagagagcccatcacctttgccatattccattggtgagaagcaagtcacaggttccatatcacaacaagggatgatgccaacagctggggctcatgaaggccaccctagatgctgtcctctgtagagtaatggcttctctctggagttgtggctgcagacacctgtactcaaaagaagacaaggcagagggcaaaagccttcccaatgaaggtggcagagtggaaagatggaaaaaagccaagactttgataatgtgactgaaccactgtatctttggactcctaattacgtgaaataatccttatggcataagccattttgaagggcattttctgtattttcaacctaaagcattctctatcgtagacgcttttggtggaggtgataaaatcataaataactaatgaacccaaggtagaatgtcctcagatgcaaagaggtacacggtgctgtctgagtccagacaaggaggagtttccttccagctggagagccagaagaaacttcatgaagggcattttgaagaataggtaagtctgggccaggcgcgatggctcatgcctgtaatcccagcactttgggaggccgaggtgggtggatcacctgaggtcaggagttcaagaccagcctggccaacatggtgaaaccccgtctctacttaaaatacaaaaaattagctgggcatggtggtacgcacctgtaatcccagctacttgggaggctgaggcaggagaatcacttgaacccaggaagcgggggtcgcagtgagccgagatcgcaccattgcactccaggctggcggacaagagcaagacctcgtctcaaaagaaaaaaaagaataggtaagtctggaccaggggagatgtgagaggacattccaaggggagaaggccgtgaaagaggtgagaagaggttgctggagtgttcgatacgtgatgggcagtgagagaaaattacgctggggccagatttccaaggcaaaagccagggagttgaagccatctgctaggtagtagggagctgcctgagatttttgattgacagttgtgatcaaaagagggggaatcccaatgtttgagaggaggactacttttcctcaacccaacagacaggaggcttatggcttcatcattttgcagtaaaaagtgtctgaggtgaggagttggagaccagcctagccaacatagtgaaatcccatctctactaaaaatacaaaaaagtagccgggcatggtggtagctggactacagtcccagctacttgggaggctgaggcagaagaatcgcttaaacccaggagacagaggttgcagtgagccgagactgtgccactgtactccagcctaggcaacagagcgagactccatatcaaatatatatatatatatatcttaaatatatatatacacatatatcttaaatatatgtatatacatatatcttaaatatatatatatacatatatatatatttgataatctgaatgaaacagatgctttcctgggagaataaattctaattttggttggtacaagaattagaaaatataaatagaccaatatcacagaagaaaagtgtgtcacagtgatgcaaaacacatgaggcctcgcttgtcttaacagtaaattctagaaaacctttatggaaacaaacaggcaagagcacatgatgaactagaatctcatgtgaagacagatgcaaggtttgccttatgaatgaaaggattgtttataaaatcgggtcatgtaatttactgcaatatgttggtattctctctgggtaagagagtggggatatgagtggagaaaagggttttcactattatcatttgggtgataggattactctgggtgaaggaattactggtgcttttttttttttccaaaataatagcttcattgagatataattcaaataccatacaatgtaccctcttaaagtatacaattcagtggtttttagtttatttgtggagctatgtgatttaccacaatcaattttagaacattacggccgggcgcagtgactcatgcctataatcctagcacttcgggaggccgaggcaggcagaacaactgaggtcaggagttcaagaccagcctggccaacatagtgaaaccccatctctactaaaaatacaaaaattagccaggcatggtggcgtgtgcctgtaatcccagctacttgggaggctgaggcgagagaattacttgcacccaggaggcagaggttgcagtgagctgaaattgcaccactgcactccagcctgggcgacggagggagactctgtctcaaaaaaaaaaaaaaaaatagaacattttcatcacccccaaatgaaactctgtacccatgagcagttgctccccatttcctcccaagccgcccagccccaggcaactactcatctactcctcgtctctataaatttacctcttctggacatttcacataaacaggatcatgccgtacacgtccttgagtgtctggcttctttcacttggcataatgttcaagattcatccatgttggagcatgtatccacacttcattcctttttattgccaaatcctatttgattatatggctattccagatttcattagtaattggttgatggacatttgggttgtttccatgttttgggtcctatgagtaaaatgctgctgcgaactctcgttcatgggtttccgtgtggatgttagttctgctttctcttgggtaaacgcctaggagaggattcactatcatgggtgactctacgtttaacattttgaagaaatgccagactatcttccaaagtgactgcactggtgcttttaattttctttatatgctcaaatgtttacatttttctcaaattaaatagttaccatttctacacccaggctggttttttttgtttttgttttgtttttgtttttgtttttttgagacagagtctggctctgtcgcccaggctggagtgcagtggcgcgatctcggctcactgcaagctccgcctcccaggttcacgccattctcctgcctcagcctccggaatagctgggactacaggcgcccgccaccacgcccggctaattttttgtatttttagtagagatgggatttcaccgtgttagccaggatggtctcgatctcctgacctcatgatctgcctgcctcagcctcccaaagtgctgggattacaggtgtgagctactgcacctggccacccagactgttttttacagtattttttggtggtataaaagctccagaatgctcagggaaggtaaagaccaagaggaattgtggacaaattaaatagttaacaaccaaaagccaacaatttgcagattgaagctgaaaaatgggtagcatcggataatatacccacatctctcaggccagtgtttcccagcctggggtcccaattctgaggcacacaacaaccttaggtggcacagaggagaatctttttataaaatattttctaattattctaacacaatcagaaaaatcaactaacatgtcaaactcatgattatacagctctaatttcttgcaaatgaggcttttgtaagtgggtcaatttaaggaaaaaatattataaataaaaatgtaagcattacacagatatgaccaaaatatcatgaaggtggcatgcaaagacctgaagtttgagaaacactgtccctgggatagtattttaataaaggattcttgaatccccagtagctgggactacaggcatgcaccatcacaccctgctgatttttttaatttttagtagagatggggttttgccatgttgccctcaaactcctgacctcaagtgatccacctgccttggcctcccaaagtgctgaggttccaggtgtgagccactgtgcccagccagctcaccaagtctttaaggcccaagggatggacagttgcctgggtctttgtgccccccaccacagccctcaccccacagggaccctcactcccctcctcctgctgacaccagtggggacctgtccttcacgggctattatgttcccatgaaagcaaatttaacttcctttatgttggttacatggattttttttttccggtctgtttccaaaagaaacagtcctgagatgatttttcaaatgtaaaatcacatatttattgagtgtctactacattgcaaagcaatgtgctgggcactatgggatggtttttttgttttgctttgttttttaagtataaggcaattccaaccctccagaacatagttgagtaggcgagataaatcatgcccactttcaaattcaaaacagttgtcctgagatgagagacaggattgccctcgaagcctgtgctgaggaccagctgtgtgatgcggggtgagtcgtctcagcctcttcacagttgcactctggatgatgataatgcctccctcctaagcgggtgtgagggctaaatgagacaagatggagtgatgtgtgtagcagatgttggtgacctgctgagagccccttggccgcgtccaagttcacctgcagcttccacaggtggcagctcttcctcctctgagcttccgtctttctgcctctggaaggtgttttatgttcctggcagggcttgctcagaccaggcccacccagaggagggaggaggtgaggcctccaggtgcatcctcgggcagcagaagacagagtccatgggtggcgccccgcctccagtgcgctgagggagcaacgctgaggtgttgcttgtgttttctcagaagatccccagcaggaccgagcctcatcgcccacagccatgacctgctggtgtatgcaggcttgattggctttcctccttcccttccttcccccgtcccactttccaaattaaccaccttcccaccagtcctccatccaatgtctgctgttcagggaacccaaactaattggagacgctggttcgcatttggcactcagtagacatcccctccctcagcaaagaagtgaaacaactttagctgcagaagatgctcccatgaagtgatgggattggttgctaaatgaagagcacaggccgtaagtatggcagaaatcaagagggaaaaaatccattttggctcattagcaagcaaatggcaccatccatagaaagctttgacttttcaagctgttggggatctcagctctcagttaacttacaaattgagacactgcacagtggaaaacgactagaaagacctagactcagccagtcctggtaccaagcacaggctgccctgaccaaaggctggagtggcctctgttgacatcccccgacaactacctgtgtgagctgccccgtatgtgttctaggatttctggaattgcatttagcagcattcagggaacaggcagagcaggtgcattttccaaaaactcccctccagaggcgcctggagaagggatttatgagccgctgcatctccggttccttctttggcatttattagctttttgatgaatgttagagcaattcttctgtcaacagcttctcattaggggcctggtgatgttctttctgaccattattttactcaatatcatgcctggtcaccatgaggagaagaggttccacttagaaaccatccatcttcacaacagcaaaggcccagataatcccactccaatactcctgctccgacagctgcccc

SEQ ID NO: 611 - DNA, 1641 bp, Homo sapiens
ggggcggggcgtagtacggactgggcctggcctggggcgtccccgcgaagcctgggcctgtcaggcggttccgtccgggtctcggccaccgtcgagttccgtcgagttccgtcccggccctgctcacagcagcgccctcggagcgcccagcacctgcggccggccaggcagcgcgatcctgcggcgtctggccatcccgaatgctatggccgccgtcgccgtcttgcgggccttcggggcaagtgggcccatgtgtctccggcgcggcccctgggcccagctccccgcccgcttctgcagccgggacccggccggggcggggcggcgggagtcggagccgcggcccaccagcgcgcggcagctggacggcataaggaacatcgtcttgagcaatcccaagaagaggaacacgttgtcacttgcaatgctgaaatctctccaaagtgacattcttcatgacgctgacagcaacgatctgaaagtcattatcatctcggctgaggggcctgtgttttcttctgggcatgacttaaaggagctgacagaggagcaaggccgtgattaccatgccgaagtatttcagacctgttccaaggtcatgatgcacatccggaaccaccccgtccccgtcattgccatggtcaatggcctggccacggctgccggctgtcaactggttgccagctgcgacattgccgtggcgagcgacaagtcctcttttgccactcctggggtgaacgtcgggctcttctgttctacccctggggttgccttggcaagagcagtgcctagaaaggtggccttggagatgctctttactggtgagcccatttctgcccaggaggccctgctccacgggctgcttagcaaggtggtgccagaggcggagctgcaggaggagaccatgcggatcgctaggaagatcgcatcgctgagccgtccggtggtgtccctgggcaaagccaccttctacaagcagctgccccaggacctggggacggcttactacctcacctcccaggccatggtggacaacctggccctgcgggacgggcaggagggcatcacggccttcctccagaagagaaaacctgtctggtcacacgagccagtgtgagtggaggcagaggagtgaggcccacgggcagcgcccaggagcccaccttcccctctggcccagccaccactgcctctcagcttcaacaggtgacaggctgctttcgtgacttgatattggtgtcatagcatttggcctacattaaaagccacaatttcatggggaaaggacaaaatggagagtgactgaggtgctgacctcagtgcaaggctggtgaaccctgcagcgggccagctatggtgggaagcctggcatttggggtgctccttgcaacgtcttaagcaagcgaccccccgacatagcaaaaggtggcaacccatggaggcagaaagaaggacgccagcctgacccttatctgaaacgtcctaagcagagttaatcctggctgctcaggagaggcgacacatttcaaatctccacgagatattctccacacagaaaatcttcttgattctatagagacttaatcatgcctatggctttgaataatcttatgtgatttaaataaattaaatctttataga

SEQ ID NO: 612 - protein, 299 aa, Homo sapiens
MAAVAVLRAFGASGPMCLRRGPWAQLPARFCSRDPAGAGRRESEPRPTSARQLDGIRNIVLSNPKKRNTLSLAMLKSLQSDILHDADSNDLKVIIISAEGPVFSSGHDLKELTEEQGRDYHAEVFQTCSKVMMHIRNHPVPVIAMVNGLATAAGCQLVASCDIAVASDKSSFATPGVNVGLFCSTPGVARAVPRKVEMLFTGEPISAQEALLHGLLSKVVPEAELQEETMRIARKIASLSRPVVSLGKATFYKQLPQDLGTAYYLTSQAMVDNLALRDGQEGITAFLQKRKPVWSHEPV

SEQ ID NO: 613 - DNA, 1795 bp, Homo sapiens
ggggcgtagtacggactgggcctggcctggggcgtccccgcgaagcctgggcctgtcaggcggttccgtccgggtctcggccaccgtcgagttccgtcgagttccgtcccggccctgctcacagcagcgccctcggagcgcccagcacctgcggccggccaggcagcgcgatcctgcggcgtctggccatcccgaatgctatggccgccgtcgccgtcttgcgggccttcggggcaagtgggcccatgtgtctccggcgcggcccctgggcccagctccccgcccgcttctgcagccgggacccggccggggcggggcggcgggagtcggagccgcggcccaccagcgcgcggcagctggacggcataaggtcagccccgggccgcgcgggctcctcgcgttggtgccgagtcggggtcagggcgccgccattgacccggggaggacccggggaaccggagccccgtttacgcccctggggagggaactccccgtgtcccggacccgggcctggcagcgagacgcgcaggaacatcgtcttgagcaatcccaagaagaggaacacgttgtcacttgcaatgctgaaatctctccaaagtgacattcttcatgacgctgacagcaacgatctgaaagtcattatcatctcggctgaggggcctgtgttttcttctgggcatgacttaaaggagctgacagaggagcaaggccgtgattaccatgccgaagtatttcagacctgttccaaggtcatgatgcacatccggaaccaccccgtccccgtcattgccatggtcaatggcctggccacggctgccggctgtcaactggttgccagctgcgacattgccgtggcgagcgacaagtcctcttttgccactcctggggtgaacgtcgggctcttctgttctacccctggggttgccttggcaagagcagtgcctagaaaggtggccttggagatgctctttactggtgagcccatttctgcccaggaggccctgctccacgggctgcttagcaaggtggtgccagaggcggagctgcaggaggagaccatgcggatcgctaggaagatcgcatcgctgagccgtccggtggtgtccctgggcaaagccaccttctacaagcagctgccccaggacctggggacggcttactacctcacctcccaggccatggtggacaacctggccctgcgggacgggcaggagggcatcacggccttcctccagaagagaaaacctgtctggtcacacgagccagtgtgagtggaggcagaggagtgaggcccacgggcagcgcccaggagcccaccttcccctctggcccagccaccactgcctctcagcttcaacaggtgacaggctgctttcgtgacttgatattggtgtcatagcatttggcctacattaaaagccacaatttcatggggaaaggacaaaatggagagtgactgaggtgctgacctcagtgcaaggctggtgaaccctgcagcgggccagctatggtgggaagcctggcatttggggtgctccttgcaacgtcttaagcaagcgaccccccgacatagcaaaaggtggcaacccatggaggcagaaagaaggacgccagcctgacccttatctgaaacgtcctaagcagagttaatcctggctgctcaggagaggcgacacatttcaaatctccacgagatattctccacacagaaaatcttcttgattctatagagacttaatcatgcctatggctttgaataatcttatgtgatttaaataaattaaatctttataga

SEQ ID NO: 614 - protein, 352 aa, Homo sapiens
MAAVAVLRAFGASGPMCLRRGPWAQLPARFCSRDPAGAGRRESEPRPTSARQLDGIRSAPGRAGSSRWCRVGVRAPPLTRGGPGEPEPRLRPWGGNSPCPGPGPGSETRRNIVLSNPKKRNTLSLAMLKSLQSDILHDADSNDLKVIIISAEGPVFSSGHDLKELTEEQGRDYHAEVFQTCSKVMMHIRNHPVPVIAMVNGLATAAGCQLVASCDIAVASDKSSFATPGVNVGLFCSTPGVARAVPRKVEMLFTGEPISAQEALLHGLLSKVVPEAELQEETMRIARKIASLSRPVVSLGKATFYKQLPQDLGTAYYLTSQAMVDNLALRDGQEGITAFLQKRKPVWSHEPV

SEQ ID NO: 615 - DNA, 50253 bp, Mus musculus
  misc_feature (1)...(50253): n = A,T,C or G
aaacccctgtagagttggaataaccatcccaaagccatggagatttacaccaagcttcacaccttcactctggaatcattgcatgaacttatccaataccaaaacatcaccaataaaatctatggcagaattatcccaggaaaaataattagctttacatccgttttcaaaactcacttctgttgcctgtagtcagttcttctgccctaatatttagcctttcttgttcaaggatttgttttactgagatttttttttttgtctcctttctttatacccacaatttttatttctcaaatcttcttatagagcagatgataaataaacacattttgaattctcctgacctctttgtaaaacataaaatccttcactaagtgaatgcaaactttttttttcttcttttcaatttttttcccattttttattaggtgtttagctcatttacatttccaatgctataccaaaagtccccataccccccccccacccacccactcccctacccacccactcccctttttggccctggcattcccctgtactggggcatataaagtttgcaagtccaatgggcctctctttgcagtgatggccgactaggccatcttttttttttttttatatatatatataataaaggagatgtttattggttttgtcattaccaaggaggcatctcaaagatgaggaaaagggacttcagggtggatatatttcaaccaaaatgccagaaaatatcaacaaaacagaaattaatttgaaaacttgatttttttaactaactagttccttttatttttgcattgtcaaaagattgtcaatgcatgttctaaatatatgaatactttcattttcttagtataatcctaaaatcttggagcccatgcagtgcagtgcgctgctagtactaggccatcttttgatacatatgcagctagagacaagagctccggggtactgcttagttcatattgttgttcaacctatagggttgcagttccctttagttccttgggtgctttctctagttcctccattgggggccctgtggtccattcaatagctgactgtgagcatccacttctgtgtttgctaggccctgggatagtctcacaagagacagctatatctgggtcctttcagcaaaatcttgctattgtatgcaatggtgtcagcatttggaagctgatcatgttctttctaacaactggaattacagatgtgtgcttgcagctggatttgttttcgaacctagagtctgtatgcagttcagcttggccttgaactcattattctcctgtctcagcttcctgagtgctgggatcacagacattcaccatcatgcccatgtatcattcttgttattttgcagcagggtctcctgtatcccaggctagtttcaaacttattgtgtagcaaggatggctttggactcagaatctttctttcctcccctcccagtgctgagattacaagtaggcacacgagatctgcttggtattgtgctgggaattgaaccaaggacttcgtgcatgctagatcagcactctaccaactgaaccacactctaacctccattgcccatgcccactttgtgagccatcatgttccagtatgcatcacctgcagctgtttcttttttaaagcttgctcttagaggtgaagactatatagacacttgattgtctccaaagatctaccttaaacttaggctcaaccatcaccacccctcccacctcaaagactacccagcctctgctctaccccagtgttgtgtgtcaaaacctttcctgtggagatacaacacatacatctactcaccccagatagggaacatccccacgacaaagcaaagtacggacgctacttaccgaagtccaacttggtaaaccaatgagttctattggggttacttccaggaatatgacagaagggttacttacaggaaaagaaacaactcaaagacagctgcatcatcaaagcctgtcccagcttgggtgacaactcacaaaactgggaacctggagcacactgtgcacagcctgcaggcagctcaactggctggagagcatcctttccagatacctcagttgacctaaatctcttgcaggaagttctgctggtttctgcttcttccaggcagctagtctggttccggagtcatctttggccatgtttctcctctcagagtcttttctgcagctcagtctgactgtctgggggtcttctttgcagctagactcagcttactgcgagtaagggttctaggtgggtgatgggggtagcgctaggaatctgattcatttcagggagttcttgaagagttctccctgcttaaggagctcccctgaaggattgaaggttttaatttttttaagaagagattgatttattttatttatatgagtacgtcgtagctgtcttcagacataccagaagagggcgtcagatcccattacagatggttgtgagccacaatgtggttgctgggaattgaactctggatctctggaagagtagacagtgctcttaactgctgagacatctctccagcccccgaaggttttagtcttgtcggaaactgttacacaacacctggttttctcggacatcaatgcaaatttcatccatatatgtacatacatgtcatatgcaaaaagcaacgctgaggtcaacacatgcgatcactaccccatgagttctgtgtttgtgtgtttgtttgtttgaggcaggatctatgtagcccaggctgaataaccttgaactcctgatgctcctgtgtttgctctggagtgccnnnnnnnnnnnnnnnnnnnnnnnnnnnnnnccccctccacccccacccagcaccatggagttctctattgccaccctgtcaagtccagcctctcgtcatcaggatctacactagctaagcgacaaactgagttatcactcatttataaacattaaaaaaatttcagctattagtgaggcatggcagtgcatgcctttgatcccagcactcaggaggcagaggtaggcagggctccaggacagcctggtctgcacagtgaatcccggacggctgggcctacacagtgagaccctgtcaaaacaaagaacaaacaaacaaacaaaaacaaaacaaacatcaacaacaaagcactaaaactatatctctttgttttgaaataactataaactaactcagaacagtttgcaaaatagtacatggaataccatgacctttttgctcaacttcctctaatgttgacatcttagaataaaatatcaaaatgaaaactagttgggaattatagaatattgtgctttggagaagcatgagtattctgagtcatatgtgtgtgtatatatatatatgtattgtcatgtattataacacttttttgtttgtttgtttttaaagacagggtttccccatgtagtcttggctgtcatggaactcactttgtagaccaggctggcctcaaactcagagatcagcctgcctttgcctcccaagtgctgagccaacctctgttagaacaatttctctgtgtctcgatggggttaagagcctgacagaggatcttaaaaccttctcagtgtaatgtgacatgtaatgctgcacataagacaccaacagaaagcttttgtcccaaggaactgagcagaatgtcatttgtaaacaagacaaggcttgcctagcatggtaggacatgcctgtattcccaacaattcaggagactgaggcagggtcttgaattcagtgccagtccggtttgcatctcatgagctaatttcaaaatataaaccaatacccagggcctggggttgtaactcagttggcagagtgtttatttcttgtgtctcaagtcttgggttcagtccccagcaccacataagctagacatgaaggcacacgagcccgtaatcctcgaacttaggaggtagaggcagtagaaccaggagttctgtgtcaggactggagagaaggctcagtggttaagagcactggctgctcttcctgaggacctgagttcaaatcctggtatctccacctgtgaataaaagccatctctaactccaggtctggaggatttgcacacagagggtgcacataaaagtgttttttttttttctttattgagagagagagagagagagagagagagtgttagagttcagtgtcatcttcagggactatggaaagttccaggccaacgctatctatatgacgccttctctaaaaacaccaattaagtaaatgaataacagtctagccgagagtggcatgaggaagattaaccctgtcacccagcacttggggagccaaaacgggagaactgagagtcacatgctcgcttaggccacagagtgagatgtgctctcacaaaaatcaaaaaatttaggctggagtgttggctcaagagcacttgctcaggctggaaaggtggctcagtggctaagagcactgactgctcttctaaaggtcctaagttcaaatcccagcaaccacatggtggctcacaactatccagaatgagatctgatgccctattctggtgtgtctgaagatagctacagtgtacttacatataataataaatatatttttttaaaagagcacttgttcttgcaggggtcctgggttcaatttctagaacccacagggtggctcaccaccctgtgtatattatatattcctttaatatttatttatttttaaaaagatttatttatttattttatgtatatgagcacactgtagctacttccagacacaccagaagtgggcattggatcccattacagatggttatgagccaccatgtggttgatgggaattgaactcaggacctctggagttaactgctgagccatctctccatcccagtcctttaatatttaaaccatatattttatatttttaccttttcagcttgttatgcttgtttaaaatgctcttcctgagacttaaccagagaacaaagcctatgatgggtgtttcagagacttcctttgtcaatgtaattaatctgagtctctttaccttagtctcaggcagattcttcaggcaagggcaaaaagtagccacattcttcaccaaaataccacaaaaatcatctctaggtcacatattgaaattctctactgaaacctcttgtattagatcctcgctattcaaatcactctcagtaataaagtcgtccgtattcctactaagatagcccattaagccccatttaaagctttcccctgctttccaaatccaaagtccccaaatccacattcttccaagcaaatgcagggtcaggcctatcacagcaattccttagtccctggtaccaacttctgtcttagttagggtttcactgctgtgaacagacaccttgaccaaggcaaatcttataaaggagaagatttaattggggttggcttacaggttcagaggttccattcgttatcatgaagactccgggatcattgcaacatccaggcaggcatggtgcaggaggagctgagagttctacatcttcatctgaaggctgctagcattagactggtgcttccaggcagctaggatgagggtcttaatcccatacccacagtgacacacctactccaacaaggccacaccttctaatagtgccactccctggaccaagcatatacaaaccatcatatagcagtagccctggctttcttagaactggctatatggactaagctggccttgaactcagagatccacttgcctctacctcccaagtgctactagcgaagctttctgatcctcttagtccctgcctttttgtggtctagcctacagtagtggtcctgcatgactggcaacttcaaattttttttttttttttttcgagacagggtttctctgtatagccctggctgtcctggaactcactttgtagaccaggttggcctcgaactcagaaatccgcctgcctctgcctcccgagtgctgggattaaaggtgtgcgccaccacgcccggctaacttcgaaatttttaaaaaatatatacatacaatctatgagctggttttgggaacctccaatgtcatctgggcagctaccctcaaatctctatttccattcttaaagaagtcatattttgtgactaaaagccatcttgggatgatgataaaggtttgtttattatttggagccttgcttcactctctcatacatgggctctttcaagagagcaactactgacactgggtctaattagcaacgtgagactgctcacagcttgccacagcttgtcccccccccgccccccagctttccctggggaggaggcacaggcaccaaggaggtttaaatgtttaagtctaaggagctggtgtaagagtaaggcaacggagtcacgtgctgctgctgttgataaccacatcttggcgactctgggaaggacttggtgacactggccagagaatagaaacaaaggttgtggtgagaaaaacacttccatgtcctttttgctaaggttagacctggctcactgaattcacacatagagcactccagcgtgtgttaggtgggacatttcacccggggcagcttaactgtgtcaggtgaagctgagtaacagtccggtcttcctttgcttagggttcttctcagcgctcttgtgggtgtgggtgtgggtgtgggtgtgtaatatgaccacctgggagggacagcgttctgctgcttgtgtcaagtatgtgannnnnnnnnnnnnnnnnnnnacacacacatgcacatacacacacatacacacacacacacacatacacacacacacgcacgcacatacacacacatacacacacatgcacatacacacgcacacacacatacgcacatacatacacacacgtacatacacacacacatgcacataaacacgcgcacacacacacacacacacacacacacggctgggaatgtccctcagttggtagaatacttgcctagtatgcatggaacttcaggttcagtcctcagcatcatataaaccaggcgtgagggctcatgcttatgatctcttgatggtatgggttacatgagaccctgtttctaaaacaaaacaattcaccccgcacaaaccttcttcctaactgccttccttcctccttggtctttgactcgattccttgacctttctaatctccaatcttcccttcgctccttcctgtagacaaggggtagagggctgtggaatgtggactagaatgcacagtactttcttttggctttagcagggtctagattgtgactcaatctaaaggaagttgtcaatcagtcctagtgattggagtcacctggctataagtcacccgacttaaagaatgttcacattcttggctgtgtcttctaaagagctgagttcataatatccacctgggaacctgggagttagtgaagccctaggggactgcgtttgaggtaaagataagggtgtattaacagaactaagggaggaattggaaggatgtctaaacagcaaagctgaggaggaaacctttgaatgtaggtgtagcaaggttggtcctaaggaggatcatgttggagcagttttgccttccacaaacacagcttttacctgtggttgcaagccgacagcttcagaggaccaacaaacaagtgtgaattcagctgtgtgcctcacattccaccctttcctagatatctggagccctaggcagggtaaaggtgatttccctttacctacctggtagcagaagtgactggagaacttagtgtttgttctgggtacccactacattgttgactccaggaaaggaaaactgccccatctgagaatgcttagctgccacctgacttgaggactgaccttaaatcgagagatttaaacatgataaaagagaaataaaagatcgttctccactggtaccattcccaccacgttctccctggcggttcccagcaatctgttcctaagctttgacatctggccatttgcctggcttgtaggtgtgtgcaaactcaagcgggcacctgggaacatggcacaggcctgtaataccaggctgagaaaggagcaagcttgaggccggcctgggctgcataggaaaactgtctcaaacaaagcaaaacaaacagaaaacctagtggaaactttacaagcgtccaggtgcactatggttattgggagtcgggagtgggggagtctcctggcagggatgcactctcacccccatcccttccccctccccctcagcttgcaaataccagtaagggaacccttctggagactactagatgttttccttgtcgagtcagtccattctaatttcaggagtggagcgagattctcccttgggctttctagggtgtcacctctggcatttgctctcactgaagaaaaacaagtttaaatgtaatgcaccgggtttctttctgaacagctgcctgagcacagaaatcggaaggtcagcaaagctgtcctggggttggggacaggtattgaggagggtggtaccggagagcagggtgcaggaatggcggttagagctgggaggttcccaagggctactcgccaggtgagctccaggtctcctaagctcgccaggctgccggagaaggcaaggcggaggccccaggcggggcgggctgggttgggaacagagcagctgcgcccgccgccggggggccggcgccctcccagcagagcatgcaggacgtgcgcgacgtgtggcagcctctgcgcagacttttccactgcagtgtggggttccgcgagcgcctccaatcacagctcagcttcaccgcgacgtgtgcagcttgcgctaagcaaggcagatcttctgagcggaggcttccttcgctaaaatcacatttaaagtgtcttgtctccacggcctcccgtgcagcggtcctcaccgaaagatcccttagatcgtcgctgaataaatgaactctggcggttcaacgattgcctgttatgcatgtatctccagcctatgcaaagtgcaaaaatcggaaaggaagcgagggcatgttcacatcaaacaaaatatagccggtgtgctagagcgggcgcgtgggggttgggtgggtgacatgaatttaggatctagctgtcccttgatagttactttggggctcatagtccggtaatgggagagggaatggggtctacttttaatcactacttgcagaaggggtatggaatatggcccatgttgaaagggaaaataataccaaccgccccccgcatcccaaagttccttttcggtcgaaccttccttccttccttatttatttattgccccccttcaagcgccaggcacggtagcactgagtgaggggtagcaacactacccaagcatgtttcccggggattcaggaaaagtatgcgcccgtgcccggaggtggcagtgtcagcaatggcaggggacatagtgggcgataatgcacaggtgttaccaggaggcagctctgacctgcgtcttcacttggactgagccagtccccaaatcatgtaactatggtgcatggtgttggggctcccacggcttgtaaggctgaactgggaagatgcttttacatagctctagctctgtgtgtgtgtgtgtgtgtgtgtgtgtgtgtgtaggggtggaggactgtcaacgaaccacattggacattatcagatcgctgctgccttccaagcacagatgaggaaagtggctggaattatttggggactccgttcctgtcttgcgcccttagggaataaacttagggacggaaaggaggacgaaagaaccagcctgggttgcaggaacagagcgtgctgctctcgtccacccgcagggggcggcagcaggctgtctcttggccttgcccacccttctctccacgtgaaagggggctgggacgcaaagaatgcggcccgccccgaggctgacgcgccgcgctaccggtcagatcttaaaaggccgggcagtgcgtgtggcatcccgacagaactggagaggagcaagtggcagtgctgggtgttgggaccgtggctgtcactgcgctggagcatccctgagcttttgaacagagccgactagtcagcagtgcagcagccgcaactccacgccgctctcatctgtctcgtgtctccgctcaggcgatccttcctccgagactccgcacaaagcacattttccaaagcagtgcaagggagcgcccagccgcgtgcaggcggacgcacccttcctgtcctttgttccggggggatctgctgctgctcttctccccaagtcggagtctttcctccaggggtggcgggtcgccgaatacagctacgaagatgccgttggaactgacccagagccgggtacagaagatctgggtgcccgtcgatcaccgaccctcgttgcccagatgtgagtgcaggcagccacgtggggggctaggttgtagattgcgccgcgtgcagagcccggccattgtgtgtgcagcggctttgtgccggttcccctctgcgggaagcgcactcgtgccggtcggcccggcccggcgaaggcgggggtggcggccggctgcgtctcccaggctgggcagaaggggcgctgtggctccggaaacctcctgtgtgcccggcccggcctgggctctctgggccagcgcctcccagaggctggagagacctggctgctccggagtcaccctggccgactgcagcaggggcgcggccgcccacaccaacgcccccttttctttgggtctcctctggttcacggtcttttttcttcctcggatctttgcacctctgtatatttccatcttcgccgtcactcccgtgactgcagatccttggttgcagggatggtttatgggttggtgactagtgttgtattacagacgcactcgtttacccggagcacggaatttgctggcagtttctcttagtgcctcacctgttgctgctgtgaacgatttgggaaggtttcattcacttccatccctagataggaagaggtgcctctgggaagagcggatggaattgctctaaggcaatgcttccctcccaggcagcaggcccaggagcccacgggggtaaacaggagcgagctgcccagtggacacgttgctcacatcacgtttgtagtttgagaatctactggcaaaactgggaggtggtttcctgtcaccctgggacactggaacaccaggctgcagggtaggtttctctgctgtcacgtttctcaggatggccatcacaggacatgacagctctcggagctttgtgggtctgagtcacttactggtttccctgcctccctgtggtgcagtatgagacctctagcaggtcttccctgctggacctgtgggcttcggtggaactctgtccccaagacagtctccttttcttttgctcaagtaagtcagaggtaagggcttggcaagggttcttccccaaaccctgtcagacacgtttatgcaccggggccacctttatgaaaatgccccagggtaaaaccaagcctgtgggacacctataatctcattacactgtagctgggaaactaaggtcaaagaatcatgaacctggactacacagtgagaccctgtcaataaataataataataataataataataataataataataataataaaaacagggaaagttggtaagttggtcaaatttagacagcatgctgcttctggactttttagtcaggcagattatagcgttttctattttttaaactgaaattggtcaaacaatagggcctggttttctatgtatgtgtacagccatgtgattgcagaatacattcttcccttgtttgggtctgagagaaccatggcagcttttgcaagaacccaagttcagtgacactggctcagtgaaagacatcaccgtgcagcggggcctcccccaggctgcagaccctgatcgctagattccacgagcttgcacgtctgtcggagctcagagatttgcacagaattgctgttggaaccatgtagagttgaaagcggatgtgcctaaagctgacagattaagatgaccagctcgctcacttctggaattcttgtgtgtgagactggtgtgtatgtgaaagaatgtgtagtcagacacattnnnnnnnnnnnnnnnnnnnnagcatatccgtattttaaatgtttttccccccctatactaaatttggttttactgcaatagagaaaataggtttttttttttgttttgttttgtttttttaaataagttacttcttttctactgacactgggaatcttgtggacagactgactgtctttccttccttcctttctatttttctttcttctttctgagataaggtctccagtgaccctggctggcctggcttcaacttaaatgggattaagagtgtgtgctaccacacccagcctattgtagattttcactcacctaaatacttttttttttttttttttttaactgtttttcagagctgaattgacttaaacgttctatgatgtctagatgacagtgaacttgtggtcctcctgccttctctccccaaacactgggattatgagcattcacctacttgtctggattacctggtgatggacattgaacccagagctttatgaatgctgggcaagaatgctcccagctactgctgctgcagtcccagccctgtggtctccacatcagaggctgacagccagctccacggtggcttagtactagagggcatagagaagattgtccagataaaactaaagaaacagtcataaacaacgaacaaatcccaaaggccaggaatagtggtgcacatagtggtgagggccgggcaggtagatctctgagtcctaggctagcctggcctccatagcccaaggatatcctggcctctatagcctgtcttgaaattaaaaaacaaaaggactgcaggatgatatgtttgtctgaggagtgcagaaattgagtgtcaagtttctttaccgacattgtgataaatgtttcttccaaaactggaagtgcccatcagtttaagccacaatttagagagacattactgtatttgcaaatgagcttaactcaaactggctttcctgttgcctgcactgaaaatctatagcctgagacttagttgggagttgtcacagtttcctcagagttccaagggatagtctgactgcccggtgcagagttgccttaaacagcagctatcaaaaaattatcttaaaaagtatttactcattattatggggggcaggggggagggtggcacatgccatggagtttctgtggagcagagctgtttagaggacagctctatggagttgactctctaatatccttaagtggcctctagcgattgaacataagtcctcaggcttgtaaggcaagcactttaacccacaaagccatcttactagctttcacctttgctattgtccctcaataacatgggaataagatgccagttcatcttggattatgatttaggatagaatttacatgaaggaaggtgggtatggaatttaaaggcttacaaagttctaacctgcctatgcccagctgggcatagctagaacattcattccatgagagctctgtgcagttcattgtcacaatcagtgtcttaaactctgcctttgtccaggaaaggaaaggaagacatgaagagctgaagatgtcccagatccaagggggtggtgaggcctggctttaaactctgtcctggactcactgagttgcatgttgagcactgcctcccacagttatcaataagataccctgtcacagtgtgtggcagagatatgaggtcctaaagttcaaggccattcattgggtatcaaattaattagatattaggagacaaaaggtacatggtaagcagtccatgtacattgtaaccatgaaggagagggtctttaaaagatatatctgttatctctattctccctgtgccacacatcccaagcctactctacagaggcaagctcttgttatattatcccatcagactgggaggatgctgcaggtggatccaatgatgctttcatctactgaacaaccatgtggcgtgtgttgccttctgttgctggtattcattgtgttctgagggcctggcaggttaagcccattttccgagagatcttcatgtggtagtatacctataaggtcaaggtaggtcttgtttcgcccttggttgatggagatagagtgaggtggttcctgaggaaagtctcagttcccaggagtgatgatggagcccttcagggtccacagctgacctaaatgtatctatccttccttccttccttccttccttccttccttccttccttccttccttccttccttccttccatgtgtttcccatgaacttgtagttgaagcataactcacatgcttgcacaaaaggatgatgaagatggcttagcatccttgtctagtgttgatgttttgcaaagcatcaggtggaaccgagcacggatgaggtgtggggtatcttccacagcaaagcaaattttcggaaaagaagttgtgggtatcaggtggtgggatgtttaagtcagctgtatccacacctgcacttggccacatgttgttgaagatattaatcacttaatggaggaagaagagttgaagttaggacccaggagcgtgtttgtctcgcaacagtgctatggtagacgagtactgttgaagttgggggtttaatcatgcgtcaggctttctcttcccataatttgctcttcagccatgctatcctgtagttcaccagctggtcgggtttcctttctgtataattacctacaggatgctggcacatgcagcaagattgcattaagaactaacgacagtaggactagtatgtgagtaagcagcaggtctgagttcagtggtactcatcaataatgctgacctcaagtgtgtccacctgtcatcctttccatctggcatccagagcactgggctcatgagtatgtgagcatataagcctgatgacattgtaggtgctggctcagctctccggacctggtggctttctgtggctcttacttagggaaccatgctttgggcaggactttcattctgaatctcccaagggcgtggaggtcttaagacaatgacttctttccacttagattggctatttttctcattgctgagacaaaaccaacttctgggaggaagtgtttattttgactagtttgagggttggagttgttgtggctggaaagcagtagtaacaggagtgttaggtagccgactgcatctgcagtcaggaaacagaaagatttgaatgttgttgctcaactcccttctctttactcaggcttacccacacccatggcatggtgccacccacagtgtgggccttcccacttcagctaacccaatccaggaacattttcatagatactgtggggtgtgttaccatggtgattctaagcctaaccaaattgacaaatggagatgaagcatcacacacattccaacagaacatctgtgtattcctttatgctcattaaagttgataactaaatttgctgctaaataatagaataaaacaaaacaaaaaaccacctggttaaaaaacccaaatatttatgtaaaaggaaaagaggcattatttgtttgtctttaaaaactctttgttgagctgggcgtggtggtgcactcctttaatcccggcacttgggaggcagaggcaggcggatttctgagttcgaggccagcctggtctacacagtgagctccaggacatccagggctatacagagaaaccctgtctcgaaaaaccgaagaggggaaaaaaaaactttgttgaactcaatatattgagttggttggaggaagaaatagcagagttagggactggatccagggaagttgtgagatgcaggatgaggggtcatggttgatgactctttctcagtggtaaaactgtgtatgaagaagagaacccgagggcaggttgcaataggtgatgaggccagggagaccctggagctgggttgtgagtttgaaaacggtctgtggtagcgatactagatttatctggacagattcgttcatcttaccgtgctgggatgtccgggtgagggaaagctacgcttcgtttggcagctgctctgagctcctcagctttgagcatgtggtaaggatgaatggcttttgctttgtcaactaagggagtgatctaggtttatttcattgacatctagcagaactctgctgagtccacagtattgtcttttcccccttccaaagtgtctactgccagcgggatttattcctacgattagtagatcgacataatccctgacctgataactcagtcaacttgtacctctgagtccctgactcagttccaacagaagcagtctatgcacactagcatataagggtgcctgtctccaggcagctctggatgctttcagtagcaatgtctcagtggggtcataagggaggaagaagggacccattggctggagggacaggagcttctgtcctctaggaacctgttctttccagagcctctggaatgcattcattgggtacgtctctaagggctgtctttcgcttatgaattctcttgtctagatagcttcacactcgtcacctaggaccccatggtcaaggagaacacatagctctgcttctacacagaccctagcctgcagatctaaagcgaaagatccacgctgggtctccccctatgcttagccttcccatggacctctatctaaatctgacatctgtctagattgctggtacgactctcctctcttttcctgcaggctgtgcagcctgtctgggacaggagaaggccagctgagctcttagctggcaggcagcctctttggcttgtgagctcacttgtcaccaggatgcaggagtcgcccgagagtctcaggggcaaagacacagccaaggaaatgttggaacgttagtttgtctagcaggattcctttggctgctttctaaaaacccacgtccctgatgctttgtctcattgtgattctaaggctatacgggtcactcattcatcacaggcaagaacatctctgggagcctgcctgggacttagtgaccagcttacttaggaccgtctgactggctattaccttggcagcctcaggcatccctttgaacctggcatccatcagatcctggcagcagaatggagcgggggggggggggggctggctaggaaggtcgtgaaaggcagaggcatggtgcccagccagggggcccagcattctgggtccatgacctacttttactcgataagctctatttaattttttatttagaaaagaaagtctcagtgcagtttagaaaatgtcttccctcttttctgggtctcactcaagtctatttcctacctgttggttcaatttacatgtttaattgggaaatcatctctccccaacgctaattttacccttcctggcattggggtcccatctttgtacccccatgagtgctcttccaccattttgttagggattggaacaccctgtctggggctcagttcctccctgcctgattgtatatttgctttcagaactaccattaaactgccattgccaatattacttgaaaagtaagactgaactcaggccaaagggagtggccattaggtggggttggggtgaggtaatcccattgggtcatcagacagatagcaggggctttggcatgtggaatgacatcataactttagagctattcttttgtgttgctttgagacagttgcccattgttgcccaggctggcctggaactaaatgcgtagcccaagctggcttggaactcaattgtgtagcacaggatcaccttgaacactcaatcttcccgagtctgtctcctaaggacagggattactgatatgtgccaccatcctcaattttggtcctatacttcaaaatatgtctttcggtataggactcacaccattaagttttgctgtttgatgaatgatccctttcttgatctttccagcctgtgggccgaagctgaccaactccccaaccgtgattgtgatggtggggctcccagcccggggtaagacttacatctccaagaagctgactcgctacctcaactggataggtgttccaacgaaaggtaagccaggtctgaaggctagtagcaggtactctcaggcagggccactcccagcacctgtctaggttatggagtctgaccttgcctcccagttatctcagttcacctcccctttatcaggctccctctggtgaccccattctccatgggacttttcctttgaaagtcccatcagatgtaactagccttcctttagtggctctcctcagcagcttcatgctgcttagtattggtgacacttcccaacaaatggataggatctagcatccctcgttgtgctaagaaacttttttaaataatgatgcttgactctagatctacatgtgataagcagtgactattaaatgtgacttcatccccatgatggtgttgtcagcaggaacacaaccaatttagacatagtaggggtaattttagaatcgcttgctcaacaagtggccaaggctggctggtcactgagacccacgcgtggataccataggcaaaaagtctctagttattctaacatttatttatttagttttatatatacattttgcctgcagatatgtatgagtactacacttgtgcctcatgccccagatggccagaagagggagtcagatcccttgaaactggagtcacagttgtgctgggaactgaaccctggttctctttctgccagagcagcaagtgctcttaactgctgagctacctctccgcggatttatttacatttatgatttcgagacaatgttccatagcttgaatgaactatacagctcctggacttctaatccccctgcctatatttctgtgttgggattacaaggatgcattgccctgcccaatgtttttggtgctggcatccagcccagcctttcagccatgctagacagtcacttttaacaactgagcaacattgtaacttattttgacttttaacacctgagcaacattgtaacttattttgcaatattcctacattgtaactttctttgctagactctgggggtcttcagcgtttgtttctggttgatgacattgggaggcttaggtcgggatctggttcctagaagacagctggctggtacagcaagcatgatgagtgctgtccttggtctgggcctgtttccctgacagtgacacctggggatgacacgcctggcctgggaattccacactgtttccataggaaattccctattcagatagctattggctgggaagcctcttgttcctgacggcccttgtctttcctgtccagtgttcaatgtgggagagtatcggcgtgaggctgtgaagcagtacagctcttacaacttcttccgccctgacaatgaggaagccatgagagtccgaaagtaagcctggggtgccttgggttttgtgtgtgtgtgtgtgtgtgtgtgtatgtatctgtaccagaggagaaccttgcatgttctttgggcactcactgttcactttaataagttaccttatgagtatgggtcttttgcctgcgtgcatgttagtgcctggtgcctggggtaaccgggttgtgatcagtaacagtgggtgttgagaatcagacccaagtcctggaagagcaacaagtgcccttaactgctcagccatctctcctgcccttagacagggtctgttaatgaatctggaactagtttggctggtcagtgagctctggggacctgcctttttctatacccccccccccccccagtgcctggcatttaggtgagtgctggagatgcaaactcatgtcctcgggtggcaggtgctctaccaaagcaccaactctgtaggccttttcttagaggtagggcctatcactgatctggacgttaatgagtaggttagattggcttgctgccagtgaaccccaagtttctaactgtttccatctctctagcactggaattacatgtctgtaccaccaaccccagctgctgctgcttctcctcctcctccttctcccctccctcctcctcctcctcttcttttcttcctccccctcttctatgtaggttctaaggacccaactcaggttgttatgcttgaaaggcaaacactttactatggactgagcaatcttcccatcctgtggcttcctttgttttgaagctgggttctgtaaaaggaagcagaggccagcctgcatgctggtgcccatcagaccaagctagtattaggacaagtcttcggcctctctgtgactgactgctttgatattcttccagaagtacaaactgagccaccctgagagacacttcaacagctgccacatgccaggagtgaacaaagtccttttcattggaaatcctcagtttgcatttgcaaaagagttcttaaactgcaggtggcaggtggtgctcctcttctgtgcctcatagccgcatggtgctggaatcagctgggtgtgggaagagatccgggtgccaggcacagccccaggcctgtccagtgttactctctgggtctgctttgacattcattttaattttatttgtactgctatttagtttagtttagttttaagtggtatttgttatataacgctggctggctttacactacccagctcgattggcctcatcctcagatctacctgccttagcctcctgagtgcatatattatatgagtatttgccattctgctgcctagcaccaggtcacgtagctaaggttggccttgagctttctgtgtagctgaggttgaacctctgattctctggcttccacagcccaccccatccctcacaccccagtaggagaattatagatggcactacaaagctatacagctggttatacagtgctatgaattgaactatggctttatgcatgctgggcaagcactcaatcaagtgagctgcctcccttcccttggttggcaccagttcttaaaaagctcccctggtttaatttttaagccaagtatggtgcacagtttctataattcaagaattctgaaggctaaggcaggaaggctgcaagttctagaccaacgttagttacagagtatgttcaaggcaagcctggatgacttagtgagactcaaactagaatgggaaaaggagctactatttagtggtagagcacttgcttagcatgttcaaggccttggtttcagttctcattaccacaaaggacagagaccaaaaatgaaaacggaagaccaagcatggtaactcatgcctgtaatcgcaacagtagagaggctaaggtgagaggtttgctgccagtttgaggccagctcaggctagaattcaatgccagcctgggcaatatagctggatcctgtgcaaacagaacaaaacaaaacaaaatgatccagaaagccaaaagcaaatacaagtgtttctcggggaaattgctcccattgcatagctaggtatgctggccgcctccctcagctgtgtggaggtgggtatctatactggtccttgggccggaggcttggctagcactgagcatcttggaactacaacctcagtgtgtcgtagaggatgaagctgcttagccgggtctgctctgaccagtgctttccttcttgtgtgtttgcagacagtgtgccttagctgccctgagagatgtcaaaagctacctgacaaaggaaggtggacagattgcagtaagtctgggggccacaggcacctctgtcctcattggcccaagcaacggagtgaggttggggacaaatgcctctgcacttaaggcctgagggaacaagtggcccaaagcagctcatgactcaggagtgtttcttgggttggatgttgggacatagctgtcactcactgtgacagtgggcatctggcaccacctctactgtgttgctaccagccactgtagccaggagccattcctgggtccctcattgtattttactgcttgctggtcatcccctgctccccctgctgtgtctaagagctataggtagagggagagaaggggagtctgggaggaccctggaggttaggggacaggacatactctgaaggagggatttagttctggaaacaacgggctgaattccttgtggtttgggttaactattattaccaggctttaaaaatttatttatttatttatttatttatttatttatttatttattcattcattcattcattcatttattgattgattgattgatccttcttcttctttatcaggtttttgatgccaccaatacaactagagaaagaaggcacatgatccttaattttgccaaagaaaatgacttcaaggtgagccaaacctgcctcccccagcgagctgagagagaggaaaaaaaccttgggagtaactgattgcctggctctgtcgtcagcttcttgctgccctgagttgttgatactttgtctcactctgtcgcccaggttgggtggagctcagctgtgtgtagcccaggttgacttcaaacttgtagcaatccctttgctaagtgttggattgtaggtgtgagcctggctggactcacgtctagttgcctgtgttttgctgtcttgaaacaaggtcttccttggggtgggatgcctagtaaccatggagccctccttccctgggggagggggcgtggccatgcaaagttggtgtttaatgaagtaatatttccccagtgccttttctttttccttccttattaatattttgggtagcagacagacaagtgcttctagttctaaagcacaaaatgtgtgtgtgtgtgtgtgtgtgtgtgtgtgtgatttttgggacattttcattcatgtgtatcattctttgttcctatttgcggtcccagtttctcttgcccctctcccccactccccatctgcttcccaaatagtttgtctgattttgcttttgaaacaggacaggctcctgggacgtgtattccattaacccgtttcccagttctgcctctagtcttcctgttctgtcatgataccaccccccccccaccccccacactcacacatgtaaatttagttttgcatctaagaggaagcatgcagtgtctgtctggttctagcttgctttatgtgtccccagtcctcttcctgctggtttcctttcttgtatcctagtgaactcactcgaagctggccttggtgggctgttttcacattgttgtcttacttccttcccctcaggcatttttcatcgagtcggtctgtgacgaccctactgttgtggcctccaacatcatggtaagacagttaggaagcccttgtttgtgtatggccccttatgctatgaggttatttgccgtcctggtgggagctcaggtcagggattggacagtagctaaaaccgtagaagcagatgacctgccccgtgtgtgactgagcaccctcaggtggatactgggaaggcagcagtacatggagatattgatttagcgcggtctgacctggtcctgctcttaagtgatatccaggccctttccaaggtcttagagggcaagcagcagtatataggcttgattgggacatggtggataaaggagacagacaggaagtagtttaacctggtgtcggtgtgatgattggcagcccatccctttatacagggaaggccatccagctgttcaggtttgctttccaggtccttggtaggtaagaaagcttttatgtgagccaaaggcttcaaggctcagcaggccaaaggcaaaggtcccaagtttaggaagaagggatataatatgtgtcccttccccctcaattccactagtcatcgtccttgttgtcgttgttgttgttattgtgttgttgaggcaggattctcacactatagcacagcctgttctggaacactgtgtgacagcgtaggctgatcttatatttgagtcaagactcctgccttagtcctctactgccagaatgatggatgtaaatcttactcctggttttcagtctaatcatattgaaataggacatatttataaagaaaatcagttttcataggtaggagatgcaggtgggattattgcatatgcatatctgtctgtctgtctgtctatctatctattaatcatctatctatttatctatccatctatctattattcagggacaaggtctcactgtgtagcccaggctggccttggactcagggctccctgagtactggaatacgggtgtgcaccactacacctggcctaaaatagacctttaaagggatgctaaacatttgtagcttctttcgctggtcttcatctccaagacggtgggaatagttcaaagcatttctaagaaacaagctcatgcttcagggagagtgggtgcaaaggaagaggctcacaggtggaggaggcagaggtgttggactcccagggggcttcgcatggtgcagctgtgagattgctttcccgttgagcagtcactcccatgctgcgttaggagtttgtctagtggtagctttctgtttattcatatacttctagttttgcagatcaggcccaggaatttgtgacctatatctgttttaattgtacaagtcacatactatataactgaccttactagctattttcaatgggcagatctgcagcattaagtgcatccagactcttaggcaaccatgtttgtaatatggctctttggtagagtgcttgtctaccatgcacgaagccgtgggtttaatccccgtactatataaattggatgtagtagtaaatacttggaatctcagcgcttgggaggtggaggcagggagatcagaagttccaggtcacccttggctatgccctgagattcatgagagcctgtctcaaaacaaaacaggacagaacaaaagcagtgggagcctccaccatcagtctcccggctttcccatctttttgtctgccttatagttgtgggagcaaaagattaacgaaatcctgagggcagacatgatggtgcctgatgaataatttcagcacttgttggtcagagagaggtaggaagttttaacggttgagggtatgcaggttccagcccagccaagactgggtagtaagacttaataaatcagagtttccctagaatctacttggttttgtttgtttgttttgtttttcttttttgcataattgcccaattataggagactcctcgtcccagaagtgctgctctgaaaggtgtaggcagcacaggcagattttgcttctgttggagcagatagagaagtcctacccaagatcaggggacatttctaagcaacacttaatgtgccttttatagccaaaggcctgctctttgtgtgcatctgtagggttctcctggattgaggctcaggctcattcagttactggattgacctgcctgggtgtgtgagccagctgtgttccttattgggtccttgttggctttctgagcatcttcctggtgcatcttcccggtgcatcttcctggtggaatcatgaggccaaaaggccatgagtcaaacttcctgctgacacccatttctttttttaatcatatatgctgggcaggatactctttattccgagcttttttgggctttccctgtttgaaagcccaaatcctgcttaatctaagcagaaaaccttccaaggtgactcaccaggctgctctttggtgttgcaggaagttaaaatctccagcccggattacaaagactgcaactcagcagaagccatggacgacttcatgaagagaatcaattgctatgaagccagctaccagcctcttgaccctgataaatgtgacaggtgattcccagaagataccaccctggattatccacacaaggcctcaaaaacgtcctctaaaacagctcctaaatatatctataaactctttagaaacagccccaccctttgatggaggagccattggccatcgatggctgctgagggagggagggagggagggaaggaggaggggagggagagatgctctcctttggcaacatggcggctgctggccccagtggacagactcacatccatgcataaaggaattaatcagactcaaggggttattaataataagactcatgaaataagggagattaggagcagttagagggagatagtggtggatgggtcggctcagcagttaggagcacacactgcttttccagatgactacatttcagttcccagcaccatagttggcagctcacaactaattgtaattcaaactacagcaggtttgcatgcctccggcctccccaggttctgcacttatgtgcacatatccacgcagaaacatgcacacacatatatataattaagtctttaaaatgtatagctgtatcagagtctctttctcaatgactctctaccttaacaagattgactaggatatttgtcgttgtttgtttgtttgtttgattgggtttcactatagccctagctgggctggaacgagttatggattcacagatctgacggcctctgccttcccagtatggggattaaaggtgtgtgccaccatgcccagctagggtttttttcctctcccaacatttatctatttatttgcttgtgtttgggtttcttgtctgtctatgtgtgtacatacatacttaggcaccacagcacacatgtggaagccagaggagaacttttgggagccccttttctctctgtcaaccttgtgggcccatgggatcgaacccaggtcatcagacttggtggtaaacacctccactgttgagccattaccctggtccctccagcttactttttgagacagtctctcgatgaactcactgagttggctaggctgactggccagtgagctccagggaaccacctgtctttgcttccccagctctgggattacacaccatactgtgccctgcttagagaagataaatttgaattttaggtttgtacattacggagtgaaccatctctctagctgtactatctggcttgaacagcctggttgagggaattgttaccttgggtttattctctgactcctacagcagacctacaacagtcactgttatgggccccaggaagcaaatatgctagaagctggctgggcccagggtgtgagtgaggtgtactgactgtagggctacggaggcctgaatggtggtttctttacagggacttgtcactcatcaaagtgattgatgttggccggaggttcttggtgaacagagtgcaggaccacatccagagccgaattgtatactacctgatgaacatccacgtgcagccccgtaccatctacctgtgtcggcatggcgagaatgagtacaacttgcagggcaagattgggggcgactcaggcttgtccagcagaggcaagaaggtagaggagaggagagaacatggggctagggagcagggggtgattggtttcctccttgttgtagagttgagggtctttgggtgttgtgtgtttttggctgtttttgccttactatgttgtatgtatttgcatgtggctttggtatgtgtacgtgtgagtgtggcctagaagtcggagggtagagtcgggcctcttggactctgataaggtttgagtggctttggttgttgccaaacaatgacataacataacttgggaaaggaaccggagtttgtgtgacctctgcctcccccatcccctcagttcgccaatgccctgagcaagttcgtagaagaacagaatctgaaggacctccgtgtgtggaccagccagctgaaaagtaccattcagaccgcggaggccctgaggctcccctacgagcagtggaaggcactcaacgagatcgatgctgtgagtcccaggcccgtgctgctgaggggaggcctggcagggaatggagagttctctcatgggttctctggaaacctggtggcttcttgagactccccccatcccacccccctttatttgaggtggccctagagggaagttttctggaatgaacgttggtcttcctgacagggtgtgtgtgaggaactaacctatgaggagatcagagatacctaccctgaggagtacgcactgcgtgaacaggacaagtactactatcgctatcccacgggagaggtgagcatgggtcccggtctcccatctgctggtctttctttgtaatggttagggtctgtgccatgtgtgaatggagttggctgagagaaggccttgggggccccagcgggatcaggatctctataccccaccccatcttccaccagttctgcaaactcatctctactacttctgtggtctaaatctcactagagaaccttgtaaaatccctaagggaagtgcgctgtgtttcccacactggagaacaatgagaaccggatatgtctgtctgtctctgatgatatgggatagagcaaaaaggatggctggtgattgactccagatctaagcttttccctgcatggcaggtcacacggtagacaggccgggttgatgtcagatggcttgtaccccagggctaggctgatgctggtagagggaatggctgagcatgcagttactcttgttggaatggagtgtgttgagccatgtggaactctgggagttaagccaggtagctgtgttgacacctagtgggtgtccttctgagcctttgtcatagttctcattcctggtgagctaccatgctgtcttctggtctcactctggctttctctcactgggactccagtcaggagaaaaagcacagaagagtcgacggcataaggaggacctttgctgtttttttatactgtagctttgtgcctattgtatagctctgaccttccttgcttttgaccctgccttaacctccccagtgctggcattacagatgcgcacctccacactggctacatttttctgttgtttgagcttaatgtgtaatgccttgagtttgtagcaatcctcctgcatttcaaaaggaagctgaggattctttagcaatcagtctgacgtctcctcctcatctcctcctcgctcctaaccctggtgactacaaatcccttgtctctaggcctgctctgggtggtgcacagaaagaattttcagtgtatagatggcgatacttagtgccttccactagacatacaaatgtttgaggttctcccacgctgtgacgagcaccaggacttcgtttcttttaatggttgcctgagtaatagtctgtggtagagtttgaccttttcccagcactcaaggagtaggaagaggaaggacttcagagagatcgaattgcaggctttcctcatgttccctaggagtattgtatcaaatacagagttgaatacaacacaaggatggatgtgtgtgtgtgtgtgtgtgtgtgtgtgtgtgtgtgtgtcctgtgagccagtctgatgaagactgcgagtgactgcctggctcttctctgcctgtcctctcctaacatgctgtttcattcctgtgtgctcagtcctaccaggatcttgtccaacgcctggagcctgtgatcatggaattagagcgccaagagaatgtattggtcatctgtcaccaggctgttctacgctgcctactagcctacttcctcgacaagagtgcaggtattgaaggaagccgagccaggaaggagggaagaaggaagcgggcccttgagtgcaaggggcagggaggggacctgtcttttactctgctttgcttctgaatatgggcctgcctggcggcctgctgaggtgtccaaacctgctgcctgtaaacagtgtgatatttagtgggcttcatcacttcataaaccagcctggagaaccctcaagcctccatgtgaccaagggcttctgggttaggcgtgaggctcttgtgtctgggggtgcccctgaacttagccctttgcttcagtctcttatctaactatgatgacatgtctcatttcagaggagatgccatacctgaaatgtccgctccacactgtcctgaaactgacacctgtggcatatggtgagtagcagcccctgctgggccctggccctggggtctcctggtggctggaggttctttataccagaggaggaggatctttataacagaagctgtcttctccatccttcaccttcagggtgccgggtggagtccatttacttgaatgtagaatcggtgagcacacaccgggagaggtcagaggtgagttaggctctgatgccctgggacctttgggaaaccctgggtctggctttcttctggaggggtctcactgagtttctctctcccctctctctctctctttcgctctctctcactctctcattttgtcctcgtttctacttgactgggaagaatgacgtaaacaggggattactgccttctgtcaatcatagccctggcacagtagctgttaccactttaggcagcaaaagctgtgcccttctcaaaagcaccagaggcctggctcaggctggatcagccagtcagcaacagcatccacatgcccttaagttcatagttagaagaggtctgagatcggaggagggccggaggatgggcatcctacagtatggccaagggaaggtcttaggagactcagcacctgtctcccacctcagggagggctgaggtttttgggggagggagtgtgtggtcatgttgaatccccttactgggcagatggcgaatctgtccaggcctgtgttgtgaaagtggatttaaatttgctttatgcaggctgtcaaaatacaacactttgccagtgtagtcagaccttcctcttacaccgaacttgactttcagtctgtggagtccgcaaaacaggtgacttacccatccccaaggagcttggccggcagacgttggtaggaagggtacatggatggggtgtcagcctgttttctgcctcacttgcactgtggaccacggtagaagaggactgtgtctctgggctgcctcgccctgtctcctgtccccgcccctctgaaccggggcacctgctcagttagctgaatgaagaaagccctaactaaccctgggtttagacatgagacaggctccatgtacttcagaatacttacttgctagcactggggctgcagatgtctaggctctgaggtgctgggccaggctttggaccccaggagcctattctcctgtctcatgatcctctgcttggaaagctgacatctcatcctggtggacagacggctacctgttttctgcatctttggcctcctagactgaggctgggtagtgtctgggccagcgcagagtattaatagattcttctgtgtgctgcagaccaggtggaagggagtcagcctggcaccgttctcctcccagtctggagattttagagccagtggtctctcctgcgccctctgtgggtgaggtgactgggagttaagattcttttctctgccccccttctctgctgtgattgtaattcttttctcttcccctgctttgcaaatagtgagaggttctgggccaacagcagctcagtgtcaaggccactcacctgggtgtccctctggttgtacctttacaagtctcgagacgaatctatgtggtgtgtgtgtgtgtgagtgtgtgtgtgtgtgtgtgtgcgcgtttgcgcgtgcgtgcgtgcttctcttcctacctccccactccttgtaactgtcgccttctctcttttgtctttgtctgcttaggatgcaaagaagggacctaacccgctcatgagacgcaatagtgtcaccccactagccagtcccgagcccaccaaaaagcctcgcatcaacagctttgaggagcgtgtggcttccacttctgctgccctgccaagctgcctgcccccggaagtgcccacgcagctgcccggacaagtcagtgatcctgctttaattactgcctacaggggagagtgcagagggaagaggatgcccgtatctggggttctgtgttgtgtttgcaagtaaggatgagtgcctgtgttcaagtgggctgcatgtgcgatgtatgaggattgtggctgtctagtgtatgtacatgcatcagtgagaacataccgttctcactctgcaatctttcctcatcagcagtgactgtgcgcatcctttccgagctgtggcctttattctttattgagcagaatcaggcagagtaaagacattataaaatgcccctgtcctatgcacatttctgagtactactagagcagtctacactccagcaattcccaatccaggagtctgtacagcccaggggactgatgtcttgtctttcctctcttttgctaacttctttgctgtcacctctggcagaaaaagggctgaggccacacagaaaagcctaactcctctccagagccagcatagccctgtcctccttagaaacagtccagagctggagaggcagctgagtttaaagctctttctgtccaatttcggagacttatgttcagatcccgagaacccatgcaataaattgtgttcagagactcatgcctgtaaaatcaccagtggtgagatgggagacagaaacaggtagatcctcgaagctctcggccagctagcctggtccacatggtgaaatcccaacacagtaagaaaaggtggaaggctcctgaaggttggcatctaaggttgtccttttatctccacttttggggtacttgtgtctacctgcaccttgatacacggatgctcgtgtgcatggtatgcgtatacacatatacagaatcaggcagctaagacagccaccttttcacacagtggttagatgatcagagtaaaaataaacagaactcagcaagactcactctttcacttgcttgaaagatcaaaggctgaagagtctggctgttgagcatccaaatttgttttcaggaaaccagtcctttagagatagccgaggacctttgccaacatgagatagtagaccttgccccgtgcctggatgaatttcagatcaatactaggcagttctggctgtgtggtgacagctcttctgctgcccctgagcttcctgttaacatcttaagggttagaatgaggtccagagagaaccctgtggcctccactgctcatttaactactccaggcctcagtttcctaacctgtggaattggacagtaatataccctacaaaaagtggctcggataaggtgctgtccgtataacttgggtctggcacaaagtaagggttaggttcagtgagatgacagattccctgggagcccaaggacttggctttgattgtagctctgtcctaacctgagtgtaggttgtttttccccatttggcctcaagttgtcaagttgtactatagtccagagtacatagtctctaacttatggtcattctagctctgcctccggagtataggattgctttgttttgtggaggacagtgtctcatggtgcagagagactgaccttagatttactgtgtagttgagtataactttgaactcctgattctccccctcctcccaggcacactgctatacctggcatgtggattttaatgtccaggctcagtctctttagcattggaaatggacacaggagcagtgggaagactcctttaggtctgagcatgttctaactacacccaagcaaatggcttctctatgccactctatcctggtgcattgtgggagtcttctgttgcagaggctcaagggttgggccagggccaggtgacatccagaactatactgatctggtcatagaggtcactggcaagagctcagtcttgccccccccccccccacacacacacacacacttcacaggtgcctctgactttgttaggacagccctttagaatcgccagatcctcaggcacagatgtcggcatctattggccggttcagacatgggaggggtgcgggactcaactcagcagctgccatctggcctcctaacttactttctctctctctctctctctctctctctctctctctctctctctctctctctctctctctctctctctctccttatcttgtctccctgcagcctttgctagggaaagcctgtctgtaagtatttccttctcaataattctattgcttgcactcaacgcttgcttgtttgcccatttggtctcctgcctgttgaagtatctaggaggaagacagtctgaggttgcccacagaggagtaggagataggaagacagaattcccaaagtttgtagagaagagatacagaaagagatacaggttggatttcaccatgttcagcacactccaatgccatcaaacacagggtgctactccccactccctcttggggttctatgctgtgtcttcttcattggtcacaggcagggcttgacgtaatgccagagttcccttgtggggtcagattttcatgtaaatgaatctaatgcttactacccctgctttgtacctcttccaccagaggagcatccttttgttctgaaaacaatatttagtccagaacctagtagccaagcatggggacctattttgatgtcatggagctgtcctggcctgtcagtcctgccaagggacagtctgtggagacatccatgtacgaactatagctggggatcccactccactgtatcctcagacctgactgcagctgtgacaagcttggggctggcatttgggactcacagagaatgagattggccatcctttgcatctctggccccttcaataagagactgtttaacaagaaaagtcaaatggcctgcacacccacacactggcaggctgtagagccaggcctcaaacagaccttgtgccccagaaagctggtttcttctctcctgcaagcttgttggaaaagcccaagtaccagtcttctgttttagattcttgaaggctaaggggcaccatgagtggctgctggtctctgggttagctcctgcgggcgcccttgctgccacttcctaaggagaaggctggcataaaaagggacagtgtgctcaccctcgcgtgtctattgtggactgcttggggaccaagggttctccttgcagagcctttgggtttggagccttgtgagtttgcatctgtgcatttccttcagaaggcaattttcctgctgggaaaagctgttcacatctgctgcctccaccctacactgttagattcaccttggaaatggacaagctggagaatctaatagtgcttttggctggagcacctttagactcaccaccaccaccaccaccaccactcctgccccaactatgattagattctaatctggagacccagcttgtaagcccaacctgagagtgccacctcatgtcctagaccattagatctatgaaatcaaccctgatcctgtgaccacaattaatcaatgatagttttatggaaacagtaccatcttagtcctatctagcctggaatttactgtatagcccagacctcaaatttagtaatcctcttggctctcacttctgagtgcttgagttacaggcacgcatataccgatacatgtcgttacttggcttccagaattcattttaaaggccaggtcaaaccaactttgccactgtctctggaacattaggcaagctaagacaattttaagactttagcttcctttaagtgtcaattgcaactctttagggagcattgctaatgaaaatatgcatataattctgatgggtgatggctggtgtatcaccacttctgactctagctttaagtgtgcatgtaggtggcccttggttccctctgctctgctccactggattttcctttctcagagcaactggagcactctgtctggagcttgagaagccccaaaggcctgatgcccatcatctcaatctcccaataacactgagtgatgcgcagacactcacctctggtatcttcctgggggatgttgctctgctcaggaccaagggaccacctgctgttctcagtgcattttacatcctaagattacagatgcacactacagggagaacactgctcaggctggcagtgtagctcagttggtggagggattgcctggcgtgcaagaggccctgagttcgattccctagcactgcaggaagcaggcaaggtggactgcaactgtaaccccagcactcaggaggaggcaggagaatcagaaaatctaggccatctacactacagagaatttgaggacagcctgggctaagtgagacttggtctccaaactgaacagaagatactaaaattggttttgttttctcctcttccaacctgtttgctttttttttttttttcccttccccactatgcttgaaagacgaagtgtctgtcacattttttcaaagttttctccttactaacctgggaaaggtaactgagctggtgcatgcccctccgtttcctcctgtgtccaagtccttgtgtctcagccgaagggcgtcttagtttgtgtacggttgcccattgtggagtacatttgtcagggctggatggtctttcaagcagtgccattgatgtggggtctttcccatgtgtgtctgtctctgtgtgtcctgagccacagcctcccatttccatgaggaaatgatgtggacgtgacgccccctgtggctcttcattgttactgttgctttgtcatgttggaatgctcaaggccttgggcctgtggggtggcgggagaagtcggaacccttccttttttgaccctacaacatggttggggtactttatgtgcctgacccagggcactaccagaaggacccccatttaacacaggacactattgcctgggtccccaagtcccattcaactacgagtagtgactccaggacagccccgcactgggccacttctctagacatcacagctaggttcctctattctgtggcctgagagtagtttttgtgttcttgcctggctgaactccatcattccatgatcctgcctgacccagctaatcattatgagacttctttggggtgggggtgggggttcatgggtcaggacccagcagacttgagagacaacttcctttaggtctcttgtgtggccagccatcccactcacctcttgcattctgtggtgctctgtgtacagacttgagactcaagtgtagataagtgcagggctctgttagctgttttcggaaaggaactgtgacactctagacagttccagctggttttgacctggctggagagtagccttcagttcctacaggggagggtgcatgacttttctatttgtgcctcatggtcccttgtcttttgtctgacccctggaacagtgggctcccatgtcacatgcctgtccctctccttgcccctctggctgcaatctaacccagtgctgagtagaatcctggcctatttctctagcttcttctgtagcctagggtgttttctgtcactttctgagtcctgcctgggctctcctcgtgttttgtgatcatcctctgctagggtgtgttcttttggggagtcgcagggggtgtcttgtggcatggctttgagccttctgcctgagaaatacaatcagcagcaggttctgaccctccctttcttctctctcctgaaaacagaacatgaagagctcccggagcggtgccgactcttcccagaagcactaaagccgagatgtgggttccattccatttccacagcctgccttgtgcctgctcatcttctcgaggccaagtgatcgcaaggacttctggactcgggagaatggaggtcggcatgttgaagagtagaagcccttccccccactgaaatgttggggtggcaaagacaactaggaagttgtacagatcccagcttcctgtgtagagcagcagaccttcctacgctctgttctctttcgacttccagggctgtctgacctctcaggcccttccaaagcttggggagggctatagttctagaggaggtgagatcagacccctaagtgggggccctggacaccgccacgctgttttgttttgtttctttggatcctggcctggcatgtcgatagtcagaagataagagtggcagggaaccctgagattcagagttagaccccacttgccagaggctcagggacaagttgcacattctcatgtggcttttatgcatcttggcctaggaggaggcctcagagacaagaggcttgggcattgctgcattgggtatgggatttctcctcctgaggaaaccttgagctgaggcctactggtcagctgagcaatgacttgccctgactcctctacaggtccacatgtcttctgggtcccaagttaagggacagactggttgtatcagtggaaggaaggatttttcagaaaaaaataaccagggctcccctcttcccagagtcccttaggccttctgttcttcaccttgggcctggaggcacctgagtagattctgttgttggctgtttgtttgcacttttccttctttctttccttccttccttccttccttccttccttccttccttccttcctccctccttccttctcttcttctctccttccttccctccctccccacacctcacttcaagaacctagggtgctggcccttggaggcttgcagcttctgaatgggaggagttggggtgtctttaagatggggagtctaagagccttcaacttcactcccattgttcaagaagggacggtggcccaaggaaggctcatgtcaggccgcctgctcagagctgtccgcatattttggccaagtgtctgctgctgtatgcctcataccaccatgctggccatcttgaggagtcacccccagtgtagaaaagcatccttgtcggctttatggcattggcgacatttttgcatgggttgaaaagtagcgctaatgtctttgtcttcctgtttctcccctttgtccacccatgttctgggggaggacgggacatcccaagcctggaagcaaccaatgggaaactcagcagtgtcagcccaaaggaccctttatgacgatgctgcacaactagggccgaaggtcactctttactttctgcttccttcctgggagtcctagggatcctctcttccccagctcaggggacaacagatcctggggtgacacagggcatgcttcagacactttaaagtcaccttgtgttttcatagctaactactcaaacatttggcccagcccactaccctttatatctgtggttcaccaggatatagatagatgatagatagaaagatagatagatagatagatagatagatagatagatagatagatagatagatgatagatatctccatctgaagacttggacttttttctctatggcttgagtcttgacaaggatatatgaactgcagacgtgggctgacatgtgtgcaggctgataatatttttggacctgaagatctgcagcgttgatttgggggatagggttgggggtggggtagggaacaggataagaactgtgtagcccaaactagcctcaaactcatggccgtcctcctgtctcagcctctcaaatgttagctgttcgggttataagcatgagccaccaccacaccacgcctggtactatggctttgtacctaaatgtggtttcttcgatgcttcctcctgaccatatccattttatggttatagaaccagcttttacaacatagagactctcaaggctgagacaggtaggggtggtcatgtgtgaccagcctaagtcaatacatcaagagaaagctttgcccaatgtgatttcacattctgtgaacacctatgaataagatcaggcccaggagatcttgatgcgggtggaacatgcatccttcaaaagccagtgacttggtggatggggtgggtagcacccatagaacttccactctcccacccaaaacagcaaaataaaatggggaccaatgtttttaacgttgcatatttgttttgggggtaaatttctcccctttccttcaacaatgggcactacccttgatttatggggagaagaaaaactgttggaaccacaccaatgatattttcatttgtaatacttgaagtttatttttttattattttgatagcagatgtgctatttatttatttaatatgtataagggagcctaaaactagaaagctgtctagattggctttaattgttcattggtttggggcctttcaatgtgtgactgatgacttcttcatgttctgtgtcattgtctctgtccgtgacctaggaagaagctttgcaagctttttaacaggacacgccttcctttcagacatctgtgtagtttgcagttgcaagaacaataaaaacctggttgagatacacctgcgggactcgcttctcaggtttttgcggagaacaagtgtcagttttctttctaagcatttagtgcgtggttgtgtgtgtgtgtgcgtgcgcatcagtgtgtgtgtgccagctcatacatgtgcacgggggttcacacatgtaggggtcagaggacagcttgacaggagtccatctctcccagcctccagagattgagcccaggcctccaggcttgtcagtgcctttacttgagtcaatcattttactggaccacagggtcttttattgagatttatggccagcgcatctctcagctccttgcagaaccctgttttatcttcctttaaataagaaacaacagattgtcaagtttgtatatttaggaaatataataaaatgtgttaattttaaattaatagactattgtttcccccctcccctccttccttttctttttggtttttcgagacagggtttctctgtgtagccttggctgtcctggaactcactctgtagatcaggctggtctcgaactcaagagatccgcctgcctctgcctcctgaattctgggatgaaagatgtgtgtcaccactgctggacttttttttttttttttgagaggggaattcaatgtgtaattgacatcagcccaggctgatgtcctcttcctgtctcagcctcctaagtgctgggttataggtatacagtgcctataacacccattctagactccattcacaacaacaacaacaacaaaaatcttgtttctgtatgtgcaagtgtgagtgtgccctagcatatatcatatatgtagaggtcaggacaactacctgtgttgatcctggtctgtcagtctccttgaggcaaagtgtaagctgaatgtgctaggttagctagtctacaaccagaggatccccaatcctccacccctcttaccggctcacccccatcaccatagaggcactgagatccagcttatgtaggttgtgggaatctgagtggttgctagattagcacagcaagtcagcgtcctccaccccctggagatggaatctagggactcacggttgctaagtgctgtgccctgatgttttccaccaagcttgatgatctatgtaggggaagaaaaccaactcctaccaaattatcctctggtttccacacatgctgtgtcagcaagcttgtgctcccccccccccccataaatgagttttcgttgtttttgtttttgagacattgtttttctgtgtagacctggctgtcctggaactcaactctgtagaccaggctggcctcgaactcagaaatccgcctgcctctgcctcccaagtgctgggattaaaggtgtgcaccataaatgagttttcaaacttcagtaacttctttgttcttttgatagccaaaagttaagggtttggtgtttgtttgtttgtttgttttccccaagagtcaaggtctttatctctacagattgaagagtggatgatagtgtatatccagtttgaaccttacacgccccaaaagttgctctggtgcccaaatcccttccactcttctaaccctagctcgggagaaaacagtccccaggcaactctatgctgaaatgatttctggaactgttgtccggagactgcagtgggatggagacagctagatatagactttcctgacttttaagctgctctttaggtgctgaatagaactttgcaatctggtcccatctttcaggttatcaagagaatgaaaaagctaccaggactacaggtagagcactagaattgcttctgcaaggccctgagtctgatctttagcatcgttcttccccaaattaaatgaagtttgacataaaaaataaaaagcaagcatgctaagtgtgatggactatgtctgtattgggtaggggaagtggtacacaaacctgaaacaagtagggactgaaggatgctaggagaatatggtatctagcgtctgctttgatctgaaacctaacatctgtaatcatagcacttgggagtctgaggcagggggatgataaaccagaggctggtctgtatagtgagagtctgacaaaaataacatgaatttgccacaacccctacccagaggcatggagaaagaaagtgtagcttgtagacacagtgaatttttttttcagccataaagaccaaagttaggaaagtggatacagctaaatagaatcatattaggtgaagtaagtcagccccagacattgatgctgctctagctcgtggatcttagacaggcatgtcaacggcatactttcttgattaatgattgatgagggagggcccactagcctacctaccatctctaggcaagtgatcctggattcttttaaaaagcaagatgagggagccatgagaagcaagcctgtaagcaacatccctccatggtctctgcttcagttcctgctctgaatttctgtttaatttgtaagctataaacaataaccaaccagaaacaaacccgttcttccccaagttgcttctggtcatggcattttctcctagcaatagagagcaaaggaagacacagtccactatggcaggtgccacagaggcaagaggagctcgagggctggtcacgtgccgcccatagtcaagagggagaaggtatcagatgctagcattgtattacttagttttgttaggtgctttctccattttattgagtctagaatcccttgccccagggaacggggtcaacagttaaaaatgaatcttcccccataacaaagatagtctctaatagttatgcccagaggatcatttccaagtgagtctagatcccatcaacttgacaatactaaccatcacactgtctaaggaaacaaagaaaattaatgggatgatgggagctttaaaatggaggatggtttaggcagggcaaggggaaaataagctcaaagtatattatatatttaaatgaaaatgtcatttcacaacccaggaccacatgctgctatgaatacatgccaattaaaatatcagacaaatgggatggagagacaactcagtggttaagagcactgactgctcttctgaaagtcctgagttcgaatcccagaaaccacatggtggctcaaaaccatccataatgagatctgacgccctcttctgtagtgtctgaagacagttacagtgtacttacatataataaataaataaatctttaaaaaaatcagacaagcaaacaatagtctgataaaaaaccaaagcagaaaggccatatacaacaaaactggaaaacctggatgaaatggacaaatttctagacagataccaggtaccaaagttaaatcaggatcagattaatgacctaaacagtcccatatcccctaaagaaatacaaacagtcatcaatagtctcccaaccaaaaaaagcccaggaccagatgggtttagtgcagagttctatcagaccttcaaagaagatctaattccagttcttcacaaactattccacaaaatagaaacagaaggtacgctacccaattcattctatgaagccacaattactctgatacctaagtcacacaaagacccaacaataatagagaacttcagaccaatttcccttatgaatatcaatgtaaaaatcctcaataaagttcttgctaaccgaatccaagaacacattaaagcaatcatccaccctgaccaagtaggttttattccagggatgcagggatggttcaatatacggaaatccatcaatgtaatccagtatataaacaaactcaaagacaaaaaaacacatgatcatctcgttagatgctgagaaagcatttgacaaaatccaacacccattcatgataaaagtcttggaaagatcaggaattcaaggcccatacctaaacataataaaagcaatctacagcaggccagtagccaacatcaaagtacatggtgagaagctggaagcaatcccactaaaatcagggactagacaaggctgcccacttcctccctacctgttcaatatagtacttgaagtcctagccagagcaattagacaacaaaaggagatcaagaggatacaaattggaaaggaagaagtaaaaatatcactatttgcagattatatgatagtatatatgagtgaccctaaaaattccaccagagaactcctaaacctgataaacagcttcagtgaagtagctggatataaaattaactcaaacaagtcaatggcctttctctacacaaaggataaacaggctgagaaagaaattagggaaacaacacccttcacaatagtcacaaataatataaaataccttggcgtgactctaactaaggaagtgaaagatctgtatgataagaacttcaaatctctgaagaaagaaatcaaagatctcagaagatggaaagatctcccatgctcatggattggcaggatcaatatagtaaaaatggctatcttgccaaaagtaatctacagattcaatgcaatccccatcaaaattccaactcaattcttcaacggattagaaagggcaatttgcaaattcatctggaataacaaaaaacctaggatagctaaaactcttctcaatgataaaagaacctctggtggaatcactatgcctgacctcaagctgtactacagagcaattgtgatcaaaactgcatggtactggtatagcaacagacaagtagaccattggaatagaattgaagacccagaaattaacccacacacccatggtcacttgatctttgacaagggagctaaaaccatccagtggaaaaaagacagcattttcaacaaatggtgctggcacaactggctgttatcatgtagaagaatgcgaattgatccattcttatctccttgtacaaaggtcaaatctaagtggatcaaggaactccacataaaaccagagacactgaaacttatagaggagaaagtggggagaagcctcaaagatatgggcacagggggaaaattcctgaatagaacagcaatggcttgtgctgtaagattgagaatggacaaatgggacctcataaaattgcaaagcttctgtaaggcaaaagacactgtcaatgagacaaaaaggccaccaacagattgggaaaggatctttacctatcctaaatcggataggggactaatatccaatatatataaagaactcaggaaggtggactccagaaaatcaaataaccccattaaaaaatggggctcagagccaaacaaagaattctcacctgaggaatactgaatggctgagaagcacctgaaaaaatgttcagcatccttaatcatcagggaaatgcaagtcaaaacaaccctgacattccacctcacaccagtcagaacggctaagatcaaaatttcaggtgacagcagatgctggcgaggatgtggagaaagaggaacactcctccattgttggtgggattgcaagcttgtacaaccactctggaaatcagtctggcggttcctcagaaaattggacatagtactaccggaggatcccgcaatacctctcctgggcatatatccagaagatgttctaactggtaagaagtacacgtgctccactatgttcatagcagccttatttataatagccagaagctggaaagaacccagttgtccctcaacagaggaatggatacagaaaatgtggtacatttacacaatgtaccacattactcagctattaaaaagaatgaatttatgaaatccctaggcaaatggatggacatagagggtatcatcctgagtgaggtaatccaatcacaaaagaactcacatgatatgtagtcactgagaagtggatttgcccagaaactttgaataaccaagatacaagatacaatttgcaaaacacatgaaactgaagaagaacgaagactaaagtgtggacactttgccccttcttagaattgggaacaaaacactcatggaaggagttacagagacaaagtttggagctgagatgaaaggatggaccgtctatagactgccacacccggggatccatcccataatcagcctccaaaagctgacactattgcatatgccagcaagatttttctgaaatgaccctgatatagctgtctcttgtgagactatgccagggcctagcaaacacagaaatggatgatcacagtcagctattggatggcacacagggcccccaatggaggagctagagaaagtacccaaggagctgaaggggtctgcaaccctataggtggaacagcaatacgaactaaccagtacccctgagcttgtgtctctagctgcatatgtagcagaagatggcctagttggccccttggtcttgcaaactttatatgccccggtacaggggaatgccagggccaagaagtaggagtgggtgggtgggggtgggggggtatggaggacatttgggatagcatttgaaatgtgaatgaagaaaatacctagttaaaaaaacaaaacaaaacaaaacaacccaccaacataagtgttacttgatacaatctatcaatgctcccactactctaaatagttgaccaagttttccagtatgactagttaaataatttcaaggaaaaatactctcggttgtgcttggtgaagaggcagaagaggctgagagtcaaatgaagtttcactcttgcccaaggtttctcctgagcatggggcaggaagtgttggtccaagccatctagactcaggtcccagtaagacagattcttgcaatctcatttttctttaggctgtttccctccattgactgtctctgggcagccacatgcttaccccacactcttactccatctgactcactgaagcctgtacatcttattctgtctgccaaagctcctggcgatggacaccagcctctgcctttgggaatgagtgttcattgttcatttgcccctggtgatgtatgccttgtcggtttgaacaatgtgctttaccccatagctaatggggccttgcttggggccagtcctgactatgccaatatgcactgatcagcctttttgacctctctgctgggatcccagccaaactggattatgtctgagtggtgctctctgccacagctcatcggtttgaattcagtcatttttaatcagagttgcacaacacagttggcttagcaagatctcagcctgggaggttgtgatttatgatgcatttatttaagtgcgtttatgtgtgtggtattatacacgtgtgtgcagaggtcagagagtcacactgggtgtcctgctgtgtcattctactttatttccctgagccagagtttctcggcaaacctggaggtagggtagcagccaccatgcttcggcgagcctcctgtcctttccctacacgattttgtgattacaggatgcatgtggccatgttctgcattttcatgtgtggcctcagcatttgaattcaggtcctcaggcttgagtagcaagcacctttatcgattgagacacctcctcaatctcttgagatttataatgtgactatccaaagtgttctgtgttggaggaggggtttgcaacatcctgtgtgattctgagagagattgcttcagaatcacactggtccataatgagcattatagatatgggggagtatatccacctacatgaggcatctagagtgtttaggttcatagaaaagaatggagggggccaggaactttagtttatgtgtgtgtatatgcctgggtgtatctctctctctctctctctctctctctctctctctctctctctctgtgtgtgtgtgtgtgtgtgtgtgtgtgtgtgtgtgtatacaagagcctgagaaggtcaaagagggtttgggtcccaaggaactggagttagagatggttgctagccaccatgcagatgttgggaatcaaacctgggttctctggaagagcagctatgcttttaaaccactgtggccatcaatccagccccatagtgtgtccttcagaatatgttacgaagatagatttcaagtgaacatcttaacagacatacaaaaatccaaacaaacagggcatgctataaaactacccccccctcacacacacaaaaactcaaggaagttcgtggaggagatgtggacatttagcatcttagggtgatgacccatggatgtgagcctaccttttttagcagatggatagagtttccttatacaacccaggctggcctcaaacttgtgatcctcctgccttagcctaagtattggggttgttggcatacacaactacacccaaataatttttttttggtatacataaatatccaataaaactttcttttttttccattttttattaggtatttagctcatttacattttcaatgttataccaaaactcccccatacccacccacccccactcccctacccacccactccccctttttggccctggcgttcccctgttctggggcatataaagttttcaagtccaatgggcctctctttgcagtgatggccgactaggccatcttttgatacatatgcagctagagtcaagagctccggggtactggttagttcataatgttgttccacctatagggttgcagatccctttagctccttgggttctttctctagctcctccattgggagccctgtgatccatccattagctgactgtgagcatccacttctgtgtttgctaggccccggcatagtctcacaagagacagctacatctgggtcctttcgataaaatcttgctagtgtatgcaatggcgtcagcgtttggatgctgattatggggtggatccctggatatggcagtctctacatggtccatcctttcatctcagctccaaactttgtctctgtaactccttccatgggtgttttgttcccaattctaaggaggggcatagtgtccacacttcagtcttcattcttcttgagtttcatgtgtttagcaaattgtatcttatatcttgggaatcctaggtttggggctaatatccacttatcagtgagtacatattgtgtgagttcctttgtgaatgtgttacctcactcaggatgatgccctccaggtccatccatttggctaggaatttcataaattcattctttttaatagctgagtagtactccattgtgtagatgtaccacattttttgtatccattcctctgttgaggggcatctgggttctttccagcttctggctattataaataaggctgctatgaagatagtggagcatgtgtccttcttaccagttggggcatcttctgggtatatgcccaggagaggtattgctggatcctccggtagcactatgttcaattttctgaggaaccgccagactgatttccagagtggttgtacaagcctgcaatcccaccaacaatggaggagtgttaaaactttctttaaaaaaaaaaaaaaaaaaaaaaaaaaaagaacccactaagacatgcacaaagtaaaacaaagggggggaggggcgactctgggctggagagaaagcttattggtaacatgctggttgcacatcagggaagactgaagcttggacccccaatgttcatataagaagcctagaacagtgggatgggcctatgtccccagtgcttgtaggcagagacagatgggtgcccagaactccacagccaatcagcatcgctgaaccagtgggctccgggttcagtaacagattccgtattaacaattaggtggatacctgatggtaactttcatttcccccatccacacacctatatcacacacacatacacacactctcacacacacacacacacacacacacacacacacacacacacacactcacacacacacacacacacacactcacacatacacactcacacacacacactctcacacacacactcacacacacacacactcacacatacacactcacacacacatacacactcacacacacacacatacacacactcacacacacacacacacacacacacacacacacacacacacacacacacacaagcaagcacgcacttatttgctaaacactcaccagattctctgttaaatgaatgcaagctatgcagtgcacccagggtggaatcttaacggtgaaaga

SEQ ID NO: 616 - DNA, 4591 bp, Mus musculus
gtgttgggaccgtggctgtcactgcgctggagcatccctgagcttttgaacagagccgactagtcagcagtgcagcagccgcaactccacgccgctctcatctgtctcgtgtctccgctcaggcgatccttcctccgagactccgcacaaagcacattttccaaagcagtgcaagggagcgcccagccgcgtgcaggcggacgcacccttcctgtcctttgttccggggggatctgctgctgctcttctccccaagtcggagtctttcctccaggggtggcgggtcgccgaatacagctacgaagatgccgttggaactgacccagagccgggtacagaagatctgggtgcccgtcgatcaccgaccctcgttgcccagatcctgtgggccgaagctgaccaactccccaaccgtgattgtgatggtggggctcccagcccggggtaagacttacatctccaagaagctgactcgctacctcaactggataggtgttccaacgaaagtgttcaatgtgggagagtatcggcgtgaggctgtgaagcagtacagctcttacaacttcttccgccctgacaatgaggaagccatgagagtccgaaaacagtgtgccttagctgccctgagagatgtcaaaagctacctgacaaaggaaggtggacagattgcagtttttgatgccaccaatacaactagagaaagaaggcacatgatccttaattttgccaaagaaaatgacttcaaggcatttttcatcgagtcggtctgtgacgaccctactgttgtggcctccaacatcatggaagttaaaatctccagcccggattacaaagactgcaactcagcagaagccatggacgacttcatgaagagaatcaattgctatgaagccagctaccagcctcttgaccctgataaatgtgacagggacttgtcactcatcaaagtgattgatgttggccggaggttcttggtgaacagagtgcaggaccacatccagagccgaattgtatactacctgatgaacatccacgtgcagccccgtaccatctacctgtgtcggcatggcgagaatgagtacaacttgcagggcaagattgggggcgactcaggcttgtccagcagaggcaagaagttcgccaatgccctgagcaagttcgtagaagaacagaatctgaaggacctccgtgtgtggaccagccagctgaaaagtaccattcagaccgcggaggccctgaggctcccctacgagcagtggaaggcactcaacgagatcgatgctggtgtgtgtgaggaactaacctatgaggagatcagagatacctaccctgaggagtacgcactgcgtgaacaggacaagtactactatcgctatcccacgggagagtcctaccaggatcttgtccaacgcctggagcctgtgatcatggaattagagcgccaagagaatgtattggtcatctgtcaccaggctgttctacgctgcctactagcctacttcctcgacaagagtgcagaggagatgccatacctgaaatgtccgctccacactgtcctgaaactgacacctgtggcatatgggtgccgggtggagtccatttacttgaatgtagaatcggatgcaaagaagggacctaacccgctcatgagacgcaatagtgtcaccccactagccagtcccgagcccaccaaaaagcctcgcatcaacagctttgaggagcgtgtggcttccacttctgctgccctgccaagctgcctgcccccggaagtgcccacgcagctgcccggacaaaacatgaagagctcccggagcggtgccgactcttcccagaagcactaaagccgagatgtgggttccattccatttccacagcctgccttgtgcctgctcatcttctcgaggccaagtgatcgcaaggacttctggactcgggagaatggaggtcggcatgttgaagagtagaagcccttccccccactgaaatgttggggtggcaaagacaactaggaagttgtacagatcccagcttcctgtgtagagcagcagaccttcctacgctctgttctctttcgacttccagggctgtctgacctctcaggcccttccaaagcttggggagggctatagttctagaggaggtgagatcagacccctaagtgggggccctggacaccgccacgctgttttgttttgtttctttggatcctggcctggcatgtcgatagtcagaagataagagtggcagggaaccctgagattcagagttagaccccacttgccagaggctcagggacaagttgcacattctcatgtggcttttatgcatcttggcctaggaggaggcctcagagacaagaggcttgggcattgctgcattgggtatgggatttctcctcctgaggaaaccttgagctgaggcctactggtcagctgagcaatgacttgccctgactcctctacaggtccacatgtcttctgggtcccaagttaagggacagactggttgtatcagtggaaggaaggatttttcagaaaaaaataaccagggctcccctcttcccagagtcccttaggccttctgttcttcaccttgggcctggaggcacctgagtagattctgttgttggctgtttgtttgcacttttccttctttctttccttccttccttccttccttccttccttccttccttccttcctccctccttccttctcttcttctctccttccttccctccctccccacacctcacttcaagaacctagggtgctggcccttggaggcttgcagcttctgaatgggaggagttggggtgtctttaagatggggagtctaagagccttcaacttcactcccattgttcaagaagggacggtggcccaaggaaggctcatgtcaggccgcctgctcagagctgtccgcatattttggccaagtgtctgctgctgtatgcctcataccaccatgctggccatcttgaggagtcacccccagtgtagaaaagcatccttgtcggctttatggcattggcgacatttttgcatgggttgaaaagtagcgctaatgtctttgtcttcctgtttctcccctttgtccacccatgttctgggggaggacgggacatcccaagcctggaagcaaccaatgggaaactcagcagtgtcagcccaaaggaccctttatgacgatgctgcacaactagggccgaaggtcactctttactttctgcttccttcctgggagtcctagggatcctctcttccccagctcaggggacaacagatcctggggtgacacagggcatgcttcagacactttaaagtcaccttgtgttttcatagctaactactcaaacatttggcccagcccactaccctttatatctgtggttcaccaggatatagatagatgatagatagaaagatagatagatagatagatagatagatagatagatagatagatagatagatgatagatatctccatctgaagacttggacttttttctctatggcttgagtcttgacaaggatatatgaactgcagacgtgggctgacatgtgtgcaggctgataatatttttggacctgaagatctgcagcgttgatttgggggatagggttgggggtggggtagggaacaggataagaactgtgtagcccaaactagcctcaaactcatggccgtcctcctgtctcagcctctcaaatgttagctgttcgggttataagcatgagccaccaccacaccacgcctggtactatggctttgtacctaaatgtggtttcttcgatgcttcctcctgaccatatccattttatggttatagaaccagcttttacaacatagagactctcaaggctgagacaggtaggggtggtcatgtgtgaccagcctaagtcaatacatcaagagaaagctttgcccaatgtgatttcacattctgtgaacacctatgaataagatcaggcccaggagatcttgatgcgggtggaacatgcatccttcaaaagccagtgacttggtggatggggtgggtagcacccatagaacttccactctcccacccaaaacagcaaaataaaatggggaccaatgtttttaacgttgcatatttgttttgggggtaaatttctcccctttccttcaacaatgggcactacccttgatttatggggagaagaaaaactgttggaaccacaccaatgatattttcatttgtaatacttgaagtttatttttttattattttgatagcagatgtgctatttatttatttaatatgtataagggagcctaaaactagaaagctgtctagattggctttaattgttcattggtttggggcctttcaatgtgtgactgatgacttcttcatgttctgtgtcattgtctctgtccgtgacctaggaagaagctttgcaagctttttaacaggacacgccttcctttcagacatctgtgtagtttgcagttgcaagaacaataaaaacctggttgagatacacctgcgggactcgcttctcaggtttttgcggagaacaagtgtcagttttctttctaagcatttagtgcgtggttgtgtg

SEQ ID NO: 617 - protein, 503 aa, Mus musculus
MPLELTQSRVQKIWVPVDHRPSLPRSCGPKLTNSPTVIVMVGLPRKTYISKKLTRYLNWIGVPTKVFNVGEYRREAVKQYSSYNFFRPDNEEAMRVRKQCAALRDVKSYLTKEGGQIAVFDATNTTRERRHMILNFAKENDFKAFFIESVCDDPTVVNIMEVKISSPDYKDCNSAEAMDDFMKRINCYEASYQPLDPDKCDRDLSLIKVIDVGRRFLVNRVQDHIQSRIVYYLMNIHVQPRTIYLCRHGENEYNLQGKIGGDSGLSSRGKKFANALSKFVEEQNLKDLRVWTSQLKSTIQTAEALRLPYEQWKALNEIDAGVCEELTYEEIRDTYPEEYALREQDKYYYRYPTGESYQDLVQRLEPVIMELERQENVLVICHQAVLRCLLAYFLDKSAEEMPYLKCPLHTVLKLTPVAYGCRVESIYLNVESDAKKGPNPLMRRNSVTPLDEPTKKPRINSFEERVASTSAALPSCLPPEVPTQLPGQNMKSSRSGADSSQKH

SEQ ID NO: 618 - DNA, 110017 bp, Homo sapiens
  misc_feature (1)...(110017): n = A,T,C or G
aggaggagccacgtggcatggaacgagggtggcctctaggagtgaccccgctgacagccagcgaggaaatggggaccctattcccactccacaggaactgaattgtgcccacaaggaggagctgggaagtggagttttctccagaggttcctgatgagaactcagctagtcagcaccttgatctccgctgggcgaggtctgtgcagagccacaggcaggcagtgtgacttctaaccttcagaatcgggagctaatgaaggggtggggcttaaaccacaaaatttctgtgtgtgtgtgtgtgtgtttttttgtttttttaaaaaaagaacactacatagcaatagaaagtaaacgaacatcccctgcattaaattgcacatgtattgaagttcagtagatgtaaattagcacagctgtctcttctttcctgaaagcattttttttgttttgttttgttttagaaacacagtctcactctgttgcgcaggctggagtgcagtggtgcgatctcagctcacggcaacctccacctccctggttcaaatgattctcctgcctcagcctcctgagtagctgggactacaggcgtgtaccaccatgcccggctaatttttgtatttttagtagagatggggttccaccgtgttagccaggatggtctcgatctcctgacctctggtgatctgcctgccttggcctcccaaagtgctgggattacagacatgagccaccatgccggccctgaaagcatttattttgaaacaatttcaaactgaaaaacacctctatcctcttctcccacactgaccaattgttcctcaccagttgtctatgtatttgctaaatcattctgtgtgtgtgtatcatgtgcgagtgcgtattttttttctgagccatctgagcccatttacccctacaaagaaagaaattcatttatataagcacataaaaaattcaaccctgatgaaatgtctattctatagacctaatgtgaagtatgaatatgcccactttacagacggacaaactaaggtggaaaagttacatgccttacccaaagccacacaaatggtaagtggcaaaaccaggttccaccttgaaatcctgggctcttttccttgtgttctgtccgtttcaattggggtccagtcggaacaagataaactactctgggtgtttcgaagagctgagatttaatataggaagccctgtaactgtaggaagccaaagctattcctttgggggactcagagaggggaatggtgtcacccaacagcccaagaatgtactcagcaccccagctctcaaagcttcaggaagggagagaccccctccacctcctgctgagcaggagcccaggagccgccccctgcaccccgggctgacctgccagagcctgaagtcaccagcttcccgtcactgctcaagcgaagtgggggtctgaattcacagcttcgccatcagctattgggggacccgcacgagtcatttagcctgcgaatgcctcattcctctgtaaaatggggcatctggtttagatgagctgtaagtttcattccagttctgaaatgactaattcttccctcattgtgttctttgactttgaacaactcatgcctctgttttgcgcctcctctttttcagtagcctctttagatccgatagcagtccaaggggaggcaagggagcctggggtggtggaggacacccgcgatgaccaacccgtgtgcttgccacggctggcttctgctccaaaggcaccctctcctcttctccacaccccatcccctcttctttctctcttgctcctcatctgagctcctttcctaggttggggaattccccaccttacagacttattttagttagttattcataactaggtatgtcttaccatggaggcagcagtagctgctgaaaccatcagatacttccccagccttccctgcagctaagggggtgaggttgagacctccacggggggagccagaagctcctgcccagcctcttaaggtaactcaagagacaaaggagcaggctcaagaggcggtgcccccatgcggatctagcgtcctgagtttgccagagccgccctctgatgtgaatttggccagagttctggcagctttggctagttctcctgactttctcccaaacctgtgagctactcgataccctccaataaattcctctctgatttaatcacccagagttggatccctagcttgcagccaaaactcctgactgacacacatgttatctcatgcaatgctcacagccaccctaggggcaggtgttattattgtctccattttacagatgaggaaactgaggcacagtgaggccaaggagcttgcatatgaagtcacgtagctgtgaggggcggcagcccccagattatgtcaccaatgcagcctaagacatggcagaaaatgcttcagggatgaggccaggtgtggtggctcacacctgtaatcccagcacttcaggaggccaaggcaggcagatcacttgagcctaggagttcaagaccagcttggacaacatggtgaaaccccgtctctaccaaaaatacaaaaaattagctgggtgtgatggcacatacctgtgatcccaggtatctgggaagctgagatgggaggactgcttgagcccgggaggttgaggccgcagtgaacggtgatcacgccactgcattcattccagcctgggccacagtcctgtctcaaaaacaaacaaacaaacaaacaaaaaacaagaagaagaaaatgcagcagtgacaagaaactcctggtcactcagcacaggcttttcctgaggacagagatgtgtggtgagagcttgtgcagcccctcctgtagaacgagagctgctccatctcagcttcctctagaaaggtgacgtttcctatagatttttgttttaagcttggagcagaggaccatactgtacaaacagcaaattaggaaaattaaacttactgttttagtggaagaaaactgatttttcttttcctttttttcgaaacgtgtctctctctgttgcccaggctggagtgcaatggcgtgaccatgactcactgcagcctcaacctcccaggttcaagccatcctccctcctcagccttcccagtggctgggagtccaggcgtgcactgccaccacacccagctaatttttaaaattttcttgtagagatggagtcttgctatattgcccaggctgtcttgaactcctggcctcaagtgatcctcctgccttggcctcccaaagtgctggaattacaggcatgagccactgtacctggccaatctgagaatgcatcctcgtggctaaatgacttattatgactttatccttcgctcagcttccctaaacgtcacataaccacagcacaattatcaaaatgtgagaattaataactggctaataatcagtgaataataattaacttgcatttcatcaactgtcctatgaatagccttttgggggttcaggatcagtccagggtgcggctgttggtcatcgtgtctcttcagtctccttgaatgtggaacgcttcctccacccgctttgtctttcgtgatttggacatttctgagacgtcctggctgggtattttgttgcacatcccttattttaggtgtctcatgttgccttgcgatcagattcagcgtatgcatttttggcaggaataccacagatgtgactcggtatcctttcctatgaaccatgtcgggaaggacgtgacgttgattccgcccattcctggtgaggtctgccagatttctcccctataaagttaccattttcccctttgtaatggataattgtctggtggggagatgctttgaatctgtccatatcctgtttctcatggtattttgcccactaattttaacacccactgatgattcttccctgaaacaagtacattgtggcattcaccaaatggtgatttttctagttccatgattccttctacatgtattggttggaattctactgtaaggaaaagctttctctcttccctcattcattcatctatttatttaaatcagtatgggctcaagattcttctttaattccatgggtcacaatccatctactaccatactatcttgttcttcagactgtcccagaagagccccttcaggtcagccctggtgtctttgggacatgtccccatcgttttggggcaccacagatgctcccagctcatgttgtgctttcccaccctaaccctctaaccctctgagatctcctggttcctttaattggaggatggtatttagaataccaagacctgggaggtagatgcactcatttactttctttttttcttctagcttgcttgcttgtttgtttgcttgcttgcttttttgcttcttttgagacagagtcgtgctctgtcacccaggctggagggcagtggtacaatctcggctcactgtaatctccgcctcctgggttcaagcgattctcatgcctcagcctcctgagtagctgggattacagacgtgcgccaccatgcccagctaatttttgtatttttagaagagacagggtttcaccatgttggccaggctggtctcaaactcccgacctcaggtgatccacctgcctcgacttcccaaaaggctgggattacaggcgtgagccaccgcgcccggcctcatttacttacttgcagtgttcatagttctctccgatgctgtgaatcatgaatcctttcacagttacatgcatgtgcgtgcacacacacacgaatggtctgagagcccatgccccagcaggtggggtttctcttgtcctgtccttctcagctgtggtgcccacccaggcgccccctcctcctcactcttcttggagaccagagcttcctattcactaccctggggcggttaaagcagcccctctctgctcccagctaaacaataatgatgataatggcaatgatcataatgatgatgataatggcaatgatcataatgatgatgataatggtaatataataatgatgatgataatggtaatactgatgataataacaatagaagcacccatttattaagctctccttgtgctgcatggacaaaacacaggctcaaagaccgtttttcacacagcataggaagggacccagcagggactcagacccatcccagatcccccagccttctggcaaactccaaggagatggggagcttgaggaggcggatccacaccacacgcgggccgtggcgtggggacagcccggtagtgggaacggctctggacactcacgtcggggatgtggcagaggccttggggtgggctctggactctcacatcggagatgtggcagaggcctcgggtgggcgtgcacaggaaaggcattggcctcaagtactccgtggacctggctggccctgcccgccgcactccttcacacaggttctttattgccattgtccccgcccgcatcaaaggatcccagcatgcttcccacagcctggaattcctttgctgggaatgggagacaaagccatactttctatcatcagagaggaaaggcccaaaatgcaaacatgcagccagagagaggctgtggcaggcaggagtttctgagtagggagtgtcagatcccctcctactgagtgccactttcccttctgagacagcatgggagccgtcagcctacgaactggagagaactccaggaaggagcccttttcttcctgcaatgagggcaaccggaagctgtggccacggcacctgctgtccccggagcctgggcaccgacgtaagggaggaaggcggcgcctcccttttcccctgccctggccacaggagcctcaggattgacagctcatctgcgggtaggtctgcccagggaggggtcgctgcataaggggtctgtagcccctggggccctggggtccctacccttggtcacctgcaggcataagtcgctcctttcctcttcagctctggggtgtggtccagaagtagtggactgaactaagcagcacaatggtcagcatcacctgggactccgcctagaatgctagaaatgcgcattcttgcccccaatccccacaagacttactcagttagaaactcgggaaacaatcagtgtgcccagccctccaggtgggtggttccgatatctgttcaggtttgagaacctttgtgctcaggacctccggttaccaaatcatgccacttacggtgaccattctcaaaagatggcagaaggaagaaggatgaggaagacttgagcctggccgggcaatccttggtttcctcatgaacccttgcaatcgggttacattttgaacatcactgggacatgctaagaactcctctggagcacagcagtgctcacatcaatagtccagcagattgagcacggagatgtcagcagacacacttgcaagtttggtgagtaataatgaaagtactcagttccgtgattcatactatagtgttgacaggtctgggaatatagtcttaatttaaaattgcttcggatcttttctccaggtctgaaaaccagagggaccgtgcccacgatccccgccgtttccctgaccagcacggctgtggcgagttcgttgttcaatcccggatggctcagcaaatccaaccccctccgccctgttctatcgccgcatggatctgcagaggcagccgttcctgccgggtggatttgccttccgcgaaggacaacacagaaccactctgagttatttgacactgacatcgatcctagttggctgactctggttggtggtgagaggacaaatgttcccagggactattaaacaaccacaaaaatctgagagggcggttatctgaacatggaacagaaacaagacagtaacgagttccaatgttcttttttttttctacacaggattcaaacgaactcagagtagcgagatcagaatacatgaatctgacctgtttttactcacaacacctctgataccaagtgcgtgggtttttttcacaccgaaaaccagttctcccaactctccagacaccaactgggtggcctacgattccgttcaaacgtgacactaactccacaggctccgaggctcagtccctcaggactgccctgagttcagacgccagcctcctgactccagcccagggtacccacacttctgtccaacttggctacaaagttgggggtttcctacattccccccaccctccctcccagtttcacattcagtaatttgctagaacagctcacagaactcaggaaggcactttactggtactggtttattattaatataaagcattggactcagaacagccagatggaaaagatgcttaggacgaggtgaggggggtggaaggccaaggggcttcctcatcctctccaggctgccacccctcccaacacacctccatgtgttcaccaacccagaaattctccacatttttttttttgagtcagcgtcttgctctgtcacccaggctggagcgcagtggcacggtctcggctcactgcaacctctgcttcctgggttcaagcaattctcctgcctcagcctcccgagcagctgggatgacaagtgtctgccacatgtctggctaatttttgtacctttagtagagacggggtttcaccatgttgaccaggctggtctcaaactcctgacctccagtgatccacccacctcggcctcccagtgctgggattacaggtgtgagccaccctgcctggctcacattctgtcatttggggctctttttttttttttttttggattcattatgtaggcatgattgattaatcactggctgttggtgattaacttaatctccagcccctctcccctccccaaaggtcagaggtctgagctgaaagttctgactaattccagctcccagcccccatcctggagctgcccagtcctctcactgacattcaaaaaacactcatccctctggagatcccaagggttttagaagctctggaccagaaaacaggatcaaagaccaaatatgcagccacggccccatccacctctgagggcatgtgctctggccttactatgacggcggcggtggcgagtctgatacaggcgggatgatgcacgctttatctggaacccttggccttggataaaatttgtcttctgtagcagttacgtccatggagctaagtccaggtccacctgccattgcaattatggcagggaaaaggacagagggagctgacgattacacctaactttggatttggggcacccttctgttcccccacttcctgcttcgctgacactcacacccccaaaggcggtggcgcagaagctgaaatcagggctcaggactccatctacagccaggcccacgagcagggtctgttctgaaggctccaccagcagctgtgtcccaagccaactggcaagacaccgtcccacccgacagtggcttcctccccgtggcgtcatctcccttccaaagagggaggaatttggactattacccacgaacgatagcaggctaagaaacaaattatgattacgaaagattaaagaaaaaaaaaaccacccacacctactggctgtacctttcctgcatgatttttgccaccgcatgggaagcgggccaattgctatttgcctgggtgttttaaatatcaggagatcaggagatttgctcctgacataattttttttcgaagtgcaacagaaaatagcacttttcacaacaattaactgttaactggctccaaagaaggtctgcttgttagacattagggaggaatagaaggcatcttctcagatgttggcctttgcggaggcaaggtcagtggtgccgggaggtgactccctgcatttccgtatgtccgtttcttaagtcgcactattacttcccttgagtaagggacgtaatattgagtaatatttattgagctgtgtgtgagagactgtttcaggctccgggaaaacagcgaacaaaataaaaacaaattggctgctttcatagaccccacacactaataagcacatagggagtcggtcaggcggtgacccgtgcggtggagagaaggcagccggcgggacgtggaagggtcgaggttaaaccgaggtagtggggaggcccccagtgaaagacgcgagtttccggggtgctccctctagccagcagttaattgcaattctgccgggcgcggtggctcacgcctgtaatcccagcactttgcgaggccgaggtgggcagatcactttaaaccaggagttcccgaccagcctgggcaacatgacaatacccgtttctacaaaaacatttagaaaaattatctgggcgtggtggcgcacgcctgtaatcccagctacttgggaggctgaagcaggagtatgggttgagcctggggaggtggaggctgcagtgagctatgatcgcaccgctgcactccagcctgggcgacagagtgagatcctgtctcaaaacacacacacacacacacacacaccccccaaaacaacaaacaaaaaaaaaaaaagagagaaagaaaaaattacacaatttcagtttgttcaatttgagtcagctggtgattcgagcgtgtcccctgtgcccgtaggacataaaagtaaaaataagatggaattccctcaggtctcgtccttcgggaaggatggctcggaacagcccgaaagagaaaagggagttggtttcttcccggaccagttttcccctgtcccgtggagtccacaagacaggcggcagcttcaaggccggcaagttccgcgtctggggggctgcgggccgcccctgcgggaccggggggatctgggcgggacagggcggcccggcccacgccccggcttcccccagcagcccgagggcgcccggagctcacggctggcgccgccccgcgcttcctgcctcgccgcggatcctcctccgcgccgtgacgcgccaggctttgaccaaatatgtccctttcccctccctcgcccgccccgccgcccgcaggcgccccgagtcgcggggctgccgcttggacgtcgtcctgtctgggtgtcgcgggccggccccgcggggagcgcccccggcgcgatgcccttcaggaaaggtaggagtcccggtgacgcggcccacgcccccagcgcgcgcggggacctgagcggccgcctgtgggtacccgagccttgggtcctcgccaggcgcggaagcactgtgcacccgggctgcggcggtgccgcccggggccaagcgagacgcgctccgccttgtcccctccgccctgcgctgcgccccggacccgcgtgtccctccagatccgcactgtctcctccggtcctgcgtgtcccctccggccccacgcgtccccctccggcctcgcgtctcctttccggcctcgcgtctcctttccggccccgcgtctcctctgcagccccgcattgtgcctccagacccgcgctacctcctccagacccgcgcgtcccctctggcgactccggccgccaccacgtgcccgagccgggggcggcacttgcagcgaattcccgcttcccgctgcgctccagccccgggccgcagatataccagggctccggacccggagagacccggagggcggcggggcccggggtcctgagggcgggattggtgggctcgggggcacggagaggggcagcgcggcgcgggaggtgggcagctctggcctgagtcccacctttgcccctcccgccctctgacccccgggcagtcatttcatcccccagccccagttgcctcctgggcaaaaccgacagatggctagggacggccgcgtgaggatgggagccgtccccagaaaagcaaactcaggcccgctgatgagcgcggcccggcccctcctgcaggggctgccctccgccttttccgccctgcgtgccagaaaggcccggctacctggtgttcctacccgcaccggggggtcccagcgcaccggaccccggtttacaggccgggtggttggaggcccagcactgcccagagccctgggcccctctcagctcaaagacccgggagagaagtgggagctgcagaagtgtggggaggggggcctcgatttgactttcaaatcagagttgtgtgactcctgcgccgtctgtttgggttgggaggggttgagttctggtgatgattgtcactcaacacccgagactcccccactgcgacctgggcacactaaggacgttgaggactgggggtgtgtgtggggggagcctggcctcccctggcactgggcctgtgctgtgccgtctctcccttcccgcacccacccatctgcctctcttctctcataactcagaggcacggccagcgtgatgctacggttgcctggaggctgtaccggacttgtttttcaaacagagggtgcctaggtatcagcgtgggctcctggcggtgaagggggtggctgctgactctcctgtcccgttggggtagagagatgggggagggtggccagaaggaaggtgacagccagcaagcaggggctctgccactcctctgtcagctggacacgtttagtcccaaggccactgtcttcggtgtctccattaatccaggtatgattcggccaccttgactctgtgggttctctggaggctctcagagtgtccctccccccctactcattaactgcaggggacaatcatttatctctgacttcatcgcttctgcccacttttgtcgatgtaggctctggttgggaaactcctaaaagggacagacttctgtttacttgtgcgctcagtagagagccttatgcggcaaagtattaaatagccaagctgctaatgtattgtttgcatatgaagattttgctttatgacagcgtattttagtgcattattagatcacacaggacaaaacatttgcaaactgccaaccaaggtaagctttggttttttggttattatcattgtttaatctgaagagaccttgctgcatgaagaggaaaatgttatccttgcatttggcagatgctacttcctggaggtcccagagtgtaagaaactgttgcttggcataagtgctgtctgcgtttcccggtcaccctggtgtgagccagggcacaggctcttggaggctttatcgaggcagagcttccccagttgcaggtgggacctctcacttagaagtaagcacagcaagtgggaactgcagggagccaggccgcggctgggtttggtgctgagccgtggtctgaagctgcctggaggggacaaggtcctcctgtgagggacagcacggcacgtcaaccctgcactgacggaggtgcaggagacgccagtgcagctactcttctgtattttttgacctttgagcgatctgaatgtgttaactattcagaaaagtaatttaaaaattgggaaatgaaaagactttgccgccctgctcccaaaaccaagagaagccatccggagaaggcgtccatcctctgcgggctggaagctgagcagggacaactgcggattccctccccaggctgtgcttctgcctcttgacaagcttcagactttgggatcagctccgtcaggggcccagcgggtaccaggcaagtcgaggagtttaatgatggggagatttgggtaggagataggaaaaccgtaagggatagtgcagagccctgggcattagcaccttgaggtttaaaatgtcaagtggcagagccaaaactagggacagcctgacagggactgtggcctctgttggagggggcgggcagtgtgtagcctgcagagagggagctgggagaatcctcaacctagacctcactccttcctccctctgatctcatggctttggcagccagagggccggggagcctgacggggtggtccatacaggggacctgacggggtggtccatacaggggatcctgatggggtggtccatacaggggagcctgacggggtggtccatacaggggagtctgctgggacacagagctgggtggatttcccttttggaggagagagggtcttcagggtacaacagagaagcaaccaaagatcttaggtgctggtcctgtccctcacttatgggaggaactagtggacagctactgaatgtagttatgggaaagatgagtggttgtgtaccacggcattcattcattctctagattgggcacttgctatgcaccagcacacgctaggtaccagctgaacagcaagacatggcgtctcctccctggagcccacctcctgtgctctccagcaagtgccagggaggggagtcagaagtccaaatgtagagcagttctcagtaggaagccccacctgaggaggctgaactccgcatggagagggtgtggcactggttgacctcctggactgtcacacaggctgtggttaggttggtgccatggtgctggctagaatggagccagagggacttagacctcatattgcacctgtccaacatggaccgcagtggtatggcatgtggcaggcaggaaccatatcaagtgggtggtggctgcatctgggccatgtcccctatgctcagcgtgaggctggagcagcagctgacagtggcagtcctggcccaggtgggggaaggatggtgcaagcattgccttcagggctcacagctcttcctgtgggtctccagggtgacggtggttagagtgggaggaaggtctgagtctttggccaatctgtctagaagaaggagaagttagtatcttgacgtgaaacataaaagaaattcatgagacgaaaaggaggcaggaagcacttcagctggacacggagaggaaagtcatgcatatcatgactaactttgggaaccacaatggagggacgctggggcagttcttcctctgcaagaacttctctccttagaaatcgaatagatgggccagtgtggtggctcatgcctgtaatcccagcactttgggaggccgaggtgggaggatcacttaaggccaggaatttgagaccaggctagacaacatagcgagaccctctctctaccaaaaaaattaaaaatcagctgggggtggtggcgtgaacttgtagtcccagctactctggagtctgagatgggaggattgcttgagcccaggagttcaaggctgcagtgagctacgatcacaccactgcactccagcctgagtgacagagcaagaccctgtctctctaaagagaaataaataagacagatggtgtagacggtgactcatctcaggtgatggaggcgtggctctaagagactgtggtcttgaataaatcgttgaggtccttttcaagtctagaatcctataacaatgtcttcagacagcagtgttccaaggatttttgtacgttccaccttcagagggacaagggaatagcaggtgaaagttctaataataaataacaataaggccgggtgcggtggctcatgcctataatcccagcacttgggaggccaaggcgggtggatcacctgaggtcaggagttcgagaccaggctggccaacatggtgaaaccctgtctctactaaaaatccaaaaattagccaggggtgggggcgggcgcctgtaattccagctacctggggagctgaggcaggagaatcacttgaacccaggaggcagaggttgcagtgagccgagatcgtgccactgcactccagcctgggcgacagagtgagactccctctcaaaaaaaaaaaaaaaaaagatacaaaatgcactgtgtgggatgtgagggcaatctggctgtgacatctgtcaccccagtaatcgtcagggttgatttggctgatctggctggctaggtgggtgtccccttcctccctcaccactccatgtgcgtccctcccaaagctgtgtgctcggtccaagaggacgaccatccccaatagaggaggactcatcttcagtcaagggtacacgagtagctgcactcccctgctagaacctccaaacaagctctcaaaatgcactgtgtgaccttactataatatcctccagttccatcccaaggatttcactcttttttatggccgagtagtattccatgttgtatatgtacattttctgtatccattcatctgttgttggacacctaggttgattccatgtcttggccgttgtgaatagcgctgcaataaacatggggtttggatgtctcttcacgccttttaagttcatgccttttctgtcaccttttccattgattctatgcacatagcacctcttgcaggcatatcttgtcccataaccagaccggaacactcatttgttctcagaatgctttctgcatggtaacttggagagctatttgagttacggtctatacctcatgcttatattggacctggtggtagcaagtgtttcataaattcttctacttggttaatctgtcattttcttttggaatgagtagttgcagagccacattaagatccttataggccaggcacggtggctcatgcctgtaacccagcacgttggacggctgagtaaggtcagaggattacttcagaccaggcgttcgagaccagcctgaccaacatggtgaaaccctgtctctactaaaaatacaaaaattaactgggcgtggtggtgggcgcctgtaatcccagctactcaggagactgaggcacgagaatcacttgaacctaggaggcggaggttgtggtgagctgaaatcgtggccactgcactccagccggggcgacagagcgagactgtctcaaaaataacaataataataaatccttataaaccctaaatgctgaaagatgatggcatttccccatgcgtaatttaaaataaagacaatacccaggctgtgcgtggtggctcacgcctgtaatcccagctcttcgggaggccgaggcgagtggatcacttgacgtcaggagtttgagaccagcctgaccaacatggtgaaaccccgtctctactaaaagtatgaacaattagccaggtatggtggcgggcacctgtaatttcagctattccggaggctgaggcaggagaaccgcttgaacctgggggggcggagattgcagtgagccaagatcctgccactgcaccctggcctgggcgacagagccaaactcagtctcagaacaacaacaacaaaaagcaaaaattgcctatcattcatgacggcaggggaagagttccaagatttccagctgggcggttgagacggtggaccaggacagcagggagacggacacagggagggagccccagtctgtggaacaccatcccacttaccgtagctccccactggcagtgtgtatgagtcttggtggtatcttgtgtgcgggtctgagctagggggcgtggccccaggagcgtccaaggttctggttggggcagccacaaggtgtctgaagagcagcggggtttggtcgtcctggcacttccgcaagcagcctttccagctgtagctccggaaggtgctctgacatgacagttcaaaaacacacttccccctggcctgggcttcaacactcacttgtcagaaagtgaggtcctgtatgccccagtcctcggccagagaagcaagaagcagatttcccagaggctgtggccccttgcattggtgaggacactggggtgctacctctgtttgaggggtgactgacaactgtgctttcttagggtggagttggtctgctgtcgtgactgtctgcttgagatactgacccctggcgatcagattctggaagtcctctcctgaggctgctgaagtcgtcccagaggcttgtccagccacagcagtggagaaagatccaatcaggcaggcaggggcaaacgggaagtcgggagggtaccctccccgctccctgagaagtgtggactttcaaaaggaagtgagaaagaggaaggtcttgcctaggcatggggtagacctgtttgatgcaggcggacttcagggaaagctggtcctcagtgccacagtgctgtggctgtcgggcggcaggcactggctcacagccgtggtggggacgccttgtttctcggaaggacagaaccgccctcctgcagctcctgttcctggcttcacattagaattaactggggagctaaaaaaaaaaaaaacctgatgccccagaaattctgatttgatagtttctgccttgatgcctagacaaaaaatgtcctgaaacaatacttcacctcagacaatactgtacatgctgatgttttctagtctgttccatttcattaagaaagattctggtcttattccagtaaattgatttcaaggccactaatgggtggtgacccacacttttgagatgcctgttccgggcatcacctcccactgcagagcctggggagccggacagctcccttcccaggctctgcagtgggaactgatgcctggaacagttcctgcagccggtctccagtgtgattcaggtcctgcggcaagttctaggtggtccaagtgaggcagaagccttgctggaggctttacccgtccacactgctgtggagcctctgagcctccatggaggctccccaagccaggcagcaggggaggaagcgtctggtaggagggtggaaggcatcacgataactagccacctgcaagggctaaatctctctgggacgtttgcacgaggaacattccgaacccatgaatagaggagggctgcggatctggtagctgaggaaattcagtagaaaagcgagaaatgtatgccaggtgcagtggcacacacctgcagccccagctacttgggaggctgaggtgggaggattgcttgagcccaggagagtgagaccagcctgggcaacatagtgagatcctgtccctacaaataaaaaattaaaaaattagctaggtgtggaggcatgtgcctgtagtgccagctacttgggaggctgaggtgggaggattgcctgagcctgggaagttgaggctgcagtgagccttgatcgtaccgctgcactccagcccgggcaacagaaagagaccttgtctttaaaaaaaggaagaagaggctgggcacggtggctcacgcctgtaatcccagcactttgggaggctgaggtgggcagatcacctgagctcagaagttcgagaccagcttgatcaacatggtgaaaccccatctctactaaaaatacaaaaaaattagctgtgcatggtggtgggtgtctgtaatcccagctactcgggaggctaaggcaggagaattgcttgaactggaaggcattgagccaagatcatgccactgcactccagcctgggagacacagcgagactctgtctcagaaaaaaaaaaagaaagaaagaaagaaataagaacagagaaaagcaagaaatgtaattgaaaggccgatgggctgccctgtcctgcgggtgcctaccctcatttgtgatgcaactgaagtcacttccataagctcttcggtcctttcagcagtgcccagtaggccaggggcggatgtaagtgcagaggctgcggcagtgaacaaaacagacaaacctcggccatggagcttacatgtgaatggggtaagcctgtgtggcttggtccttggtagatgctttgagtggctggtaggaggtcatggtgacctccctgggttggtgagcaggtgaacgctgcatgtgtcaatggatgtgaatgccaagaagaaaataactcaggaaagaggagggggaggggctgggcgaggtggctcacacctctaatcccagcattttgggaggccgaggcaggcggatcagttggggtcaggagttcgagaccagcctgtacaacatggtgaaacccctgtctctactgaaaatacaaaaattagctgggtgtggaggcaggtgcctgtaatcccagctactcaggaggctgaggcaggagaattgcttgaacctgggaggtgaggttgcagtgagctgagatcgcgccactgcacgccagcctgggagacagagcgagactccatctaaaaaaaaaaagagaggggagagggagtcagggaccgggagggaggattgtggttgcacacaggatggtcactccaggggacatttggaccaagactgaggggagtgagacagcctgaggggagtgaggcagcagacagtaccattagctcaggagcatgtccaaatagggaagtgcgaggcaaaggtcctgtggccagagcggctgagtgcaggaggaacctgcgggccagcaccgcttctgcagggtgagagggtggaagccaggtggacgcaggcttaggaagggagtggcagctcagcacgtcctcatctcccatggtagggccttgtttggcctctcagctggagacaggaaggcctgggagggttttggtggaggtgtgggctgaattaatttttttttttttttgaggcagggtcccactctgttgcccaggctggagtgcagtggcgcgttctcggctcactgcaacctctgcctctcgagttcaagcaatcctcctgcctcagcctccagggcagctgggattacaggtgcatgctaccgcgtccagctaatttttttgtatttttagtagagacggaatttcaccacgttggtcaggctggtcttgaactcctgagttcaagtgatttgcccgcctcggccttccaaagtgctgggatcataggcgcgagccaccgcgcctggtgggctgaattaacgtgacaccataaaacgtctccgccacgggtggctactatcctgagagcagactgtggggtggcgggggaggcaggagaccaggtgggagtctctgggcctgctgcaggtggctgcgatcagggtggtgttgggggtggctggattctgaatatatttaggaggcagaggcggcgggatttgatggatttgctgtggggtgagagagagtgaatcatgggtagctcccccagctgccttctgtctgatctggggagacgctgggagccaggtggccgaggcggtcgaggcctgggttgtagtgagctgcggggagcccgcactgccacagcagctgcacctcctctaggccctgtccttggtagaggctgtgagtggcccgtaggaggtcatggtgacctccatgagcagctctgtttctgtctgtggttcaaaaggatgggacccagtaagcagccttccagaaaagtccactgtgccccagctcagtcatcagacagagccatttcaagaagaaaatgacttggacaatgggggctgatgcttactgccactggcaaagaattccgaaaggttctgaggggtttactccgggcactgagcatgctctcttccaagctgggagaaaagcacttacgagtttttttctttttttttttttttttttgagacggagtcccgctctgtcgcccaggctggagggcagtggcgcgatctcggctcactgcaagctccgcctcccgggttcatgccattctcctgcctcagcctcccgagtagctgagaccacaggcgcccaccaccacgcccggctaattttttttgtatttttcatagagacggggtttcaccatgttagccaggatggtctcgatctcctgacctcgtgatccgcccgtctcagcctcccaaagtgctgggattacaggcgtgagccaccgcgcctggccgagttttttcactttcccagggtttccgtgtaaatactacacaattaccaaccaaatgtctgtccttcctccgtttccataaatgtcaagggctccactgtaagggggaagcatggacccccactccaggaagacttcctggacagaccccacccaggcacctgctgaccgggttcacttccaaatcaggatactggcttgtcctggtttgtccatatttccccggtttcaacctcgacagtcaggtcacccctacctccagctaaccctcgtgccacaggcttgttgaaagttagatggcctcattttagaaaaacagatttaaaaacctcattcgtgtttgaacatggaaagaaagaataagaaagtaggctttatggccctgggctactggcttgaaactttggaagatatttttctttcttaaaatgtttttatgtttaggagatatgttctacatgcacatagcgaacatcctacccaataggcagtttttcaaccctcacccccgctgccatcctcccaacttttggagtctccaatgtctattattccatcctgtgtgtctgtgtgttacccattgtttagctcccaaagaagagatattatatatatgtacatatatatgtgtgtatgtgtgtgtgtgtgtgtgtgtgtgtgtgtgtatttttagaggcagggttgtgatctgtctcccaggctggagtgcagtggcacgatcatggctcactgcaacctccacctcccaggctcaagcaatcctcttgcttcagcatcctgagtagctgggaccgcaggtgtgcgccaccacagtctgctttttttttcaaactttttgtggagacaaagtctccttgtgttgcccaggctggtgtccaactcgtgggctcaaatgatcctcccaccttggcctcccaaagtgctgggattataggcatgtgtcatcacgtccagcctccaaagaagagcaaattcactttaaattaaattaattaattaattaattactttttatttatcttttttgagatggagtctcgctctgcggcccaggctgatgtgcagtggcacaatctcggctcactgcaacctctgcctcccagattttaagtgattctcctgcctcagcctcccaccaccaccatgcccggctaatttttgtatttttagtagagatggggtttcgccatgttggccaggctggtctcgaatccctgacctcgtgatccgcccaccttggcctcccaaagtgctgggattagagttgtgagccactgtgcctggcccaaattctctttttaaagtatctgggctgggcgtggtgactcacgcctgtaatcccagcactttgggaggctgaggcaggtggatcacctgaggacaggagttcaaggccagcctgggcaacatggcaaaccctcttctctactaaaaatacaaaaattagctgggcgtggtggcaggcacctgtcatcccagctacttgggaggctgaggcaggagaatcgcttgatcctaagaagtagaggttgcagtgagccgagatggtgccactgcactccagcctgggccacagagcgagactccatctgaaaaaaataaaaataaatgataaaaaattttaaaaagcaattctgccaggcttattagaaaatggaaacaaggattttgtcatcaacttgctgcctcatagtaacaacaaaggtgtctgaatctgtaaatagttgtgtcttctttttttttttgagacggagtctcgctctgttgcccaggctggagtgcagtggcgcgatctcggctcactgcaagctccacctcctgggttcacgccattctcctgcctcagcctcccgagtagctgggactacaggcgcccgccgccccgcccagctaattttttgtatttttagtagaggcggggtttcaccgtgttagccaggatggtctcgatctcctgacctcgtgatccgcccgcctcggcctcccaaagtgctgggattacaggcatgagccacggcgcccagccaatagttgtgtctttggtgaaaacattctagaagttgaacgtcatctgtttataataaatgagtcagcatgtggtcctccaagaatctcgtctgctattgtcaccccatttcccgggtcctgtttataaatggggtatgacaaagggaacccacttcaagctgaaatcatctgttgttcaaatcctggattatagaaaggctttttcacttatgatttcagtgaagcaaaaggtcatgttatcatgactgctttataggaaatggatttcttaaccttctaaaacttttgaaaattcatttttgaatgagtaatatgtaacacatggcctgacagtaaatcccaatccacgttatggaaaaaccgacttgactgaataagcaggcagtccattgtttctctgtggttgtgttcttttctctggcttctgtgagaaataactgaatgacgggtaaagccttttaaaagtcaggcagtgtggctgggcgcggtggttcatgcctgtaatcccagcactttgggaagtcgagacgggtggatcacgaggtcaggagatcgagaccatcctggctaacatggtgaaaccctgcctctactaaaaataaaaaaaaaaaattagccgggcgtggtggcgggcgcctgtggtcccagctacttgggaggctgaggcaggagaatggtgtgaacccgggaggcagagcttgcagtgagccgagattgcgccactgcactccagcctggggggacagagcaagactccatcttaaaaataaataaataaataagataaaataaaataaaagtcaggcagtgtgtaacaaaaggaaataaagaaacttcacctctttagtgatcaggaaaatgcagattgagaccaaaatgaagacacgtttcactctgtgtgcccggtagaaatgaggaagcctgatggctttcagtgttgacagaatgtggaccacaaaagcccctcacacattgctggtgggccgataagtggtacaaatgccttggaggcagtttggtcttttctttggtgtaaagttgaaattcacatacttcggctaggtgcggtagctcacgcctgtaatcctagcactttgggaggcctaggcaggcggatcacctgaggtcaggagttcaagaccagcctggtcgacatggtgaaaccccatctctactaaaaatacaaaaagtcagccaggcatgatggcatacacctgtagtcccagctactccagagactgaggcaagagaatcgcttgaacctaagaggcggaggctgcagtgagctgaaatcgcagcgccactgctctctagcctgggtgacaaagcaagactccatctcaaaaaaaaaaaaagaaattcacctactcgaaaccagcaataccgttcctagtattgctgatgttcacacaatcatgttcatagcagcactctcatagaaaaacctttacacagcacaaatgcactttgacaggaggataaattattcttagtatattcacacaaggcaatattataaataagctacactcaaatagacagcaactctcaatattgttgatgactattaaaaaatcccaaaacaggccaggcgctgtggctctcacttgtaatcccagcactttgagagacggaggtaggcagatcccttgaggtcaggagttcgagatcagcctgcccaacatggtgaaaccctgtttctactagaaatacaaaaattagccaggcgtggcggtgggcacctgtaatcccagctacttgggaggctgagaagggagaatcgcttgaacaagggaggtggaggttgcagtgagaggagatcgcgccactgcactccaacctgggtaacagagcgagactctgtcttaattaaaaaaaacaaaaaaaagcaccaggcatggtggctcacacctgtaatcccagcactttgggaggctgaggcggggggatcacctgagatggggagtttgagaccagctgtcaagaaacccgtctctactaaaaatacaaaaaaattagctgggtgtggtggtgcatgcctgtaatcccagttacccgggaggctgagacaggagaatcgcttgaacccgggaggaggaggttgcggtgagccgagattacaccattgcactccagcctgggcaacaagagtgaaactccgtctgaggaaaaaaaaaaaaaacaaaacaccaaaaaaccaaaaaccaaaaacatcaaaatcattacatatggtaaggtactttttatttatttacttattgaaacagggtctcggattgtcacctaggctggagtgcagtgactcactgcagctttgacctgccaggctcaagcaatccccccacctcagcctccccagttgctatgactttaggtgtgtgccaccatgcctggctattgtttttttttttaatagagacgaggtcttgccatcttgcccaggctggtcttgaactcctagactcaagcaatcctcccgcctgagcctctcaaagtgctgagattacaggcatgagctaccatgcccggcctacgatactttttaaaataaaattaaaacaactaaaactaaacaatgctttttaggaatatatacataataaaactatgtatttttacaagattcaggataatggttacttccatttgaagggaggcagaagcagaggatgggggaatatacaaatacatgtcacttaatgtcaataattgagatgtcaattggctgatggggtcatagttgtctgttatattaaacaaacaaatacaaaagagggccattcagggatcagtgatgagagcctgagatgaggcgaggactgtgattgctcccaccctctctacctgaggtccagaaagcaagaaagaatgaagagttcccttttgacctgttacaagatcagcagtttcctgggtgcggtggctcacgcctgtaatcccagcactttgggaggctgaggcaggcagatgacctgaagtcaggagttcgagaccagcctggcaaacacagtgaaacactgtatactaaaaatacaaaaaaattagctgggcatggtggcacgcacctgtaatcccagctactcaggaggctgaggcaggagaattgcttgaacccgggaggtggaggctgcagtgagctgagatctcgccattgcattccagcctgggcgacaagagcaagactctgtctcaaaaaaaaaaaaaaaaaaaaagaggatgaagcaaatatggtaaatatggtaaaatgttaataactagtgaagatatatggagattctttgtactacttaaaaattttctaaatttgaaattacgtcaaaatgagaagttaaaagagaaatgacaggtcacttctccagtcatctcccaaccttgatgcatttggcctttttttaaatttttttaatttatttttttatttttttgagatagagtttcactcttgaagcccaggctggagtggaatggtgtgatcttggctcactgcaacctccgcttctcgggttcaagcaattctcctgcctcagactcccgagtagctgggactacaggtgcctgccaccatgcccagctactttttgtatttttagtagagacggggtttcaccatgttgggcaggctggtcttgaactcctgacctcagatggttcacctgccttggcctcccaaagtgctggaattacaggtgtgagccacagcgcctgacctcatttggcctcttctttctgttgctcaaacactcaagacttacgactcagggcctctgcaagttccccctgcctggagcagtgatagggtgactctttaccagcaatatgaggatcccatttgtttggatcatttgtaaaggtaacttttcccatttgtaactaaaaagttatctgtggagggatcctttgcagtcactcacaaagtgtgaataaaatatcctgttcccaataatctttataaaaaatttaaaaaattattttatttcattttgtcatgtccttgagtcatagatatatacacacatatgtatatatatacacacatatgtatatatatacacacacacatatatatatacacacacacatatatatacacacacacacatatatatatatatagagagagagagagagagaatctcactttgtcacccaggctggagtgcagtggtgccatcaggacttgctgttgtctagaattcctgggctcaagcgatcctcccacctcagcctcccgagtgggtgggattacaggagggtgccaccatgcctggctaattttttaatttttaattttgtagaaacagggtttcactatgttgcccagggtggcctttaatttctaatgtaaacatttttaattgtggtaaatacacttataatttaccatcttcaacatttttaagtatacagctcagtggtgttaaatatattcagtgttgtacaaccatcaccaccaaccatctctagaactttttcatcctgcaagactgaaactctgcacccattaaacaataactctcattcttcacaatccccagctcctggcagccaccattctttctgtctctgaatctgactattctagggaactcatgtgagtggaatcttacaacatttgtctgtttgtgcctggcctatttcacttagcatcaagtgctcacggctcatccacgttgtagcatgggtcagaatttccatctttttggaggcggagtaatgttctgtgtgtttagtcacattttgtgtatccattcatctgttgatggacacatggattactctaccttctggctgttgtcaataatgctgctgcgaacatgggtctacaaacatctctttgaaaccttgctttcaattctttggggtgtgtatatacaaggaataatcttttatttcatagctttagcatctattgatgattcttgagtgaaacacttatcagagtgtccgtaaaatggctatttaccatttttgtcattctttccacatttattagttggcattcttttgtaaagaagctctttcctgcccatcctcccttttactagctttaatttcatcatcattattaatagtagtaatagtaccaatgtggactccgggatttttaaaattatgactgcatgtgttagaatccattcctgacatactcaattgatgctcaagccactcccagtttgggtgagaaccctttcaggctggctgctgtgtccttgacacgcccccttcagcttttgagctctgtcttaactcctgttccaggctccttgtgtccttcccagtctcggccttgggagcagccactcctccaaggatccctgggtactttcagtggaggatggtccttagaaggctggatctgggcttttgtgtgcctcttcttgctaccggagtgtccgtgtttccagggcgtttttcatggatggagctgggaaacattttaaaattgtaaattcaaacggatcagttattccagtccagcagcacagagttcttcctctccttcccccgtcccataattgtatctttcatttgctttctgtgttttccccaggaatgttgtcttcatcttgaatctcctttgctactggctgtactcattagcaacataaaattcctcgtgataacctctgacccctatcccatgtgtgatgacaccgagttgagggagatcagacattcaatgcagaggtgggggccaagaccaagcctcctggggcttaagaaaatatctccagagacgggaagtctggaagggaactccatcacgaatattttatgttccctccctctattgttctcaatcactgcacaagtgtatattactttttttaataacaaaaaggaacttttaaggtaaccccccacaaccctatatagactggatgtcaactctttagtcctagatacacctggagcctggcgtcgtggggacagaggcaggtccctgtgctgagggcggtaagacagggcgggtaggtggggacccagctgggaggtaggggggccagacgggacatcagctcccgggagccccgctctgggcacggtgcgcgcctccaccctccattgcaccccgcgcctgcttcctcccaggtgcacctcgggcgcctaagccagctgggtcccgggccccgggagcagctgcgggcccgacgggggcgtggcgggaccggcgggggcggggcctgggggtggtccgcgcggattggctgctgcctgcggcgcacgagccggtcagcgcgcaccccgcccttcccgggccgtgcggcacgccgcgttcacgtgctgtcgcgcgccctcccggcgtgcgccgcgcggccccagcctgctctgcggcgactgtccggctcgtgagctccgcgtggatccggcgctgggccccctacgctctggggacctggggttgtgtttccggcaaaggatgttttccgagaaggcctgggagcggctgtaaataatacccgagaggaaataggcccggcaggtgtttttgcgcgtcccggcgttgggtgtggctgcggcgggcgtgcaggccgcagatgaggaaacagactaggagggatttaggcatctggactctgcggggcggcccgggcgcgcagcccgtttccctgtgggttgagggcgcgggagaagtgggcggcccaccccaccccgcgcgtggatgcggggctggggcaggtccgcggtggaggcgccgccagtgagcacccggggaccgctcctagcccccagtgtgggacacagactccctgaggacctcgtatgcgttgggtctgtggctccatccgaatcttcatgaacagggcctgcggtgaatttggggagagtgagtgagcgggtgaagggtcaggaaataagtcacaggaggcatggttgaagaattggggatgtttaacccagacatggcaggactgggcacacttgacccctgtctggaagtatttgaaagacttctgaagggggccagcccctccacacctgtgggtgtttctcgtcaggtgggaggagatactgagaaaagaaataagacacaaagtataaagaacagtgggcccaggggactggcactcagcatacgaaggacccgcactggtggccgtctctgagttccctcagtattgatcattatttttactatcttggcgaggggagtgtagcagggcaacaggtggggagaaggtcagcagggaaacatgtgagcaaaggaatctgtatcatgaataagttcaaggaaaggtactgtgccctgatgtgcacataggctaagtttatgtttccctttactcagacatctcagtgtagcaaagagtaacagagcagtattgctgccagcatatcgcctacagccacagggcggttttctcctatctcagaatagaacgaatgggattggtctgctttacaccgagacattccattcccagggatgagcaggagacagaaggcttcctcttatctcaactgcaaagaggccccctctctttcactacttctcagtacagaccctttacgggtgtctggctggggcacggtcaggtctttcccttcccaggaggccatatctcaggctgtctcagtggggggaaaccttggacaatacccaggctttcttgggcagaggtccctgcagccttctgcagtgcatggtgtccctggttaatcgagaatggagaatggcgatgacttttaccaagcatactgcctgcaaacatattgttaacaaggcacatcctgcacggccctgaatccattaaaccttgattcaatacagcacatgtttctgtgagcatagggttggggctacagttacaggttaacagcatctcaaagcagaaacaatttttcttagtatagatcaaaatggagtttcttgtgtcttccttttctgcatagacacagtaacaatctgatctctcttttccccacaacttccttatgaggaagaggctagactttccttctccctgggggcacaaaacagattttcccaggtggagaatttcaggtcagttacacagagccggcagggatgaacatgtctggcgttctttgcaggagccagatgtttacctatgttagtgggagaatagtggagctcagatgcaagttctcatctgccagactccaaagcccttgccttttctcgatgcgtctatttttttgtaaatgttttagttcagaggtacatgtgcaggtttgttatataagtaaactcgtttgttgtagattatttcatcacctaggtataagcctagtacccagtattttattttcttttttctttgtctttgtttttttttttgagacagaacctcactctgtcgcccagactgaagtgcagtggtgctatctccgctcactgcaacctctgcctcccgggttcaagcgattctcttccctcagcctcgtgagtagctgggattacaggcgtggatcaccaggctcaactttttttttttttttttttgagacgaagtctcactctgtcatccaggctggagtgcagtggcacgatcccggctcactgcaacttccgcctcctgggttcaagcgattctcctgcttcagcctccccagtagctgggattacaggtgccccgccaccacgcccagctaatttttgtgatttttagtagagataggctttctccatgttggccaggctggcctcgaacacctgagctcaggtgatccgcccgcctcggtctcccagagtgctgggattaaggtgtgagctaccgtggtagagatggggtttcgtcattttggccaggttggtctcaaactactgacctcaagtgatccacccgccttaggctcccaaagtgctgggattacagacatgagccaccgcccggcttagtatttttttttttctgagcctcttcctccttccactcaatgcatctattttagtggaatgggttcctttgtgaacaatgatgttgcagttattcatgaagtaataaagtgtttgtgtattgattgatttctttggactggagggtttgcccagccctgttgagctttgtcattgtctacctcaggggaagagggagattgtcgctggtcagaggagaatgccagggcttctctcagacggaggcagcctcccatctcaccgcaagtcggatcttgagtagcacctgtttcggcccattgcccctttaacaaggggcccaggtgcccttggacttgctagaagaataatcatgactttgagtttaacaaatgtggtcacagtattccactgcagtccacctttcccacttctcctagcccttcttcttcttttttttttttttttttttatttgagacagagtttggctcttgttgcctaggctagagtgcaatggtgcgatctcagctcaccgaaacctctgcctcccagtttaaagcaattctcctgtctcagcctcccgagtagctgggattacaggcatgcaccaccatgccctgctaattttgtattttcagtggagatggagtttctccatgttggtcaggaactccccatctcaggtgatgggcccgcctcggcctcccaaagtgctgggattacaggcgtgagccaccttgcctggcctcctagcctttcttttttgcaaatctgacactcctcccctccaccccatgtgcctagacaaggccagcatgggactcacacaggaagagctgaggactggaggagtgagtaacttttacctgagtacgtttcagccctccaggtggtaccaggtacagtcctctgagaagtcgggaggaaaacgcctgtgcgggtctcattcagctctgcggtcctcagtgtctgtctgatactgagtctgtagtgaggatgcataacggggtaaccctttctgagctcctggattcatttgctgaattaatagcttcatactctctgaagagaggaatactttaggagtctcttttttgtttctgccacatttattaaattgtcacattttaacacattttaagccattttaacatctcttgagagaaggtaggggctgtggaatgtgtataaagagacaatatcttgtttttcttggatccctagctagcagatgtgattacagtttcttatcaagaactcagccagaaaataccagccaaaccctcttcctccattggattatctgaggcagcattcgtatctggtggcctctctgctctgagcagtttgtggagctccagaagatgtctctgatgatcctcttttcttcctttcaagggatttcctagattattcatcctaaaccttggtctcattcctctcctacgcccttaggtgttaaggaattggatatctatggagatagccagcccagccctaagcgacactgtagagaaggttaaattttgtttctctttgcctgtttctggtcctttgtcccttgctaagtccctaggtcgttcctgcttttttctaggtcacatcctcagcttcttcatctgcgtcatctctaaatgacagatagtagctcagtttgcattttaactgatagctgagatctttaactccagagatgctatctaaccatttagggacaggttaaatcacattgtcttctttccctagcctgccccactctccaaccccagcattttcatacagaggggcagcttaggtaggggtgactagaggtagtgggaggctggtggaagatcatgaggtagtgagtcctggaatcctccactttgctcccacttgctgagcgagggccctggccacccacactgaccatgcttgtattcatcagctgtcctagaatgtcctgcctcaggctggaggctgaggatgccagtgagcgaggcagaacggtggcttcagtcagccttcctgggttctgatgccacctccaccactgagtagctgtgtgaccttggagaatttcccaaacatctctgtgcttcagttccctgatgtgtcagccttatgcagttgtgaggattaacacgagcagctaagcacaaaaggcttctacatggcctggtagaaaatcaggatgccaccctgctggtggccactggaaaccctattacaatccagagtgcttcctaagtgggccttattattcctgtcttaaaggaactttctgcccagcaatgacaacttggccattgctacgaccattatgcatgagtttaacgggccagaaaatgggatggggtggtctgcacagcagctgcccactcgcaggtgccgagtgtatttgcaggtctgtttgagcccttacattcaggcctggggatggatgtgggtgaatgtgcgcgacaggagcgaggcagccccagtggtctgacttacattcaaagcacttcacggaatccatctgcccagacaacctcctaaagtggtccttcgttgaatgcctctcccgtctgccccccgaaaagttatctaaaagtccccactccttatgctttctctttttgagccagagtctcgctctgtcacccaggctggagtgcactggtcactgcaacctccccctggttcaagcaattatcttgcctcagcctcccaagtagctggggctacaggcatgtgccaccacgcccggcaaattttttgtatttttagaagagacggggtcttgccatgttggccaggatggtctcgaactcttgacctcaagtgatccccccgcctcagcctcccaaagtgctgggattacaggcgtgagccaccgcgcccagtcttcttatattttcttgtcacagtgcatctgcttgggtggcaggtgcacctacctgggggagagcacattttctgttcttttcttagtcttacgcagggaggattgtgattgggactctggcggctgtgagcagggtagggggtcttaattttagtgagcaaggggcacgaatgctcagacctgggccaccatggagttgtcggggtgtgggtaggagactggcgtcacccataaatgcagagtagacccacttcctccaggatatttgactgtgatcttgggccattgtgtctgttccccaggccctgagggttctcctgggataagatgggtatgaacttgctgcgctgatggtgaaggcgggtggctgaggaacaggaagagtgcgtccagtactgcttaagaattcggtgatgtatcctgggctctctagaggcttacaaacatgtggaatctaaaagtcactcagaatttggaactctctaaatgtttatgtcccagggtgaaatcccagccctgagctctatatatgggagtggccaggagggtctgagcaccgaggaaggactggcttctgcctggctcccggttttatgtttccctaacattgttatgtcttggatgtgtatttccttaaacctttcccaggttccttttggttctgggtctaggacactgagaagattgaaacattgggagtgcactggccttgctctctggaaaggctttacttttcctcttgcctatttgcagttcccttaaattagtcacattttgggaccctcttttgcattgaatttctgggacttctgtttgtggttattttgaagtgggggtgggaggacatgcctgggcccaccccgtggttctttaatgaagacgatggttttccttttaagcaaaagaaccttgtttaccattaaccagaactctggaaatagatatttaatccccaaacagaggtgatggtgtgtctagaagcaatttaaagcctccatagcttgactagtcactttatcctgggcaactttttggattgtttggtaatctagaaacgagagagaacgctaattgcttcaacattaaagaaacccaccttctagactcactcgttcccccacccctcctttatgttttctttcttgttcctctaagaaatgaaatatagaagacgaaaatataaactggactacagcagggtgcagtggtgcatgcctgtaatcccagcactttgggaaggaggattgcctgaggccaggagtttgagactggcctgggccacatagacctccttcctacaaaaaatttaaaaagtatatttaaaccagactagaaactttcaaccacaaaaatccatggggtcattgaggtgcaaatggaaagaccaggagcaaaagtagagggagcaaaagtagagggtggggacagtgtggaggtgaggacagtatggaggtggggacagggtatggaggtggagacaatgtatggaggtggaggcggtggctgagcagagcaggaaagctgctgggggctgtgaggagctaggtttggctgggtgacagcaagggctggacagaaagtgctttcagaaaagcccaaggataaagtccaaagagattaaaggttaaaaaaaaaagaaaagctcaggaagaggaagatgacaggtccccaggggaaatctgcctaatccagcagctgggaagacaggataccctcaggcccttccttagggcaaaaggattactccgtgcaggaaggaaatattacaaagtctttcttctctattttattattattatttttttatgagacggagtttcgctcttgttgcccaggctggagtgcagtggtgcaatggtgcaatggcgtgttcttggctcaccgcaacctccgtctcccgggtgcaagtgattctcctgccccagcctcccgagtagctgggattacaggcatgcaccaccatgccaccacgcctggctaattttgtatttttagtagagacgggatttctccatgttggtcaggctagtcttgaactcccgacctcaggtgatccacccgcctcagcctcccaaagtgctgggattacagacgtaagccaccgggcccggcccttcttctctatttttaactcatcttttaaaattgttctttctttcttttttttttttttggagactgtctcgttctgttgctcgggttgaagtgcagtggcgcgatcttggctcactgcagtctcaacctcctgggctcaaggaatcctcccggctcagcctcccaagaagctgggactataggcgtgtgctgccacactcggctaattttattttttgtagagatgaggtccctctgtgttgctcgggctggtctcaaactcctggactcaaaagattctcctgccttggcctcccaaagtgccaagatgacaggtgtgagccaccactgctggcctagatatctattttttatatgaaatttctatcatgtacataatgtgttcgtgcaatagcacatgtatattagatatagataaacaggttgttgggggtagaaaagtttggatatcagatcagaaaagtttggatatctcagctcagagccacgatgagagtggggagggagcccgcgcttctcaagctcaaatgcctaggagtcctttggagatggcgttcagatgcagattcttgttccatagatctggctggagcccaaagttctgcagctggcgggctgattcagaaaacatgagttggtgcttttcctctttttgccgccgtactccattgagagtcttagtcatggagggaaacccgaaaaccaccggtgtccgggacagatactctgacgcattctcccggaacaccctggggactgcgagaaagcccctgctggctcactcgtttgctgggatcagttcccatcaggcatgcggctgtgcttcttggtatcgatttgcttcttggtcccatggcttctgcagcccacgtcgggagggcaaggtgtggtgcagcctgagagaagcatgctcctttgcaggaaggagagggaggcgcacaggcgggccttttggagcagaggaggcagaggagtccaagctgggtgcagttcctctgctgcagccctgagctgggcagacaggacacttcgctggcctttcctggcctcatacttgtcactcggtgacactgcgaccagtgtgagcaaacgttcagaaagcacatttaaacactgttacttaaaattgcaacttcacagggccagtattctttttaccatgttccaaatgaggaaaccggggtgctgaatgattaagtgacttatccaagaccacagggcttgcaaatggcaagtgggaggattgtttgagcccaggaatctgagaccagcctgagcaacatgatgagaccccatctctacaaaaaattaaaacattagctgggtgtggtggcgcatacctgtggttccagctacttgggaggctcaggcaggaggattgcttgagcccagtaggtcgaggctgcagtgagctgtgattgtgccactgcactccagcctgggccacagaacgagacttcatctcagaaaaaaaaaaaaaagttcacccaaggcagacaacttgtccagggagggcagagctagatgttcctgtgactgcagtgctggggcgcatctgtcctctgtcctgaaagcaggccgctccatgctcatctcccacaccttcacctcctgttaggccagcgtccactgcagtggcccagctcttcccagcatccccttacacaggatctgtgttcccttcatggtttggcctgcatgtccttcaacctgggacgtccactctctctcagttctgtcctcattgtgccctacttgtctacttcgggaactctccttcaccactcacctcacacccttcctccaggaagccctccctgactttctaggcagagttggagccctcaccctgggcatttccacagcagaaactgtcccaccacagccgttgctggtggtcatgtttgtgtttgccagcagcccacaagaggtcgaggcgcaacctgtagtcctcagctgctggggccgggcagtggtgtgctttcagcctggagggggcgctcaggaagaggttgtccacttgtgtgcagcttttatgtgtcctgtgcatatggttacagcaccgcttcctgtgaaggagttgagctaggggttgtgctgaatgcagagaacaagatacaaacttaaagaggcctagggtgtggcgggaaacacacaccccttcccccacctatatatgctcacgtgaaaaggtgcagacaagtatttgaggtagtgcagaaaataaatgcttggagaacagcaagggagggatgttagtagacacagagggaatagacagaggcaaagggggtttctgggtctccagagatctggggggctaggtgcaggaaggctttttttgggagagaagcagatcagctgcgggggtgcagagagagggaggggaaaggttgcttgaggcctcattgtagaggaccttccgtgaagcctaaggaggttgaacttggtcttagtggcagtcgggagccagtgattgtttctgagcaggggaagaaaaccaaagtactgtcttaggaagatgagtccctgtcagcggaatgcgcagtggacgcaaacgggaggcggggaggaagagatggggagtgagggcctgtggtccaggtgcggcatttagaatttaatccgcacagatagtaggcacggaaagaacatagatgatgtgtgcgggagttgagatttggggattgaccaggtgtggggattggagcggcttgaagaggcaagttccagtagaaggagtcattagtccttacacggtgctccttactccaaagcctgtattttttctgctgacttctctgagccttagtctcctcttctgtaaagtaacgggcttggatctcttgttatttgttctggactcctggcacagatctgctggttccttcatgccaatgacccaggcctgtttaccaggagaagcagacatcgtgacctttcccgtccagccttacagcctagtttatcaatccaggacaggggttcttagaagagtcctctctggtaaacaataaacaagtgctgttccgtctgcctcgcggtgcccccacacctgcctggccacgtcacactggcagatgggacgcgggcatcagctcaagttctgtggagcgagagattccgtggcccgggctgacctgggcttggaggcctggagctgcctgcggcccccgccgagaaagccaggagctggggctcgcttgtcaggcgtgtttctgtttctgtggcactgggcctgctgcccctggactgtggagacccagtgactggcgcagggtgagagccagggttgggaccagtgtgcgggcacaaagccccagaggaaggtgcgctctggtggctctggccctgtgatctccgtgcagccctcccacggctctgctgggggaagctctggggtccctgtgtgtgtaaaaactctgggcctgaggaatagcttctactttgtttctttctttaatttttttttttttttaatacggagtctcactctcatgtaggctggagtacagtggcacgatctcggctcactgcaacctccacctcccaggttcaaggggttctcctgccttagcctcccaagtagctgagattacacctgcctgccaccaggcctggctaatttttgtatttttattagagatggggtttcaccatgttggccaggctggtcttgaattcctgaccccaagtgttccgtgcgtctgcctcccacagtgctggggttacaggcgtgagccagtgcccccagactgttttgtttcttttctttcaaaattaaattgtccccagcttctctcctcaaacctcagttttaccccctctttggttcccatgcacaagtagagagaatatgaggttgtcatttcaatggccattatgaccagaaaattgtgagattgcatctctcagtcttgctccgtcccctctcttctttccctcctttccatcatggcactttggggcactttcaggtacacagagtgttggcaataacagtaaatatcctgaggtggggagcacttggatttgcctggcatggattgcgtgtttgtaggtgggaactcatccgagtgtggggaccacagtgctgttgtcatccccgtatgacagatggcacagctggggcaccgcaggcgccaactagcccggatctctcactgaccagcgctagggctgcaataggaacctggctggctggctccagggcccgggctcttatccgggaacagtgttgttcttatttgcctagatcaacaaagtcactgtagagaaagacaaaaacaaaacaaaatccaaaccaagtaagccaaaaaaagcttagcctggggacccagttctacatttggtggtggtcataaaagaggctacccaaatggcccgtaagcatagaaagcacttcaacctccctaattattcaagagatgcaaattaaagccacggtgagatactactccacacctgttttagttagagtggctaacaagaaaaagaccacatgttggggagactgtgactcacaccaactctcatatcagagtagaaatccatacaatcatcttggcagcatttaccagagccaagcatctgcacacagaaggatccaggaagcccccgccttggtgtagacgcatgcactcaaggtgcacagaagaatgttcactgcggcaccccaacgggtgagagcccccaaacggaaagaatgcaacgttccatcagtgtggagaagtcaagtgtggtgttcgtgcagtggaatactacagaaggatgaagaagaaacagctattgcaggaagggacacggtggaagaatcttatggggaaaatgctgagggaaggaaaccaggccaagtaaaacagatagaaagttcaagaccctgcagatcgtctgtatccgatgtcaagacatgggttcccttgaggtggtgatgggagggggcacgggggtttctgtagcgacctggttgatgggtgggggttgcataggcatgctttcctgtgaggatcgtcgagctgtgcattctgaatgtattctatacttctcatttacctgtttaattgtgcaagagatggggtctccctctgttgcccaggctggagtacagtgggcccatcatcgctcactgcaacctcgaatcctgggctcaagtgatccacccacctcagcctcctaggtagctgggaccataggtgtgcgccatcatgcctggctaatttttaagttctttgttgtccaggctgttcttgaactcctgggctcaagcaatcctcctgccttggccacccaaagcactgggattacagacttgcaccaccacacccggcctccatgttatatttccataatatgtttatttgaaaagtgacttgggtgccaggagacatgggccctccctagtcctggctgtctctaacttgtgagtgactcaagctgtctccggttccactttctggaagactaatggcttggatgagatcgtggttttcagatctgtcctagccacagaaccctctcttcaaacaagcccttacctgcaatctgaacataaaatgctacctggtgggactcacgagtgagttccggacaggacaggagacggctgtcactgggctccaggatgtgggtggcagtgcctgacttcccgctcctgcctgctgtgggagacgagcttcttgcactggggcctgatttcccaggctggcctctcagatcctgtggcttcaagttctcctggtcatgcagtgtcctggttcagcactgaattgttccctaatggtttcctgtgtggcagattccttagctctacagtgaactctaacagggtaggcttgaccggcttctgtggtttgcttggagtagttaggatgaaaattcagaacctgcctgctgactgaaatgggcgttcatgtcttagaatgctcaccagattgctttttctcttacacatagtagaggtcaataaaacggagtttgtgggatgtttcttttcttttctctttctttctttctttctttctttctttctttctttctttctttctttctttctttctttcttctttctctttcttcctttcttttctttctctttctttctttctttctttctttctttctttctttctttctttctttttcttttctttctctctctcgctctctctttcctttctttttcttttttttttttgagacggagtttcactcttgttgcccaggctggagtgcaatggtgcgatctcggctcactacaacctctgcctcccgggttcaagcaattctcctgcctcagcctaacaagtagctgggattacaggtgcccgccaccatgctgagctaattttgttttgtatttagtagagacggggtttcaccatgttaggctggtctcgaactcccgacctcaggtgatctatccgccttggcctcccaaagtttgggattacaggtgtgtgccaccgtgcctggccaggatgtttctgatgcagggataaggtggggaacttgggaaatggtgtacaccactgacggcctggggcacatggggtggacacactgggagtggatacctgaggtgggcacgtggggtggacacgtgggtgtgagtggtcacctgaggtgcacacgtgagggtggatatcatgagggtggctgtcaagagggtggatgctggttcagggctggcatgaagaccctagtcaggagggagccaaggcgtccaaggaggccctcaggctgcaagtgttggtttggccccagtcttggtgatgacaggacctttgggaatctgaagcccggtgaccttgggctgtggggagctggcgggctttatctgcccagcgtctctgccccagttttgggcctgtctgtgatgctgggcacctgctgatgtgcgcagcttcattcattcctcctccactcacccacctgaccactgtgtggggcgcccctgctgtgggccaggctggttccagggtccatcagcaacagaaacaaaaatgccctgtcctcttggggagacacaaccagcaacaagagaacagcgaaggaggcgtaggacatgcggctgatacgggcttaggggaaacgcaggcaggagagggggctgcaagctcaggcgggagctttggggccaggaaggcctggctcagaggggactcgggtcagggtcacaacaggggggtgaagccactgacccggagctgctggagagcttctggggatggacagagtccgccccacgggtccctcctgccctccctcggtgcctgccctgggccgtggagatgactggggagcagctgggcgttattttccccggggccagggtgggcatctcggcctcgagttgatctgaaaggatttactgctgtcagagccaccccatcgtgtgcagcacggactgggggggatttgaaggcagagggcctggggtgtgtccagccccacctgcccctcggccccaatctgcttctggagagtggcctggctgagccgggacgcagcgcactggtccctaccttggaggcctgactcccttgagaagtgtccccaacccagttcccgtctcactaccagccaccacctccccagcacggggtcctccgcaggtgatttcatctctgaggcggctttcttatctctggaagagcagtactatctccctggtggagtcgttctaaaaatgaaaggcaatgtgttcaaagtgcccaacacgtgcctgccgtattcaataaaagggagctagtattcatttaacagctgagaagaaaaacagtgaacacttcttgagctctgtttatctgccttgttttactggaggagaaagtggggcacagagaaattcagttattggtccgaggtcacacagcgtgtgagtcgggaaggaaggggcagctggaatttgaacctggcagtctggcttccctctggggaagagcagtggatgagggcgaagccgacaagagcccaaactcatctgcgctgcgctgcttttgagccacacaaatccaaataagggatcatccaaatcctttattttctctcgaagttttgtgatcattaatcagttaacagcttgttcccttctgtgctggacaacccccagctgcaaggggcaggaatggagcatgggggaggctgtaaaatagatcactcaggcgtttccctagcgagccccccgggaatgaacagaagggtttctctcctatggtgggatgttgctgtccatgggggtcgtcgaaggacgggtgtggaggcccaggaggactgcaggcaagaggggagaaaaggaagaacccgtctcccctcaactggatcatcatgggctgtgttgcactggtaaaccaaggtgccaaggctgcggcagctcagatgggaaggggaccctgttttctgagcatgcagacgccaggattataggacattctgccaggcacagaaaccacgagagcccaccttccccaaaggctgctggctccaaagtggggagggagtggttgttcccaggtgataagtgatgagaagaccgttgagcccccagagtgacacccaagcatgtaactaactcgagaccaggagcatccactgacaaacgcccggtgaggtcgatcctggtggcaggatccaggtgctagtcgggtcctgagtcgagttgctggactcgcagcatttaaccattcaaaataaccagctttaaaaatgtgtgtgggccaggctcggtggcgctcgcctgtaatcccagcactttgggaggccaaggcaagaggattgcttgagcccaggagtttgtgagcagctgggcaacatagtgagaccctgtctctaaaagaaaaaaaaaatgctgtaattgacattctttttaatggatggatggatggaggaatgaatgaatgattgctttgcaagacagcatgaacctcaggttccagagtcaggcttaaagcaatcagattgagggggaccatgtaatattttttcctaacattaacaacaggcttattgtacaaaggacaggaaaatatgaagaaagaaatcattcataattacatagcagaatagccattgttaacatttcaattttcttcaagttttttcttttctttcctttggttttgttgctgttttgttttgttttttgacagagtctcccactttgcccaagctggagtacagtggctcagccgtggctcactgcagcctcaaactcctgggctcaaacaatcctcttgtgtcagcctcctgagtagctgaaactacaggtgtgcttcaccacacctggctaatctttaaattttttgtagagatggggtcttgctatgttgtccaggctggtctcaaacccctggcctcaagcagtcctctcacctcaccttccaaagtgctgagattacaggtgcaagccaccgtgccctaggttattttaatatagtttatcaccaatgtatgcaattctgtgttctgagtgctttacttttaatgacccaaactaagatgttctactctgtgtgttagttctctggcaagtagcagaattgtggtatgtgttcctaaaactaagatgtatcctgatcacgtgacagaggctgatacctctttaaaagataaagtttggaagtgaaacagagactagaacagatatttgtcacacccatgttctattttattttcatttgtaattattttagagacagagtctggctctgtcgctcaggctggagtgcagtggtgcagtcatagtacactgtaacctcaaactcctgggctcaagctatcgccccacctcagcctcccaagcagccagtactgtaggtgtgtgccatcacacctgactagtatttccaaaaaaatgttttgtagagataaagtcttgctgtgttggctctgctggtctcaaactcctggcctggagtgatcctctagtctcagcctcagtagctgggattatagtcatgagcctctgcacgcagcccacgcccatgtttatatcagcattattcacagtaacaaagaggtgggagcaacccaagttccatggagggatgaacagataagcaaaatatggcccatccacacagtggaatattatgcagccttaaacaagaaggaaatgctgacatatgctacaacatacatcagccctgaagacaatgttctgagtgaaataagcgagacataaaaagacaaatactggctgggtgcagtggctcacgcctgtaatcccaacactttgggaggctgaggcgggaggattggttcagtccaggagttcaagaccagcctgggaaacatagcgaggcctcactgcagggtgtggtgggacacatctgtgggcctagttactcaggaggctagggtgggaggatcacttgagcccaggtgctcaaggctgcagtgagccaagattgtgccactgcactccagcctgggcgatagagtaagactccgtttaaaaaaaaaaaaaaaaaaaaaaagacaaatactgcatgattccactcatatgcgatctctagaagaatcacactcacagagacaaagtagaatggaggtggccaggggctggggagggagaatggggagctggtgtttaaatggggacacagtttccattggagaagatggaaaaattctggagctggatggtagcgatggctgcataacactgtgattgtgcttactgccctgaactgtgtgcctaaagatggggaaaatggacaattttatgtatgttttgctacaataaaacaaaaagcaaaagataagagttggagctgaggtccctggcttctggcctcctcagtcttggcggattcttcctccctgtctccccaagttttctctctaatccctcacctggcttttctgggcaaaggccagcccgcttctcaccacccccttctctcttgcatatgcatccccccaacattcacacagaagcacgcacacacacaccccttgaggtctagactgggggtctgggtgcaggagggtctgagctgggagacctccccactgcagcagcagtgtcacaaacaagttgtcctgcacctaagactaatctggagtggaggctgggaaggaagcggtcctggtgctgccggcagcctttccatcctagggccgagctggctggggagaatgaggggcctttgaagtcccaggccgatcccttcgccagacctcccaggccaggtctccacgccagcactgtgtttcatcacaagtgcaaagcttccagcagagcagtaggtcccgagcgggagtgccgggatgtggcctcgaggcccccgcctgtcattgtctcccagcctcaggccctgttccccttctaggcttgtgccacaccaggctaagaatcagagcctgggtgtgggggcagggggagctggaggagcgggcaggactgcccagtgctttcctggcttagctgggcgaaatccaaatgcagtgaagttcgccttgcagtccagtgtccatggccagggcaggagggcagagggctgagcctctgccagacagagcagtgcccttcccagccccccagggtcttcacttgcttcacagagggtcagctggaaggactatggggccccacagacccacctgtcgccacaggttgagaacatggatggggcggtgcccagcacggtccctggctccaggacacagtgcacagccacagcccatacacaccccagccccaaacctaggagacttggtccttctgtgtcacacctctgttctccctggagttgcaggggattttctctggaaactacctagtagtttagggtcctaagaatttatccaatcttctttcagaagatcacccagttcttcattctcaaaaacaaagcacaaagactttgaacagctgcggaatggcttgtcataagccacacaggagaaaagtccgcaggcccagcaccacgccaactttggggttggcttattctagaatctagactatttttttgctcacaaattatctctaaaacacctccagctccactaggattctgtttactaactgcttcctgtgcacctgtctcatttcctcaacaaggaatagaatgcttgcagtcaggtgccccagccccaccagcctgaagctgggcttgtagctggcaccatggtaggtggcagtgaaaactggagtctggcctggtgtggtggctcatgcctgtaatcccagcactttgggaggctgaggcaggtgaatcacctgaggtcaggagttcgagaccagcctggtcaaaaaaaaaaatatatatatatatatgtatataaataatatataaataattacatgtatagttttgaaagcaggaattttttttttaatttttttttttgagacagagtctcgctctgtcacccaggctggagtgcagtggcgcgatctcggctcactgcaagctctgcctcccgggttcacgccattctcctgcctcagcctcccaagtagttgggactacagacaactgccaccacgcccggctaatttttttttatatttttagtagagacggggtttcaccgtgttagccagggtggtcttgatctcctgacctcgtgatccacccgcctcgccctcccaaagtgctgggattacaggtgtgagccaccgcgcctggcctcaaagctggaatctttacatgacaggcatgagcatcactggagatgctttttgttttttattttattttattttatttttgagacagaatcttgctctgttgcccagactggagtgcagtggtgccatctcggctcactgcaatctccgccttctgggttcaagtgatccttgtgcgtcagcctcccgagtagctggggttgtaggtgcccaccaccacgcccggttaatttttgtatttttagtagagacggggtttcgccgtgttgtccagcctggtctcgagcttctgacctcaggtgatctgcctgcctcagccccacaaagtgctaggattacaggtgtgagctaccacacccagcctggagaagctttttaaacattgcacccccaaaagccccatcctggcaattctggtttaatcggtctgggatggggttgacacaatgggtagttttgaagttccttggtgattcttttttttattttgtattttttgagatggagtctcactcttgtcacccaggctggagtgcaatggtgtgatctcggctcactgcaacctctgcctcccaggttcaagtgattctcctgcctcagcctcctgaggaactgggattacaggctcccaccactgtgcctggctaatttttgtattttcagtagagacgggggttttaccacgttggccaggctggtttcgaactcctgacctcaggtgatccacctgcctcggactcccaaagtgctggaattacaggtgtgagtcaccgcgcctggccttttttttttttttttttttaagagagcgtgtttagctgtgttgcccaggctggtcccaaactcctgggctcaagtgatcctcccatctcggcctcccaaagtgttggggctacaggcgtgagccagcctgccggccttcctcatggctcttacgtaccacaggtattgaaagccactgatctccaccatggtcagacttagccatcagcttcgcacgttcactctttttctctccccagattatttaacaagttagcctggatctcaatttattgaaacccgacacaaaaaccctgatttaaataaccaggaggcccagttatttccatgaggacactagaggaagaagcactagggtgaccacggcacgccccacgagggcctctgtggccttgagacacatcactctctgcccacaaggactctcagctctttctctgctcctctcctttgatccctctgctgggggtggattacagaaagaactgctggcttcctccgtaatctctttacaaggccccttggggtgggccgttccgagctggttccactcatccgcttactcacagtggcaggagggttagccactaagctgtttatcagtcattgataacttcacatgaggcttacattcttttctgaaaacacattttcacaaggatggagagaacacaccatagaaacaggccactgcgggggcgaggagacggcagagggacgccagggtctcccatcggctcacctctggtctcgcccctcttccaccgggtgctgctggacctgtggtccagccaggggctcatctgggtcactacctggcactcaggccctcacccagttataccagatcagtacttcctccccgctcctttttttttttttttttttttgagatggagtttcacttttgtcaccaaggctggagtgcaatgtgagatttcggctcactgcaacctctgcctcctgggttcaagcgattttcctgcctcagcctcccgagtagctgggattacaggcacccaccaccatgcccagctaatttttgtatttttagttgagacagggtttcgccatgttggccaggctggtcttgaactcctgacctcaggtgatccacctgcctcagcctcccaaagtgctgggattacaggcatgagccaccgcgcctggcccctgtcctccagttttaagaactcgagcccctctcccagtggtataaagtcttgctgatagggaagagcaggaaccttggtggcccagtagaactactggtgaccctggctgtcagagatagagcaaggccagaataggaaggtgattggtggtgttttcggtggtatatgatggagaaatgattagaaataaaactattttgttttttattttattattaatattctaattagaaagtttgtattagcattttaatgatattcataatatacttcatagttagggatgcttttggctgtaagtaactggatactggaccagcggtggcttaactccatggaactaatcacacgaccacatcctgtggcatcctcagcaaaggggtagatgggcccagtgatgactcattcctgtggatggaatggaaaataactttttctgaaactgggagtctctgtctccctccattagccaatcaaggttcattcagctgagcagtgtggagtggttgcaggtataccagtgaacagtgcccccacataaagtgaaattcaccttcacctttcttttactattactacatgctatttagttatcaggggaaactgaatttgtcacagatcatttcaagaatggcactgtgtatgtggattggagattaaatgtataaacatcatggtcttgtctggctgcacagtgtagtatcttttctcgctcttaaacaatttctcattttttgtagagatggggtcttgctatgctgcccaggctggtctcaaactcctggtctcaagccatcctcccacctcagcctcccaaagtgctgggattacaggtgtgagccactgcacctagcctttattcgttctttttataataaaaggctatgttttagaaggtgcttgttgaaaaagtatgttttaggaagaagatactgtggctgagactgctagcatcccccaataccccttctctttgcttcctcagtagcagaatcccaggcagttgcccagctcagaggctatgttgcctccctgcatttgcggggaggtgtgccgccacgactgaagctggccagggagaccaatgtggaagtgcagtgtgggcttctgaaaagttgtctcgaaagtgaaaaggcagccgggcgcagcgactcatacctgtaatcccagcattttgggaggccaaggcgggcagatcactgaaggttgggagttcaagactagcctggccaacatggtgaatccctgtttctactaaaaaaaaaaaaattagctggacatggtggtgggtgcctgtaatcccagctacttgggaggctgaggcaggaggattgcttgaaccagggaggtgggggttgcagtgagctgagattgcaccactgcactccagcctgggccacagagtgatactccgtctcagaaaaaaaagtgaaaaggcaagggcctttttgtcctatctcacttcgccttactgccagtagtagcttggtatttaaatagtgtaacaggtgcagtgtggtttatattacgctgtctcatgtacagtaagtgatgagatgggagaagtttagacaactgctctaggctgcgtctctacaaattactcatttcacgttgggcaggtctttcgttgtcagcaaatggaaagtcaaattaaatgtatttgtcgttatctttcagcattggtgtttgaaatattagtgatgtcttgattcattgtttattcaaaatagaatttttagctgccatgggtttaaaaaaggtaagaattttgctcagaagtgtgcaccttccgaaactgaggatcatccttttgaggtgaatgtgcagaattattagcatttatacttctcatgaactttaacatttttgagttttagctgttttgaaataattccagacttaatagaaaagttgcagaaatagtgcaaagtgttccatagcactctcacctagattctgcaagtgttaccatttgactcctctatcattctctccctctccatttctatctatctatctatctatctatctatccatccatccatttacctacctacatatatatatatatctgcctcataaagaggaagagaaaatatatttatatggatatatatgtgtacgtgtgtgtgtgtgtgtgtctgaatacagagagaaatatatgtcgtgcccagcccctatttttttttctgaaccatttgagagttagacgcagacatgatgcccttttgtccctaagtacttcagggtgtatttcctcaaaacaagcacagtatcatgattgaaatcaggatatcaacactgatacagttctgttatctaatatgcaaacttcaagtctcaccaattttcccactactgctctttacctttagcaaaatcaagaacaacatttagagtgattcaaggtttcatccaggctcacaagcctttcatctagtgtgtcctcaatctttgctgcctctcatggcctttgtatttttgaaaagtgcaggcactgatttttttttaaacattttttttcaaaagtttaaaatgcgataaaaatgtgtgacacaaaatctaccatcttaatcatttttaaatgtgtacagttcagtagtgttagatgtattcacgccattgtgcaatagatctctagaaccttttcatcttataaaactgaaactctgcacccaataaacaacaattcctaatttcccccaccgcctgcccctgacgtcccccgttctgctttctgtttctgtgaatctcttgtagtgaccttgtgtaagtggaatcatacggtgtttttctttctatatctggcctgcttcgcttagcaaaaagtccttaaggttgacctctggtgtagctctgacggatttccttccttttaatttttttttttttttttttttagacggagtctcgctctgtcccccaggctggagtgcagtggcgcgatctcggctcactgcaagctccgcctcccaggttcacgccattctcctgcctcagcctcccgagtagctgggactacaggcgcccgccaccttgcccggctaattttttaaaaaaattttttagtggaaacggggtttcactgtgttagccaggatggtctcgatctcctgacctcgtgatccgcccgccttggcctcccaaagtgctaggattacaggcgtgagccaccgcacctggcgatttccttcctttttaaggctaatattcaattgtctgtaaattccacatttggctcatgcattccatctgtcgatggacactttggttgctttacctgtttgctattgtgaatgatgctgcaatgggcatacgtgtgcacgtatctcttccagagtcaggtcacttattttttagaatatccctaatttttttagaatatccttagtttttagaaaataaggtcacttattttttagaattttttagaatatttagaacttgggtccatctgttgcttcttcctaattagctttaggttctgtgtgtttggcagggatgctcgagtagtagtgatgtgcctgtcacagaccagactgctgatggtgaggttcacttttttttttttttttttgggagacagtctcgctctgtcacccaggctggagtgcagtggcgcgatctctgctcactacaaccaccacctcccaggttcaagcgattctcctgcctcagcctcccgagtagctgggactacaggcatgcaccaccaagcccagctaatttttgtatttttagtagtgatggggtttcaccatgttggacaggctggtctcgaactcctgacctcaagtgatccgcccgcctcggcctcccagagtgctgggattacaggcgtgagccactgcacctggcttgagggtaactttatcacttgcttaaagatggtgcccgccagttttctctactatatggtcactattttgtccctttgtgataagtaaggattctgtggggagatattttgagtctctgcaaatatctgtttttattttttatttttgagatggagtctcgctttgtcatccaggctggagtgcagtggtgtgatctcggctcactgcaacctctgccttccgggttcaagtgattctcctgcctcagccttccgagtagctgggattacaggcacccatgaccacgcccagctaatttttgtgtttttagtggagatggagtttcaccatgttggccaggctggtcttaaactcctggcctcaagtgatccacccgccttggcctctcaaagtgctgagattacaggcgtgagccaccacgcccagctgcaaatatcttgtttgttatcaagcttccacccactcggtgattcttgtgtgaaacaattattcctgcagtgattacccagggatgacctacagattccgtcgttccttctgtacttatttgttgatattctactctaaggaaaagctttcccatctcctacatgcattcattcattcattgtatccacagttgagtggattcatgtgttcctatgtttctctgggttttagtctattactatcattattcattttgttgttcacattgtacaggattttgggtgcagtggctcatgcctataatccagcactttgggagactgaggcaggggggactgcttgaggctgggaatttgaaaccaacctgggcaacatcgtgagaccccatccctacaaaaaaacaaaaacaaaaacaacagattgtaccagatttggccagtggggaaccctttagaataggctcgtgtgtttcttgatatatccacatcatcttcccattaacttctatttcaacatcagggttttctgtgcctcatgtctctatttatttcggagatagggtcttgctctgtcacccaggctggagtgcagtggtgcgatcttggctcagtgcaacctccgcctccccggttcaaggaattctggtgcctcagactcctgagtagctgggattataggcgtctgccaacatgcccagctaatttttgtagtttttgtagagatggagtttctccatattggccaggctggtcttgaactcctgggcttaagcgatcctcccagttcttcggcctctcaaagtgctgggattacaagggtgagccacgacacccagccaacttcctgtctttcaacagtgatcaattgtgggtatacatgacatacgaaataacaaagattaaatctatttcaagctgtcaagtggccgaacaccgaaggctgccacaggaaaattatttaaagatacatttgttaaaaatacgttgattgattaagaagttagaaattgaaacagaactatttctacttagggtgtgaaccccatatcacactctgaatccccaccagcagggaccgctcaagacccgttgcatgccaagggtcttgacaaaggaatgtcccacccaatctagggctcctagcccctggactacccaacttggtcaaatgtatgcctcactgttccatcagcggtttcacttaatatagcagttctagactcagagacttttacacagagaaccccgagatcattctgaacttgaggtgcaggacagtgcattgtgcaaagtcacagagttgctgagaggtagagctgggatgggggctcgggccccccctagaatcacaggatccttacgtccagggctagtcagaagccagcgagtttgagtcgcagctgttggggaagtccctctggaatggtttcgacaggtaggatctggctgctgcatttgccgtccctctggcccaccgctgtccactgtacagagaaggcatctctttctaccttcaaatcagcatctggtttctgttcacaggagcaacgcgatgcacgacaacccccgcgccttcgtcagtggctctaactcctgtcacagccttgttccttctccctgtctcgctctttagccgtttctcgtagggatggtgtccaggtggctcggacaccctggtcgccgttctctgggggtagatgagtttatgaagaccaaattggatatgagcaaaagcactcttggtaaaactgtattcaatcaatccctagatgagtatttttttaactatccaggcccaccccagatgtctgaatagatttcttctgatcttggctactctgtgatttggccttcactccttgatttacccagcagagtcaatgacattccccaatacacacacacacacacacacacacacacacacacacacacacacacagctttctgaggaggagtacacagaagggaacacgatccagtctcaacactggcgatgacagaccgtcccattctctcatttgaaccctacacattgatccagcccagcctggaggtttcctaacatctcgtcagcagctagcatcgctgtccaaaacctgcccgttttttttttctttcttcttttttttttttttttggcttgatttggctctatttttagaatgttttccactgggagaaggaagaaatatgaggggaacagagcagggagaggtgccagctgtggcttgccagcctagggttgctccgtggcatgtgtttacactgcagtcatgggccggccttgcctggcccctgcgggtcacccgggcatgcttcccatacccagcagaacgtgatctgggttccagtttctgttctccctagtcctgggttaggaaactcagttgttttgacattgactcttcccctcacccgtgtgtgtgtgtgtgtgtgtgtgtgtgtgtgtgtgtgtgtgtgtgttgggggatgtcactgatctgctggggaaaccaaggggtgaagaccaaatcatagagcagcccagatcagagggaatctattcagacatctggggtgggcttgcacagttacaaaaagtgctcatccagggattggttgacctaatactttatagtttttccaaaagtgcttttgctcatatccagtttggtcttcgtaaggacctcttgaggtagatggggctgctgttctcattctacagatgattttactgtgaatggctgtctgtccacctcagagccctgcaggatttatggaagctgcttccagcttcttatgtgagccagtactcgctcctacttaggattatatattgaggttggacatggtggcttatgcctgtaatcccatcactttgaaaggcaggagatttgcttgaggccaggagtttgagaccagcctgggcagcataatgagaccccctgtctctacaaaaacaaaagatagaaattagttgagtgtggtggcatgcgcccataatcccagatactcgggaggctgaagtgggaggacagtttgagcccagaaactctaggctgcactagagtttgtgtgattgcaccactgcactgcagtctgggcaacagagccagaccctgtctcaaaaaaacaaaacaaaacaaaacaaaaaaggattgtgtatccattagttgaatcgctgcaaaggtaaacattcattcattcattaagcaagcatagattgaacaccttctccatgtcggacactgtggtaggatctggtgattcaaagatgaacagctgtccctgtttctaagttgcctgtagtccagtgattactctcaggtttctgtctcaggtgtccgtgtggagagactgccaaacaggctttgtgtgagcaacaaggctgttgatttcacctgggtgcaggcgggctgagtccaaaaaaggagtcagcaaagggtggtgggattatcattggttcttataggttttgggataggcggtggagttaagagcaatgttttgggggcagtgggtggatctcagaaagtacattctcaagggtggggagaattacaaagaaacttcttaagggtgggggagattgtaaagaaccttcttaagggtgggggagattacaaagtacattgatcagttaggttggggcagaaacaaatcacaatggtggaatatcatcagttaagtcgattttcacttctgtgaatcttcagttgcttcaggccatctggatgtatatgtgcaggtcactggggatatgatggcttagcttgggctcagaggcctgacagtttctattaatatttgtatttcattgagaacaatgggaaccattggtgtctgccatttgggaagtggaagagatgcttagacagataagggagcagaggtctagacgaggtgtagagagggtcagaaaccaggttggggttcctaactcccaagccacgtccccagccacctaccgcagtcactgtcttgccctcccattcctattggataagctttggagataagacaagcctggttcatcacggttgagtctctaaacctagatatgcagaggttccctggaattgcttcttgagtccctgattaattcagctcttgacatcacaagatgaactcactctttagtgaattgcacagacttttgaaaactatgtttccgctgcgctaaagtctaggagcgggctccttagcctgaaggatgcctgtttcaatgggacgtgacagctgctttcaaacatttaagggcgagcacctgttgttggagggggatgcaggcttaacccatgtgcagcaacagaaagagacaagggggcatttccaggaagatcaactcagcttagtgtaagcaatgtctttctagccagtagcgccatctgataatggagtaaacagcttggagccaaagagccagaggtctaagctgaggatcccaggactcttcaacaggggtttgtggattcagtgggaagctggcccaagagctttcaagggccttggagtgaccacctgatttgtccctttgcacagtttgcctggtgctgcacttagagcttcactctgtgaagggcatagaacaccaacactcttctcatggcaaggatgggcttttgctcctgtttcttttcttttttctttttttttttttgagactgagtcttgctctatcacccaggctggaatgcagtggcgcaatctcggctcactgcaacctccgccttccaggttcgagctattctcctgccttggcctcccgagtagctgggattacaggcacctcttaccatacctggctaatttttgtatttttatagagatggggtttcaccacattggtcagtctggtcttgaactcctgagctaaagtgatctgcctgcctcagcctcccaaagtgctgggattacaggcgtgagccactgcgctcgcctcctgttcctttttcatccacgctttggaagaagatggtgtcagggtcatagaagacccttagagaggagacatggggtggggtggtttaggcattagtagtggccatgtttcccctaccctgaatggggctttgcccagggctgttccatcgggtttatctgggcctcacagacgtctagagttttcttcatcttgttgtgtctgggtctgcacaatactgaggaattgtctggcaagaaacaaagctactcatgttctaggacatagttccatggctaagcatgaaaacaagcaagatccaagtgttcaagggcccctgcaaccctgacatgcctcctaggtggctggccatgtctgcatggggtcactgcggcccaggactcagactttcctctagaagttggttttggcagtgtacccagggagactgagtcaccaagcaaactggtaagagaatgcagataaacgtggttcacttccaggaggatcacaactgccagcagagagtattcggggggctccccgcagaattctcttgggggagaaggtaggtgggagttaggggccattgtgtgtggcgaggcagagaagggagaattcgggctactgtcctggctgctctggcagagccaaggtggtgtgatacgtgagtttctcagtccattttccattcacttattctcatggcagatggtgatctcctttggggaggtgaggcccgtcactacttaatgtggcaaggttgcgggttccaacatcctgctctttttctactctacccctccccttgttttcaagactttgagaggaattttccagaatcaagctttctggctctccttcctcttttgctttcataaggacaaacactattcgggggagagggcgggagagatattgagagccaaggcacatgagacagcacgggcagcagggtgctgcctcgtgagcttgccttttttttttttttcttttttgagatggagtctcgctctgtctcctaggctggagtgcactggtgcaatcacaactcactgcagcctccacctcccggttcaagcgattcttccacctcagcctcccaagtagctgggaccacaggcgcctgctaccacacccggctaattttttgtattattttttgtagagatggtggattagtcagggttctgtagagggacagaactaataggatagatgtatatataaggggagtttattaaggagcattgactcccacgatcacaaggtgaggtccacaataggccgtctgcaagctgaggagcaaggaagccagtccaggtcccaaaacctcaaaagtgggaagttaatagtgcagccttcagtctgtggtcaaaggtccaagagtcccaaagctgaagaatttggagtctgatgtttgagggcaggaagcattcagcacaggagaaagatgtaggcgcagagactaagccagtctagtctttccacggtcttctgcctgcttttgttcgggccctgctggcagctgattagatggtgtccacccagacggagggtgggtctgcctctcccagtccactcactcaaatgttaatctcctttggcaacaccctcacagacacacccaggatttttcaatccaatcatcttgacactcagtattcaccatcacagatggagtcttgctatgttgcccaggctggtctcaaattcctgtccttaagcaatcctccccccgtcacgctcccaaagtgctgggattacaggcctgagccactgtacctggcttgttttaatcttttatactgcatttttactgtacttattattattattattattatttttgagacagagtcttgctctgtcccccaggctggagtgcaatggcgtgatctcggctcactgcagcctctgcctcccaggttcaagcgattgtcctgcctcagcctcccaagtagctaggattataggtccccgccaccatgcccagctaatttttgtacttttagtagttttaccatgttggtcaggctggtctcgaactcctgaactcagatgatccacccacctcggcttctcaaagttctaggattacaggtgtgagccacagcacctggccttacagtacattttctatgtttagatatacaaatacctaccattgtgttacagttgcctacagtattctgtagagtcacatgctgtacaggtttgtaccctaggagcaacaggctataccatgtaacctagatgtgtagtaggctctgccatctaggtttgtgtaagttcactctgtgatgtttgcacaatgacggaattgcttagtgatgcatttctcagaacatatccccatcattagccaacacatgactgtatttcttttcttcttcttttgcttgaccaataaattaggacatcttaaaacttttgagaaatacacaaaaagctcaagccatcctccacatcttttattttttttttaaggaagataaaacatattcattattccttaagtggaagtgaatcctcataaaggtcttcctctctgtcgtcttcatgttgagtagactgggaaggaggaagagggggctggtcttgctgtctcaggggtggcagaggcaggagaaagtaggtgtacctgtgtgattcaaatgtgttgttcaaggtcaactgtatatggttggctctcacgatctaatattttacataggaatcttatatctctgtctgtcataaataaaatgaacttaaaatttccttttcttttactttttgttttaccaatcaaggttatgctagcctcagaaatgactagagttgcttttattcttttctattttctggaacaatttacttagataaatcatctgaggtcaggagttcaagaccagactggccaacatggtgaaatgctgtctctactaaagatacaaaaaaaattagccaagcatggtggcacaagcctgtaataccagttactcaggaggctgaggcaggagaatcgcttgaacctgagaggcggaggtggcagtaagccgagatggtaccactgcactccaaccagggtgatagcatgagactccgtctcaaaaaaaaaaaaaaagaaaaagaaaagaaaagaaaaggaaatgcccacaggagatggagtgacagggtcggggcagagagaaatggaaacttactggagggtttgccgggacttaagttgagcaatttgagtcacttcacccagagccaggctatggctgctgtgtattctcctcacatccacttaatgagacactaagtccactagattggagaaaaatatatgatatttgtagaaaaataataattttttttgagacagagtctcgctctgtcactcaggctggagtgcagtggcacaatcttggctcactgcaacctccacctcctgggttcaagtgattcttgtgcctcagcctcccgagtagctgggattacaggtgtgtaccaccacacccagctaatttttgtatttttagtaaagacgaggttttgccatgttggccaggctggtctcgaactcctgacctcaagtgatctgcccgccttggcctcccaaagtactgggattacaggcgtgagccaccacacctggcctctccatgtcttttcatgacttgatagctcatttctctttagaacggcatcatattccattgtttggatgttccatagtttatccatttacctaccaaaggacatcttggttgtttccatattttaacaattaccaataaagctggtataaacatctatgtgcatgttatgaattggtttttcgaacccccaacatgacattgtgtggatagtctcagtctctgttctcaatcatgtgtgagttacaaataatttattgaaataagagccccctccccgtgtctttggctggtgatgatggaagggtttgtttcagtgttttgtttggtgtctcacttctctccctcatacatgggatttttctcaagagcaaatagtgacacttggtgtctaatgagcaacttctgattgctcccagactaccatgcttgtcacctcactctctctggggcagcgggtaggtcctagcttggtttgaacgttttaacctggctatggctggcacaggatcacggaaatgcggttgcttgtgtttgttgttacagcagcatttggaagcactggtaggagttagatgacattggctggcacagaagtgtgggaacaaaggtgatcctggagaaaaaccactccactgtcctctcaaggctggaccgagctcagtgaattcagctatgtgagcacctcaccaggcacttgcttttttttttttctttttttgtgacagggtctcactctgtcacccaggctggagtgcaatggtgcaatcacagctcactgcaacctctgcctcctgggctcaggtgatcctcccacctcagtctccaaaataactgggaccacaggtgcgagccaccatgcccagctatttttaaattttttttttttttttttttttttttgcagagatggggtttcatgttgcccaggctggtctcttaactcctgagctcaagcaatccgtccgcctgagccacccaaagtgctgggattacaggtgcgaaccactgcactggccaggatcattttcaataattgccctgctaatgtctcattctactcacggaaggtccttctctgacctttccttcccaaacagctcaattgttctaggtgagtctgaatcacagcctgatcagcggctaaattaggattccactcagcaccctggggttagggtggccctataatgagtctcctagggagctagctatctgcgtccgtgtcaagcagaagggaaaaacaaaaacaaaccaacaaaaaccccagcaaactctgctcctaattggctttcttctttgatctctgacctggttccttgactactctaatctcaactccctttacttcttcccataaagcaagtggggttgactaggtagtcttgaagtttccttctatctttcatagtttctaggaccatgacctaggagaaatcatcaatctgcgctagccttggtgttattgtagctgtaaaagaatcatcgtattagaggaacatttacgttattgggagcgttttctgaagggccgcctttgtgatacccaggttagtaggagggaagttggccaagccctagttggacatttggggtgaagatggggcattagcagagctagggaatgagttaggaggatgtccaaactagtaaactcggaaccagtaaattaccagaatacagttgcagttgggttgtttataagtgattttgtagtgaagcagtttcatctctcatgagggctctaccctaacttacctggggctgtaaaggctgtcaggagttctagctggccattaaaaaaacaaaaacaggtgtgcattcgtccttgctcccacgcactcccagttggcacttagatgtaaggagcggggcggggggggcggggggtggtggtggggcggggattgagttaacttccttttgcctgctgcagagcaagtgcaggaggcgaatgggggaagaacatagtcttccctctagactcggaacgcgttattgacagacaggaaaagtgcccggtctgcgaaagttcagctggacctccgggacatcaactccctgtgccctaagagctgaccgctgtcagatgcgttatctaggtcaagagatgaatgatgtgccgctgctggggcagacgccgtctctctgctctccctgtgagctgaaaccagcagtgtttgcaagcttgtagggagtgtggaagaaggccccctggtccgcttgcctcgcctgtacgtgtgcaaaatcggtgggcaagcagcgggcgcgcaggtgcaccgtcattccccaggaaccgcgggcgctctttgcaggggtgcagccgctctccccgcgcgcagcctacagccctccccgacccccgcgaaccccagggcgggaactcgtcccggtggcgcgggcgctcgctgcctgctgtttccctcttcgggtcagcccactcttatttcaggagtggagtgggactctcccctgggcgtttagggtgtcgcctctggcatgtgctcccactgcagaaaacaagtccaaatgcaacgcatcgggtttctgaacagccgccagagcgcggaaaccagaccgtcagcaaagctgtcgcgggaacaggggctctgagagggcggcgcggggggcggggtgccggagtgggggtcgaggcgggagggggagtgggggtcgaggcgtgggggagggtggcggggcacaggccaggtggccgatgttgcgcgttccggggcccctcggcaggcggcgggtcgggaggagtggaggcccgggtggggcgggcgcgcggggcgggagcagccccggtcgccgcctgggcgcgggcgccctccctgtggagcatgcgggacgtgagcgacgtgtggcagcctctgcgcagacttttccgccgcggtgtaggtttcagcgagcgccgccttccctccaatcacagcccagcctcagcgctaagtgtgcacctctctgcaaggcggcgcagcgctcctgtactgaggcttcgtttgcaaaagttacatccgtcccggcgcgggcggcggttccccaccaaaagcaacccagatcttccccgcacgcctctgacctgactgcacgactgtcacaagtcgcgagctggtgcaaactgcgagggccgggaaaggagacggggcacgcatgcaccaaaaagtggggaggcagagctgcagggtgtgcaggataacggagtgaattttaggagtctgcctaataaggggccgcccccaatagttttccctcgacttaggtaatgaattgcagatcgaaatgggtctagttttattcattcttctactcggggcgataaaggtttattgaatggtgtacatggtgagtgtgaaaaccagatgccagctgcccccagccccagtccacttcagtccagctccccggggctttcccgccccctcctcgtacccagcaccgcgggcctctcaaggttcccagtctttgggctaggggaggggagcaaggctcagttcaagtccaggtttctaagggattcaggaaagtggacaaggacgaggtgaggtgggaggatcagggaagcctcctccccgcgggtcgcccgggtcgtggcgggggatgggctcacgggtattatcagggagcagcctggcccatgtccttacctggactgcgcctgccccacagcgcgtgttaggaatgcagagtattggggctccatggccctaaaggagctgcattggtaggatgcactttaagcagcttcccaagggattcggctgcggggtccacggtctacactgggcaggactgcgtctctgctctcctcccggccagcacagttgaggtgaggggccggaattagtcggggaagctgtgccagacgtcccgaggggacaacgggacgaggggataacagcagccaggacccttcagcagggctgggcgcgctccaggcccggggcagggcggcgggagctggtgcaccgccgtcgccggcccgcagggggagctcgcaggctgcttcccggctcgcccaccctcctccccacgtggaagggggctgggacccaaggaatgcggcccgccccgaggctgacgtacgcgtctgcggccagcccggactctttaaaagccggcggtgcgcggggcatcccagccaagccggagaggaggcgagcggcagggcctggtggcgagagcgcggctgtcactgcgcccgagcatcccagagctttccgagcggacgagccggccgtgccgggcatccccagcctcgctaccctcgcagcacacgtcgagccccgcacaggcgagggtccggaacttagcccaaagcacgtttcccctggcagcgcaggaaacgcccggccgcgcgccggcgcacgcccccctctcctcctttgttccgggggtcggcggccgctctcctgccagcgtcgggatctcggccccgggaggcgggccgtcgggcgcagccgcgaagatgccgttggaactgacgcagagccgagtgcagaagatctgggtgcccgtggaccacaggccctcgttgcccagatgtgagtgcagctgcgcggagccgggttgcagggcgggctgcgccgggccgggccattgtgtggggcggctttgtgccgacgcccctctgcggggggcgcgcccgtgcgggtcgcgccggcggggcggggcggaggcgcgggctgcgcgtccttggccgggcggcgggggcgctgtggcccttgtcccggtggctgccccgccggcccggaaacggcgagtgcgcccggccgggctgcgtaccccgagacggagggacgcgcgcgcctgggcaggccagggaggggatccacatcctccgcgatccctgtcctcgacacccgtctcgggcggccgtcgccggagcgcagcccagggacccggccgctcgcgcctccgccccttttcaccgtccggatctcctctctctgcatgtttccatctcctctcccgccttgctatgcattcctatcccctcgcttcacttaataacctatttctctgtcctgttttctctttcgatatatatgtctctgtttttctctgtttctacctccttcctctcccactgtttctttctgcttttatctctttctctctccttctctctcttccgtgcatctccagtgccatgggggcgcccgtgctgggggcgccaggagagccacctggagccacgcctgtgtccccggctttggggagggtcggtgggttggtgagtgcacggttggcgctgctccacgcgccccgggcgcacgcactccccggtgctcggaattggctggcagtaccctgccccgccccgccggtcgccgcccccgccaccagcgatcgcttgggagagggttacctcgagctccacctcagctgcggagcgccgccgcggaaaagggcgggtgggcagcgcagaggggcgacgctgcctctccaggtaatgcgccccggctcccatgggctggacagggagccgcctggtgcggttttgcccaggtcaggtcgtagcctgagtagtgaccgtgggatccaggtgcaaactctcgaggtggcttcgggtcatccgaaggcgcctgagcgcaggcggctggcaggcagggttgcccggctactatgtttcttaggacggcccccgcgggacttggcagctctcctggagccctgctcggtctgaatcaccggcctcgtccagacctgcccctctccccacacccacccccatggtgtgccctgggtggggacgtcagcagatccaccctggtggacttcagggttctggggtagccctcaggagaggtcttgttccccctctttgtgaggtagcccaggactgggggatgtgggtgtgttgcccagcccagtcagatgcgcttgaactggggtggcccatggttctcttgtctttgtgtaaaacctgtaagtggagtggaatgcagctcttaaatccccagggaggtttggccaaggccaaatgcagaaacaacttttgcataaagcaagtattatctctatagcactttgtaaactgcattggaggctagtcccacatatgtaaatacatgtgattgtatacgaatgcccacgggtctgagaggagtgtcccgtgacttccagggctctgagatctgttggcatcagctcagttgtgatcttgagaactccagcgtgcaccaaggcgtcctccctccaggcttggatcctgatccattagaccccatcaacctgcacgtctcacacgcagtgagagatttgcctaagaatccctgtcagaatcattcagagctggagggtgggaatttggctaaagccaatggattaattcttttgtcccgcctactgctggtatcctcctgtgtggctttgaggtatagtctcagacacattccttcttgtaaaaagatccgcagcctgggtatcgcacatccttatttcaagtggtggtgtctttctcagtttatatagtcacatttaactcttactggaatggagggaagaaggtgtttctatttggtatctttcctgacaccctccctcgattctctaatggcatttgggacattgggtgggtttttctttcttccttttttttttttttttttttttttgacatggcgtttcactctgtcaccgaggctggagtgcagtggtgcgatctcggctcactgcaacttctgcctccgggtttcaagcgattctcgtgcctcagtctcccgagaagctgggattacaggcgcacgccgccatgcccagctaattttcatatttttagtaaagacggggtttcaccatgttggccaggctggtcttgaactcctgacctcaagtgatccgcccacctcagcctcccaaagtgctgggattataggcatgagccaccacgcccagctgggtgggttttctttctcctaaacttgttgccacctttataagtggccttctcattggaggtctgcagcagagttccctgaggtttattatttatttatttatttatttatttattcatttttgaggtggagtctcacactgtcacccaggatggagggcagtgnnnnnnnnnnnnnnnnnnnnnnnnnnnnnnnnnnnnnnnnnnnnnnnnnnnnnnnnnnnnnnnnnnnnnnnnnnnnnnnnnnnnnnnnnnnnnnnnnnnnnnnnnnnnnnnnnnnnnnnnnnnnnnnnnnnnnnnnnnnnnnnnnnnnnnnnnnnnnnnnnnnnnnnnnnnnnnnnnnnnnnnnnnnnnnnnnnnnnnnnnnnnnnnnnnnnnnnnnnnnnnnnnnnnnnnnnnnnnnnnnnnnnnnnnnnnnnnnnnnnnnnnnnnnnnnnnnnnnnnnnnnnnnnnnnnnnnnnnnnnnnnnnnnnnnnnnnnnnnnnnnnnnnnnnnnnnnnnnnnnnnnnnnnnnnnnnnnnnnnnnnnnnnnnnnnnnnnnnnnnnnnnnnnnnnnnnnnnnnnnnnnnnnnnnnnnnnnnnnnnnnnnnnnnnnnnnnnnnnnnnnnnnnnnnnnnnnnnnnnacccaggctggagggcagtggtgcgaccatagctcactgtaaccaccaactcttgggctcaagtgatgctcccgcctcagcctgtccagtagccgggactataagtgtgcaccaccacacccggctaattaaaaaaaatttttttttttttttaattgatcattcttgggtgtttctcgcagagggggatttggcagggtcataggacaatagtggagggaaggtcagcagataaacaagtgaacaaaggtctctggttttcctaggcagagtgtttgtgtccctgggtacttgagattagggagtggtgatgactctcaacgagcatgctgccttcaagcatctgttcaacaaagcacatcttgcaccgcccttaatccatccaaccctgagtggacacagcacatgtttcagagagcacagggttgggggtaaggtcatagatcaacaggatcccaaggcataagaatttttcttagtacagaacaaaatgaaaagtctcccatgtctacttctttctacacagacacagcaaccatccgatttctcaatctttccccgcccctttcccccctttctattccacaaaaccgccattgtcatcatggcccgttctcaatgagctgttgggtacacctcccagacggggtggtggccgggcagaggggctcctcacttcccagtaggggcggccgggcagaggcgcccctcacctcccggacggggcggctggccgggcagggggctgacccccccacctccctcccggacggggtggctgccgggcggagacgctcctcacatcccagatggggcggcggggcagagacgctccccacatctcagacgatgggcggccgggcagagatgctcctcactgcctagatgggatggcggccaggaagaggcgctcctcactttccagactgggcagccaggcagaggggctcctcacatcccagacgatgggcggccaggcagagacactcctcactttccagactgggcagccaggcagaggggctcctcacatcccagacgatgggtggccaggcagagacgctcctcacttcccagacggggtggcggccgggcagaggctgcaatctcggcactttgggaggccaaggcaggcggctgggaggtggaagttgtagcgagccgagatcacgccactgcaccccagcctgggcaccattgagcactgagtgaacgagactccgtctgcaatcccggcacctcgggaggccgaggctggcggatcactcgcggttaggagctggagaccagcccggccaacacagcgaaaccccgtctccaccaaaaaaatacgaaaaccagtcaggcgtggcggcgcctcctgcaatcgcaggcactcggcaggctgaggcaggagaatcaggcagggaggttgcagtgagccgagatggcagcagtacagtccagctttggctcggcatcagagggagaccgtggggagagggagagggagagggagctggagcttaaaaaaattttttcatagagatggggtcttgctatgttgctcaggctgatctcgaactcctggcctcaagtgatcctcccaccttggcctcccaaagtgctgaggttacaggcatgtgctaccattcccagcctccctgaggtttattgctgaagagggtgtctaggacgctgctttttatagacaaagaacagtaaaacaacaaaacaaaaattactatatcaataagctgcattatattcttgccttggaggcaccttaacgggatgccctgttgctacatcaacatgatggtaaatgcttcttacaaaacctgtagcttccttcgcatgcatcctgtaactcctgctgacttactgaatttgtgagtcagcataatggtcaagaagtacctttttgactggcaaggtctagctttcctttctgttcatcgtcactaaaattcaagagcctgtgtgttctgagggatcctgggtaccgggctgagtcctaagatggtgcttgggacttggcattacatcagaagttgccatgatcagtggagcaaaggagggggtattagtactggtcaggccagtgcaggtttgtaagcaacaggtaaaagacagccttttaaagcaccaaactttgttttttgagacagggtctcactgtcacccaggctggagtgcaatggtgcaatcacgtctcattgaagccttgaactcctgggctcaagcaatcctgtctcagcctcctgagtagctgggactaggggcatgtgctactgcgcccagctaatttttaaaaatatttttgcacaaacggggtctctctatgttgcccaagctggtctcgaattcctggcctcaagcaatgcccccttggcctcccaaagtgctgggattacaggtgtaagccagggtacctggccttttttttttttttttttttttgcctcttaaaaacagtggaatgagacaaactgccagcttgtctttgctcaggatttagacaccatgggaaattgagtctgaagaaaggttgatgtggcactcaaatacggatagaaagactttcatctcagtagcgagttacgccggctgctggtgttctagcttaaggaagctgggtgggtgatgtcctagagaaatccctgccttatccctgggtagcccctacagtttatttactggggatgcattctgtgttagggtttgagtcagtgggggatacaggctgtgcgggctgctgcctgtctgtctgtgcattgcacaccatcagagaggttagtaacttaatctatccgggagagcaggagtaggaacccgggggtgccagcctctcactgtccaggtgggggattcaccatccatctggctgctgctttccataactggctccttgtgtcactgtatcccacggctgagtgttcaccagccagccttcagttttcttttggcttcctgtgtatgtttgcctgcagggaacgggccccagtaggcagtctccgttgtacactaatggtactgcgggcttgtagacagccagggcttagcccaaaggcactactcagccacattgaccctgtatcccccaagtagcctctgtctcacgggtacccagtgcatgtacctggtgcatgtgcccagtgagcgagcgtgtcatgaacgtagcaaccttgcagaattgaagttccgtgcctgggacttggtgactttctgggaggacttacccacgtggccatggttgtaaccatgacaacactttgagctcgagtcccccagattcaattcgggtgtttagtctgttacccagggtctttacacagttgttccttcccctgtaacctggtgacatctgtgttcccccaggcatgtttcagttgacctctaaagtccacatctaaacacatttaagtttcacaactttcaaaaactttaggtgtgtgaaaaagaagttaaaatattgaacatttacataaaatgaaatgagacacaaatactctttggaaaatcttgtgttaaactcaataattttttttttgtttttttgagacagagttttgctctgtttcccaggctggagtgcattggtacaatctcggctcactgcaacctctgcctcccaggttcaagcgattctcctacctcagcagatgggattacaggtgcctgctaccacgcctggctaatttttgtatttttagtatagacggggttttgccatgttgaccaggctggtttcgaactcctgacctcaggtggtctgccctcctctgctgcccaaagtgctgggagaccatgcccagccaatacttaccttttctttttttttttttttttttgagacggtgtctcactctgtcacccagactggagtgcagtggcgtgaccttggctcactgcaagctgcgcctcccaggttcacgccattctcctggcttagcctcctgagtagctgggactacaggcgcctgccatcacgcctggctaatgttttgtatttttaatagagatggggtttcgctgtggtctcgatttcctgacctcgtgatccgcccgccttggcctcccagagggctgggattacaggcctgagccaccgcgcccggtgcgcccctctcttgttctgcagtcaaatgctctacccctgagctatatccccagttatagcgcccctctctttgaatcttactatgcgacagagcagtgcatagggagaatggctctgctttgccaagaagggactggcagtttatttgggtttgaaatccagtctgaccttttgccctgtgtatttactctgctgtctttattgttattgttattttccctccctaaatgtctactgccagaggacatttgttcctatgattagtgggtagacataatcccctgttggataaatcaatcagcctctgcttccttggcgtggttccgacagaaatattctgcgtatgtgcacagctgagagtatgtgtgtgcgtctgtctctgcatatctgggtgctcttaggagcagcggtgcggtggggacacctggtaagaccaggagggacccttggcctaggggaagggtcagtggatgggtattgtttccaaggagttgctgctactttcctgatatggcagctacagctgccagaatgaccctgggcacggtggggtgtgcctcactggctttcggggaggccaccatctctccgtgtgcccctggggacacaagaaagcccctgggtgcttggtgctttgtgcttgtttgttccactcatgtgctcaggatgcccggctcaccctgggcagtgaaaagcatctgttttcgaggaactgtttgttctaggtcactggacatcaagagcatggcagcccagggcttttagcgtctcctcatctgctgatagcctgtctgtctccttactctgcctgctgagaaggccactaatggtctccaaatagcatggaggggacaaaggcccggcatgccatgcctgcttccctgcccccacctccaggcctagcggcagatcctggacattgacttcagtttggagccctgctgggggctccggcttacagaggggcttctttcctgagctgcggcccgtctgaggggtggtggctcccgcagcataagcctgctcagctcggacatcagggcctctgtccagtctgacatctgcctggttctgtgtgcggctttcagaggttttcctgcaggccatgtgggctgtgtctgggaatgatgaggacagccaggctaaccacgtggcagtgagtgctgggccgtgccgcccaggcgggagctggcgggtatcatctggccctggagcttgcatgtcggcaggatgcgggagttgcctgagactcccagggccaggcgacagccggggagatactgggccctcggctcccagaacagggggcttctggctgctttctgaaaaacccagcaaaaccccccttcctgctgttttgtcttactgagatgccaagaccgtcatgtagcagcggaagccaggagggagctggcaggcaagagcatctccaggtttcctggagacagtggtggagccggcccctggctgaggcttcgtgaccggcccttccctcggcagggccccagcattcatccgagcctggcaccagaagagggggtcagacagggcgtgagaggctcgggtggaggatttacctgtccactggggtaattttagcattctgcctccctgacctactttcatttgataaactcttttcttctaattattttttaatttatttgtttgtagaggcagggccttgctatgttgcccaggctggtctcaaactcatggtctcaagtgatcctcttgcctcggcctcccaaagggctgggatcacaggcatgaaccaccgcgcctggctgtaaactcctacttttaaaaattgcctttttaaagattttttttagaaactctgcccatacctctgtgtggaggtttggatattgatggtgggcctctctgtctcttgacccctgggccccagcccctgcccctctgtccccatgttgtattggaatccaccctcttgactcttagccccactctccctcgggagaggaatcctttcctcccacccgcaggagcatttccactttcactgtggtgtcagtcactggttccctgctaggtttagcgccctgggtatcagctcaggaatttggggttgggactgtctttgccaagtagaacctaaaggcaggactgagggacagggtgtggctggggggctgtggccactagggttgcctggtcccactgtggtacaatgccaggggcttcaggatggggagatgaaatgaaaatttcgatgaatgctgggtgtggtagctatgcctgtaatcccagcactctgggaggattgtttgagaccaggactttgagaccagcctgggcaacacagcgagaccccatctctacaaagataaaaaattagccagggatggtggtgtacacacttgtagtcccagctattggggaggctaaggccggaggattgtttaagtctagaggtttgaggctgcagtaatcatggtggccaccgtgctcccgcctgggcaacagagtgagaccctgtctcaaaaacatttttggtgaaattcttcagtgttattgttgggtgtggcctctgctcctcttctccggtcacttggttgatgacacacccttcttgcttgtttttccagcctgtgggccaaagctgaccaactcccccaccgtcatcgtcatggtgggcctccccgcccggggcaagacctacatctccaagaagctgactcgctacctcaactggattggcgtccccacaaaaggtgagactgggtctcgaggccggacccctgctcgtgcaaaaacttgaccttccatctcagttgctggtttcacaggcaggaccacccctgggcgcctctgtcccctggtcggggagtctgatcctgcctcccatgcagctgggtccccttcacactgtgtctacaccctttttcttctgttggggttttctcctcactggccattctctttcccactcctctaagtcctgccccgactcagatttcacctccttcaaagccatctccagccacctcagtcctttacattcctgtcgcactcagtcctagctaacattcctctgctgatagccctaagcactgcctaccgtagatcaagggtcttcaacccccaggctgtggactgctatgttgggtggcctgttaggaacctggctgcaggaggtgagtggcagtgagtgcgcattcctgcctgagctccgcctccagtctgatcagtggtggcattagattcccatgggagtgaaccctattgtgaactgggcatgtgatggatctaggttgtgtgctccttatgataatctaatgcctgatgatctgaggtggaacagtttcatcccaaagccgtacacccacaacctccctgtccgtggcaaaattgtcttccacgaaagtggtccctggtgccaaaaaggatggggactgctgttgtggatgacacatttaagaatctctgcttggtcttcccaactagatggggaacatcttgtggataggcactgggtattttttttttttcaattaattttattttagattcgggtacatgtgcatgtttgttacctgagtatattgcatattgattggggattgggcttctagtgaacctgttacccagacagtgaacattgtacccaactggttattttttaacccttgctcatctcccaccctcccctcttttgaaaggatggtttttatgtttaccatccccgctgtgcccagctcagtgcccaggaaccatgggacacatgtctccggccctggccctggcggctgcaccagcagaagggttgacctagatctggcggtgggcatgaggccccactcgctttctgataccattggtggaaatgtgttgtccctatttttgctagacttggggcctccccccacccatcctcacagtctcagtctctggtttaggatattgtgggactgagattgtagacttggctggaggggacagtgtcgcagagcatgcggcaggggcattgcagctggactggggaagccgggcagcctgtgccctgctgtcctcaggagttgagggtagcgtaggactgggcgccggcattgcttccacaccatctcattcaagtcggtgtggttggcctggtggctcttcctttggtcgatcctatggtcccggtgtgagctggccccttcctcctgctcgatcatccagactgttctctttcccgtccacagtgttcaacgtcggggagtatcgccgggaggctgtgaagcagtacagctcctacaacttcttccgccccgacaatgaggaagccatgaaagtccggaagtaaggctgggccgcgggcgtagggctgggctgtgggaataaggctgggccgcgggcataaggctgggctgcaggagtaaggctgggccgcgggcgtagggctgggctgtgggaataaggctgggctgcggggctgcgggtgtaaggctgggctgcgggcttgggcttgctttgttctgagccaggctctgtaggaggcagagaaagccggcctgcgggtgggtcctgctggtggcttcagggctgtgcagtgtgggaacaaggttgctgctctcatctgttccctgagggtctcgctgagctgaccctcactgggacagagccgcagaagcaccctcactgagaattagcaagtcctgttcatcgggagtgtctgtttatgtttggaaaggatttcttgttaagtgcgagttgattgtgaaaccctagtgcaagggtgttcggccccggctgtatgctggagtctcctgggggatgctaaaatccctgatgccaggccccaccccagaccagttagtgcaactctgtgggtggctctgggcagccatttcttagcagctccccaggagtggttcccgcgtgcagcccggtgcgagcaccgcctcccgagggttcctgaggccacccgtgtggggccccaggttggaagcctctgggcctgaggggtgctggccagcctgcccagcgctaagcagtgtagaatggaaccaccagttactctgcttgtcggggcgcgtcgggagttgcttgggctgccccagcggatgcaccagcgctgacattcgggcaatgtcttgtgcattccaggcaatgtgccttagctgccttgagagatgtcaaaagctacctggcgaaagaagggggacaaattgcggtaagtccaggcaatgtagccggctcggtgtccagtcccacccatgagggtgtcctcaccggcctggggtgtaccgagacctgtgcctctggccctgagggtggaggaaagcaggtggccagggcagcccaatggctcaggaaggcggatgtggggcggactcagggacccaccccctctgtggccagtcccacacctccagggcgggcaggactcgagttacccacaggaccactggcccttccttgtacactgtcccattgcacattactgttttggttgtttgcttttggggtatttcccccacgctaccacccctgagtgctgttggtagttgcgggaggcctgcctcctaagcactccctggagaggactgtgggcaggcacaagctcccctgaagcacttttggggcttattcctggagatgatgggtctggcatctttgctgttctggtaaacgttgttaaactcaaacttagagttttcttcctggccctttgctctccatatcaggttttcgatgccaccaatactactagagagaggagacacatgatccttcattttgccaaagaaaatgactttaaggtgagctgagcgtcttgtgttgtgctagagggctcgggagagaggaaaaggcctcaggaagcggcctgagtcctgcttggtccttcccctcctgctgccatgttccttagtcctgctcggtccctcccctcctgctgcccacgttttgtggccttaaatttgggcctttgtgtggtagggctcttgggggccgtggggcgttccagaggctgcagtgaggaggtgggctttcctgtgtttgggagttggtgggtggcgtgcttccgccttgtccgggtgatgacatcgcagtgatggcaaggttgatccttcgtggtgtttgttttctaacatccccacctcacttccaccaggcgtttttcatcgagtcggtgtgcgacgaccctacagttgtggcctccaatatcatggtaagacagccgggagccccgtgcttctgcggcagcgtagaccacaagggcatttgcagtctgaggaagtgggggaccgggtccagctcggaagcgcagctgagcccttaggatgagcagcccccagctgactgttgattgggaggtcagacctacagagcggtttttaacccagaggcctgtcctgtgagggactagctccatccagggcagtgggcaggcttggatgggacgtaggaaataattcagggagataggattagtttctgttggtggcaggagcctgacagctagtggtgatggagctgctggggcagagggccgctcactgcccctaatgggacaggtggcagcaagtggatcacttgctgtgacagctccaggaggtaagaatgcttgggcattggcaaaagtccatagggctcagcagcctcctgagtttgggaggtaagactctcctcctgctgatgcatctcgtgaacctgccacaaaccctcctgtctgtgctgtgcaggggagcttgcccagataaattgagggcacttggcatcataacttgatgaatttctccagtgttaccacttgatagcaatatatataaacaggaatggttactatggagacttactacaagctgccaccctgtgttggagataatttcctcttcagcttaaacatatcagaatatgacaattctataaagaaaagcagttctgaaaacttaacactgggacgctgtggtgctggcatctttgcacctttagaggggatgctaagcatgtgttagccccgttatcttccccaaggtggtggaagtatttctagatatctttaggaaatgaattcctgtttcaggaagggctatttgaattgtgaaaagtcagtttagatttgtccagtgggagcaggaggctcagagtatgagggtttgccacctttctttggctgggcactccttgttccccttggtagacagcagggtgcagctgtgaagtcatttttcccagtgagtggtcaccaatgtgcttagcaaggagtttagcatttgtctggttgtccactagcagatagtcatttgccccaacccaccatgttcagaaatctctttctgatgaaatctcaaagcagcttggtagagccaggcatttgtgaacttagatttttttttttaaattgtggcaaaatatacataatgtaaaatttaccatcttaatcatttttattatttatttatttatttatttatttatttattgaaacggactctccttctgttgcccaggctggaatgcagtgacacggtcttggctcactgcaacctctgcctcccaggttcaagcgattctcctgcctcagcctcccgaatagctgggattacaggtgtgcgccaccatgcccagctaattttttttgtatttttagaggagacgggggtttcactgtgttggccaggctggtctcaaactcctgacctcaagtgatctgcttgccttggcctcccaaagtgctgggattacaggcgtgagccactgcatccggccattttagctattttttaagtgtgcagtacagcagcaaattatattcccattgttgggcaaccgccacactctatccgcaggactttctcatcttccccggctgaaactgtgccaggacacaggcacagctcccgactgactcgatctttgaagagtggctgcctctcagtgacggcagtggttgatgagaaaaagagcccaggcattcagaaatgctgagtttccctaaaatccacctggtttctggggcctgtgccactgtgggtgttggtagacctgtgttgttgcctaggagagcgagccctgcaaaggagccggcacagccctagttggagaagcagttaaccacggactggtcacactggggctgcctcaggcagtggggggtggaggagaaaccacacaaggccagaggcatctctgggaactcctgagcataccttagaaccagcagcctcctcccggcacggggagcattgcggatcctcacgtggagctcggttgagttcagcgccaggctgtctggcggtgactcgggcacgggacagatcctgacttgctggagcattcagaggtgttcattatggaatccctgtgggtttcctgtctctgtccttccggcttcagttctccatctccccagggaatcctccccatgtaacatcaggctgtgactcagcccccagcatctttctccctttctcttacacgctgggccggataatctttatactgagccttctgtgcgctccccttttgaaagccccaaatcctgcttaatctcagcagaaagccttccagcgtgatttatcagccacccctttgtggtgttgcaggaagttaaaatctccagcccggattacaaagactgcaactcggcagaagccatggacgacttcatgaagaggatcagttgctatgaagccagctaccagcccctcgaccccgacaaatgcgacaggtgattcccgtggctggccgtctctgcaagacccacatgagggttctcactgaattcttgatgttcccacaaaggatttgctcctggatacctttaaaaaaatttttttaagacagttttttttgtagagatgaggtctcgctatgttgcccgggctggtcttgagctcctggcctcaggtgatccacatacagccgctggatacctttatcaactctctttgaaaatatcttttaaaaacaatccttgatgacaaatcatattcagtgggaatattttgaacactgtgtagaagtacaggaagtcaacatagagttgagcctgattttgctactgtccctccgatagttcctttcttttttctttcctttctttccatttatttatttatttatttacttacttacttgcttgcctgcttgcttagagacagggtctccctttgtctcccaggctggagtgcagtggcatgatcatagctcactgcaggttcaaacttctgggctcaagtaatcctaccgcctcagcctcatgagtagctgggactacaggtgtgggtgtccacgcccagctaattttttttttctttagtagagatgaggtcttgctatgttgcccaggctggtcttgaacttctagactcaagcaatcctcttgcctcggcctcccaaagtgctgggattacaggcatgagccactgcacaggcccctttctttttttctccattttctttcttttttctcccccttttctgggaggcaggccagcctcacagccagacaccagctgtgggagttgtcttacgcatatgctctgccccttagaaggattcagtctgtgccctggaggggcctacggtcccgccttgctgttctctggggatcacatcttcggagacgggccaggtgcatcctgctgtgggtggtggcctgagctgtggttctcggtggggtctctctgcagggacttgtcgctgatcaaggtgattgacgtgggccggaggttcctggtgaaccgggtgcaggaccacatccagagccgcatcgtgtactacctgatgaacatccacgtgcagccgcgtaccatctacctgtgccggcacggcgagaacgagcacaacctccagggccgcatcgggggcgactcaggcctgtccagccggggcaagaaggtgcggggtgtgctgccgcatgggccgttctggctgtagggcggttgcagggtctatagggtgggtggggagctgtgtgctgctgctgctgctgctgctgctgcttggtgtgcttgctgtgtgtgttatctgtgtgtgcgcctgcacgtctctatgcatatctgtgtgcatctctggctctgtgtgtgtgtgtgtctacgcctatccatgtggctttgtgtgtgtgtgtctttgtgttactttgtatgtgtttgtatgtgtgtctctggtgtgtgtatctctgtgcatgtgtgtgatgtgtgggcggttgtgcactaggaagggaaggggcaggaagagctgagcctggtctctgggtagggtgtgtgcggctgtggctgtcccagtggcctggggcccccacggtgtaaccaggtagtgcacagccctacgtgggctgcctgctccagccctggctcttggaggagctgcgggcatctggaatcagtggtccccctccaccacctctcagtttgccagtgctctgagcaagttcgtggaggagcagaacctgaaggacctgcgcgtgtggaccagccagctgaagagcaccatccagacggccgaggcgctgcggctgccctacgagcagtggaaggcgctcaatgagatcgacgcggtgagtcctgggaggcgggcaggcagcctcaccctcgggcatggggcggcttcccaagaggccctagacacccctgtggtttgttcccctgagtgaccactgggtccccgcagggcgtctgtgaggagctgacctacgaggagatcagggacacctaccctgaggagtatgcgctgcgggagcaggacaagtactattaccgctaccccaccggggaggtgagcgcaggctggggcgggctgacggtccccagcacacatgaccactgctgtgcagggctgggccacccctccagggagttcacttccgtgtgggttctgggggctcctacaccctccaccttggaactgagtccccccaaactgaaccttctaacagcctggggtgaagtgcattttcccataagcagaagtgagatgtgcttccctagggacatagaactatatgggagaggaggaaggtggtgtgtgaaggtccactgggcagggtggtgggcaggctggcaggaggggtggctctatatcccctgggcagcgtctgtgcttccccgtgcacggtgcccgggtggctgtggctgaggacgctgttgcctcctctgccgatgggatcctcctgggcccggtgtgtcctccctgcccgtgccctgctgagcagtgtcgtgcctcaggcccctgcaggcccactgtcctctggcctcagactgagccttacacaccggggccctggttagcacagcagagagcccacaggagcaggagcttttctggtctttttctaaagtcacagccctcctgcttctttttacatttttaaattgatagaaaatacacataacctaaaattgaccactttcatcacgttaaagttatgatttagtgcatgttagtgtactcacagtgctgtgcagccatcaccacaaattccaggcctttccctcactgcacaaagaaacccagacctgttaggagccgctcccgcctgcccggcccagccccggcaccggcccgtctgcttcctgcatctggatctgcctattctgggcattccatgtcagtggagtcagatgccacacgtgccttttgcgcccagttctttcacacagcattgagttttccaggttcccccgtgtgggagcggagtggggagggcttcactctttttgtggctgagcaatagtccacgttaaaccctgctccttctcaaccactgctgatgatggatgattgattttgcgtggctctctggccggtctgatgcagtctgtggccagcggcagagcccctcccgagtgccctgagctcacgtgggcccggccctctgtgctcagtcctaccaggacctggtccagcgcttggagccagtgatcatggagctggagcggcaggagaatgtgctggtcatctgccaccaggccgtcctgcgctgcctgcttgcctacttcctggataagagtgcaggtacctcgggcaggtcgtggccccgggatggagggaggaggggactggcactcggcggggggtcagccgcagacctgccgtggcctgccctgtgttggctgctgtgccatggggtgttaggagaagggcacaggtgtcggctcccggctgcttcaggtcctctctgtccagcgcttccttgaagcccttgggaaatgctgtggagcccaggttgatgccggggacttcattgcttcataaacagctccctgagacccgcccctggctccacacatcccagggtcttggcttggggtgggggctgcacttctcttcagtgccctctaaggaacaaacagcccggaaaactctgacaatcccattgaaatgttaagtcttagcatgtccagtccagtgcagctgaatccctagacagacctaaattgtttgggagtgactttttcccaactctaagtcaccgtgagggcgagtcttttggtttggtttgatggcactctttgggctaaagtcttcttctggggccagctgctgcccgggacagcttgtggctggggacagatgcccctgcccgacagggcttccgagggtccttgttggggggaccgtaaaggtctttccatgcctcccccaccctcatgtctcatttcttttttttgagacaaagttttgctcttcttgcgcaggctgcagtgcaatgcatgcactcactgcaacctccacctcccaggttcaagcgattctcctgcctcagcctcctgagtagctgggattatacgcatgtgctaccacaccctggctaattttgtatttttagtagagatggggttttgccatgttggtcaggctggtcttgaactcctgacctcaggtgatccacctgcctcggcctcccaaagtgctgggattacaggcgtgagccaccacgcctggccgtgtctcatttctaactgtgggtgtacaatttcaatttcagaggagatgccctacctgaaatgccctcttcacaccgtcctgaaactgacgcctgtcgcttatggtgagtagcaacccctgccaagccctgtccccctgaaggtggccacagtagcttcttgtggccgtgggctgtaagcggtgctgtccctttaacagcagcttcctctgcccccatcccacgccctccaggctgccgtgtggaatccatctacctgaacgtggagtccgtctgcacacaccgggagaggtcagaggtgagtggaggccccaagcctcatcctggccatcatcacacgatagccctagtgggtgatgggcgctcaggaggccccggggccgcttgcctgcaggtgctggcctgtctggggccatgggcctgctggctgccttcctcagcacctctttgttcctgcctgtctgttctgtggcttctggggccttctcattttctttcttcctgtgtcctcttcctcccatttctgctgagctcgagatatgaatattagtgaggaagatacattctctctttttttttatttgagacagggtctcagtctgttccccaggctggagtgcgttggcgcagtcacggctcactgcagcctcaacctcctgggttcaagtgatcctcccgcctcagcctcccgcgcagctgagactacaggtgcgcaccaccatgcccagctaattttaatttattcatttttttagataatggggtctcactgtgttgcccaggctggtcttggaactcctgggctcaagtgatcctcctgccttagtctcccaaagtgctaggataaaggtgtgagccgttgtgcccagcgtctcttctctttaacatcagcatggcacagttcttgttgcctttcctttctggcagctaaaaccagtgctttcagtttccagagttactgtttcaaacaggatcagcaggtcagcgccgccatgtgcctgtgattaggctcagaaccaccaagaacacggtgttgagagacgggaggcgtggagagcagaggcctggggggtggcgggtggggaggcgcttcaggagacctcgaggcctggccgtgcagctgctgtctaccttggggggaggcctgacatttggaggtgggccaggctgcctctgactgagtagagtgggcctctgctcaggtggacgcgtgttgtgaaagtgagtttgaattcaccgtgtacaggctgccaaaagtacaacactgtgctagtactagtcagacctttctcttagaccgagcgtgactttctgtcatggcgttcccgaaacaggtgactgtctagtcccaggaagcttggccttcggattttggcatgaagggatgaggtgtccgccccagtcgctggcagttgcctggctggtgggctgacctgagagaggctggggtcccttggccgccttggtccctgtcaccccctccacttcggaatgtgggtcaccggatgctgtcctgcctttagccatatgacaacagccctggtcagggagccactgcccccgctatgggattgggcctgagccggtcctggagctcttccctgcagggaatgggggcagggccatgatggagacagatcccggttctgaggctggaggcccacaccccatcacgctgtccctctcatgggagggctgtgtctggtcctggccgcagaacctgcttcctgctgcacattttctgcgcctttggtctccaggcttgttttgcagcctccgtgccccatcctaagccagggtgccctttgtgtagtagagatggctcttcagatcctgcctcgggtcagcggaagggagtcagcacagttgccttcccctccccagcctgtgagcctcaggcccagcctctccctcctagatgcccctcctcagctctcaagagaggctggaagcaaagctcttttctccgacctcacgctctgctgtgatcatcattctttccctccttgctttgcaagcaccgtgtttgtctgtgtggggaatcctttggtaccatccgaggaagggggcatgggagggaattgcccccattcttgctgcctggcagtcaccgcacactcagcagcccatggtccctggcccgtggtcccggccactcccctcggtcagtctttttgcctctctaaaatccaggagcagagaaacttttttggggctaattttcctccccttctttgtaactgtcgcctttctctcttttgtctttgtcttgcttaggatgcaaagaagggacctaacccgctcatgagacgcaatagtgtcaccccgctagccagccccgaacccaccaaaaagcctcgcatcaacagctttgaggagcatgtggcctccacctcggccgccctgcccagctgcctgcccccggaggtgcccacgcagctgcctggacaagtcagtgcactcccctttccttcctgcctgggggacgcatgccgggcgtgatgccacagatctgggattgcgtgcgtgtgtgtttgcaagaatgcgtgcgtgggtgcgtgtgggtgcgcgtgcgtatgttgtaggtgtctgtgcacgtgtgttgtgggggcatgtgcacacactcacgtgttgagggagaacataggaagcaccctccgaagttaagatcctgggggctttccttgctggtgacaaccgtgactgcgttcgcctcctttctgaggatggggtctttacagggcagaagcaggcagtgcagaaggaagagtgagatgtccaagacccgttcacgttcgtgaatggttatttctaaaacaaagaaagtggctactttctcacataaataacatggttatcccagcaggtagtaaaaaacctaacaaacaaggccaggcgcggtggctcacgcctgtaatcccagcgctttgggaggccgaggtgggcggatcacctgaggacaagagttccagaccagcctggccaacatggcgaaaccctgtctttactaaaaatacagaaattagccaggtgtggaggcgggcgcctgtaatcccagcttctcaggaggctgaggcaggagaattgcttgaacccaggaggcggaggttgcagtgagccgagatggtgccactgcactccagcctgggtgacagagggagactccgtctcaaaaaaaaaaagcaaaaaaccccaacccgatttcacttatttcattaattttgaaggttacaggcctggaagattttggttgtcagacattaagatttgttttcagaaaactgtttgttttcagaaaactggtcttttcctttacagcctggaacccttgcaaatatgtgagatgtaggaatttctgtgcttaaattcaggtaccacccaagggtctgccctacctccaccctccaggcctgcccccacaaatcagcccagtgcagcttccggtcaggtttgttgatgagccggatgctggtgctggctctgagcatccttttcagcctgccacctcttcccgccttttccgagacttccttagacctcatgatgtctggaatgtgacctgggagatgctgcagcctccacaggtcacttaacctctccaggcctcagttttttcatccaggcaatgggggaataatggcagtgcagaagtcagatcagatgaggggattcatgccctgcatcaggcccagtgtcgggcatgtggtggggacgcgtagacacggtgaggtggctgtgattagcggaagcctggaggcctggctttggtggtagctccacactaacatgagtgcagcaatttaattgcccaggttccttcccctcccaggccctcagtctccttagctttgcacatgataggagcaggactgggagagctctcatacatattcccttgcaggtctcagatctgagggtttttatgaaaagccagcagaactgaaatggtgtccctgtggcatccgttctgatggaaacgtgcagttgtatttggaagttcagaggccgctgctttgatgcttggggggaccaggctggggaagggggttgatatcctgagctgcacagacctccgtcgtggaggacgcagtggcaggggctgcatcctcctgtccgcttcagagctgcccctggcgttgggaggacagtccttcagggtggccaggttcttagggacgtctgaagctgctggctgggccggcgtggggtttttcagggcttcgtccctgcagattgcgccctgcctcctgactgacttctctctctgcttctcctccgcagcctttgctagggcaagcctgtctgtaagtatctctccgatcatcgctgctgcttgcactgctttcttcctgcttgctcatttggcctcctgcctgttaaaatattgaggatgagagcagttttgtgatgtgaggtcttccgtgggggaaggaggagatgggcgtaggagtagggaggagagattcctgaatgtttttggaaaagcgtgcaggcggtcatggtggctgcactactgttgggtgtgttccgacaccgccgcacgaccgctggcttctcccctaccctctcagggctgcaggtcgtggtttgtaatggccgtggtttagggctcggcataaatccacatttccttgtcagaatcagatcttggtggcgagctgcatctgtgccaggtgccattagccttaaagccccctcctgccccaggagtgtcctttgttttggaaggaaaacttactcagagcctaatctgtaaaccaaacctatggggaatagtgggagtgtggtggggcctgagctctgagcctctccctccccatgaggaccccccacaccccaaaagagctccaagtggagacccttggggatccgtttgtcctgggttggagcctgctcagcgtcatagtcacgcccggggctgggtgcagcctccatctctaacccatgtggtcacttctgctcctcccagagctctctgcagagtttcaggttcagccttagctctggcagccactgggtagctggggctgtgttcccactgctctgggatcccttccccaccaggagcagaggccttcctgccacagaactttaatgacagccacatgaagtgtcatccccttgcccccccaaaaacacacccgcccctttatttcctgtttgctccttaagttaccttaactactttatgcagaaactggaaaggtgtgatgaggaatgcagcctgagatgctgaaaagaatgactggctttggaaatgggagaggtttggcatggcgctcagattttggtggcaaaggggtgaagggccagaggatgtaccagtgtcctccatgtccacgttccttaagaccaccctgggaggtcggcagggcagtcagtcccccgtttaatggttgaggggctgagtgaccggcccgtgcttccagcaggtgagccgcagagccggggcctgaaaggccccttgcttcagaaagccggccgcctcctctctgcggcttctgggagtgggctgggtgcccgttccctgctgctgtcctgaggcccctgccctgtgacccgcaaggcatgggcagctgttggaccctcgtgtacccccacagccacccccttgcagctgcttcccacagccaggctttgcttacctaaggtgggcctgcccttaacttccagcttcttggggcgcaccctccatcctcagggccagtgtctgtgatgcgcggggccagcgtgcagtgcttcaggatctgggcttctccttgtgtgaaactttttggacttggagcctgaaggttttacatctgtgcatgtcctgatcctttagaccagcagtccccgacctttttggtaccagggacccgtttcgtggaagagaattttccccaccatggcagggtaggggatggtttggggataaaactgttctgcctcagatcgtctggcattagattctctgaagggaacgcacagcctagatccctcgtgtgtgctcctccgagtcaggtggtaatgttggcccacccaccacccacctcctgctgtgtggcccgcctctcagtgggctatggactgggtactggtccacagcccaggggttagggacccctgcgttagacacgtggcctcatgttgccaggaaagaaatctttctactgggaggagccattcggggatagtcccccacccgctaaagctgatcttacctatctccaagatgaacataatagtgcgtttgctagaatccctcctgttcagcaaaaatacatccgatggacccatcacacctgactcaggttggaatttcactctggagtcccattgtcccgtccatcctgggtgcgtgaccccacatctaggattgtagccacatctgattctaggagtccacctgggctctgtgaccagaatttatgatgaaagtcagaccaagccaggcctgcatcttggttctactcctcctggcctctatccttggcactctgggcaagttaaagcaattctaggacctcagcttcctcatctgtaatatggagataataacttcataaagttgtcataatgagactatagatacagcacttagcacaatatctggcccctaggaagtgcgtgggggatgacggctgctgttgttatcagggaggaacttggtgccctgggcctgtggagacttctgggcttgctggcattgggtcagcctttggataccctcctgtaacctgagggatttcttctctggggcagcaggaacacccagacttggggaggggaaatccctggggtctcaaggccatggcctgaagtctttttttttttttgagatggaattctgctcttgttgcccaggctggagtgcagtggcgcgatcttggctcactgcaacctccttctcccgggttcaagcgattctcctgcctcaacctcccgagtagctgggattacaggcgcccgccaccatgcccggctaatgtttgtatttttagtagagatggggtttcaccatgttggccaggctcgtctcaaactcctgacctcaggtgatccacccgccttggcctcccaaagtgctgggattacagatgtgagccaccacgcccagcctagagtcttcacccctgtgatcttggtttcccagtaagatggggacgaacaactgtccggacctggtgctctggggtgccttcctgggggctgtgccggctgcttgggatcgagagatcacctggcatttgtgatgcaaccttcatttttaaaatttcaaatgcacactagaaaatcctactaaagattttcttttttttttttccttttccaacctgtttcttcctctcccccactctgcttgaaagacgaactgtctgtcacattttctcaaagttttctccttactaactgtggaaggtaaatgcctgggtgcatgtccctctgtcccgcaccgcgtcacggcatctgggtctgtgtgcagactggccatcgtgcaatgcggggctcatctgtctccatgccgaggttgttaagtgcaacaccattgtcgtgaggtcctttctagtctgtctctcaccccccacgtgtcctgagctggggcccctgggtgaaggacgtggacatcacccggtcttgcaggctctccactgttattgttgcatcgccatcacctgtgggtgccggaagctgtgggctggtggtgttgaggacaggttggagccagcagatgcggagggaaatgtcagccctgctctgtgatcccacagcccggctggggctctccctagatatgaggacccagggctctctgaagagaattgccccctcccagtgggcacccatcacttccatcatccttcggcgggcacccatcaacccccgcaggcagccgtcatcccctggcaggcacctatcacctcctggtgggcactcatcacctcccggtgggcacccatcacctcctggcgggcacccatcacctctcggcgggcacccatcacctcccggtgggcacccatcacctgggttcctgagtctggcccacgcctgggcgatagctctgatgctgcccagccccgtgactttcctccctgtggatggctccagccttggacccccagttctgtgtggggtgggcatgggccacggtggccctgtgtgcctgggctctctcccaccctctttagagcagtccaggtggagacactcaggactggagagaatagttttaaacattgtgtgttttcttgttttttgaggcgtaggtgaagcaggtcacggaaggaggcccgctgtgcagtggctgcagtcagttgtgttcctcgctgattttggagcatgtttttttgcggggggtgggtggcgggggggtttggtactggccagtgccttaggggtggaactccctgcgagggccactgtgatcagaagtggggcagggctttaacaacacccctctgcctggctccccacctgggcctccccaccacgtccagccattccatgtatcacctgtgttctgcctgtcaagctctgttcccagaatctggatgcaggagctgggagtgtggctctgttttgagctgagtcgagaggaggggccctgtgtgtccttggaggccccgggctcatcctctgcctggctgtggtttgtgggatttctatggggtcgtgagcatgaggctcctgtagttactggtgcccagcgccgcgcagctcacggtcctccaggagccacacggcccccaccaggcgggctccaggcctggtgcccagccccttctctgagactctggggttatcttgcgtcatgttctgaggcccacctgggctctctcccgcctgtgaggttggcagcacctttcttggatcatgttctttgtctgggatggagggagggaagaattctccgttgcatggctcgcgtcttctgctttagaattcagccagctacaaatcctaactccctccccacctctcttttctcctgaaaacagaacatgaaaggctcccggagcagcgctgactcctccaggaaacactgaggcagacgtgtcggttccattccatttccatttctgcagcttagcttgtgtcctgccctccgcccgaggcaaaacgtatcctgaggacttcttccggagagggtggggtggagcagcgggggagccttggccgaagagaaccatgcttggcaccgtctgtgtcccctcggccgctggacaccagaaagccacgtgggtccctggcgccctgcctttagccgtggggcccccacctccactctctgggtttcctaggaatgtccagcctcggagaccttcacaaagccttgggagggtgatgagtgctggtcctgacaagaggccgctggggacactgtgctgttttgtttcgtttctgtgatctcccggcacgtttggagctgggaagaccacactggtggcagaatcctaaaattaaaggaggcaggctcctagttgctgaaagttaaggaatgtgtaaaacctccacgtgactgtttggtgcatcttgacctgggaagacgcctcatgggaacgaacttggacaggtgttgggttgaggcctcttctgcaggaagtccctgagctgagacgcaagttggctgggtggtccgcaccctggctctcctgcaggtccacacaccttccaggcctgtggcctgcctccaaagatgtgcaagggcaggctggctgcacggggagagggaagtattttgccgaaatatgagaactggggcctcctgctcccagggagctccagggcccctctctcctcccacctggacttggggggaactgagaaacactttcctggagctgctggcttttgcacttttttgatggcagaagtgtgacctgagagtcccaccttctcttcaggaacgtagatgttggggtgtcttgccctggggggcttggaacctctgaaggtggggagcggaacacctggcatccttccccagcacttgcattaccgtccctgctcttcccaggtggggacagtggcccaagcaaggcctcactcgcagccacttcttcaagagctgcctgcacactgtcttggagcatctgccttgtgcctggcactctgccggtgccttgggaaggtcggaagagtggactttgtcctggccttcccttcatggcgtctatgacacttttgtggtgatggaaagcatgggacctgtcgtctcagcctgttggtttctcctcattgcctcaaaccctggggtaggtgggacggggggtctcgtgcccagatgaaaccatttggaaactcggcagcagagtttgtccaaatgacccttttcaggatgtctcaaagcttgtgccaaaggtcacttttctttcctgccttctgctgtgagccctgagatcctcctcccagctcaagggacaggtcctgggtgagggtgggagatttagacacctgaaactgggcgtggagagaagagccgttgctgtttgttttttgggaagagcttttaaagaatgcatgtttttttcctggttggaattgagtaggaactgaggctgtgcttcaggtatggtacaatcaagtgggggattttcatgctgaaccattcaagccctccccgcccgttgcacccactttggctggcgtctgctggagaggatgtctctgtccgcattcccgtgcagctccaggctcgcgcagttttctctctctccctggatgttgagtctcatcagaatatgtgggtagggggtggacgtgcacgggtgcatgattgtgcttaacttggttgtatttttcgatttgacatggaaggcctgttgctttgctcttgagaatagtttctcgtgtccccctcgcaggcctcattctttgaacatcaactctgaagtttgatacagataggggcttgatagctgtggtcccctctcccctctgactacctaaaatcaatacctaaatacagaagccttggtctaacacgggacttttagtttgcgaagggcctagatagggagagaggtaacatgaatctggacagggagggagatactatagaaaggagaacactgcctactttgcaagccagtgacctgccttttgaggggacattggacgggggccgggggcgggggttgggtttgagctacagtcatgaacttttggcgtctactgattcctccaactctccaccccacaaaataacggggaccaatatttttaactttgcctatttgtttttgggtgagtttcccccctccttattctgtcctgagaccacgggcaaagctcttcattttgagagagaagaaaaactgtttggaaccacaccaatgatatttttctttgtaatacttgaaatttatttttttattattttgatagcagatgtgctatttatttatttaatatgtataaggagcctaaacaatagaaagctgtagagattgggtttcattgttaattggtttgggagcctcctatgtgtgacttatgacttctctgtgttctgtgtatttgtctgaattaatgacctgggatataaagctatgctagctttcaaacaggagatgcctttcagaaatttgtatattttgcagttgccagaccaataaaatacctggttgaaatacatggacgaagtaaacctctggtcttttcgtgggggaaagaagagtctttaattgatgtttacggcagatgcgccacggagctgccaactcaccacttcattatcttcctttcaacaggatgttcaagtacagagtgtctagtgcctgcatttggggagaatgagctgtctcaatttttcttctaattgataggcttcatgttttatttttatttttaatttaatttttttcttttttttctttttttttttttgagactgtttctcactctgtcgcccaggctggagtgcagtggcgcgatctcagctcactgcaacctcctcctaccaggttcaagcaattctcgtgccttagcctccctagtagctgggattacaggtgtgcaccaccatgcccagctaatttttgtatttttattagagacagcatttcaccatgttggccaggctgatcttgaactcctggcctcaggtgatctgcctgcgtcggcttcccaaagtgctgggattacaggcatgagccactgtgcctggccccacgtcggttttactcccttcattctataccccttccccgcgcccttttaaacaccagttcttgcctcattggcactacagaaggtatctttcatgttaggttcctttcacctgcccttccccatctcctggcttcttccatgtttctgcagggaataaaactcaagcttctgtgacttctttgccgctcattggctgccagaggttgagccggttatttcacttccagcctcagcgtctgcatctctgcagatggggcagggttcagggtggagcgtggcaaacaccatgcgtggaggaagccctggagtggttccttctgcagctggtatgcgtgaccagcgtcttgcttggtctgattttttttccggagccccccactgctgcgctccagaaatagccttgactccccagtgagtcttcatcccttaggcgcctgccgcccacgctgtgaagagaacaggcggcagagacttggcacctctgttgcgagatgactcccagggttgcgatctggctgcagcgtgacggggcagagcgttctggggaacctgaggccacctcctcaagctctgagccacgtttgatggcgtgagatgtgtcaggtgcagggatggagcagtggcgttgacggaaatctggcctagcctttcaggctgactacccagaaaattaaaagactgctcccaaagaggatgtctgtgtatcgtaaggtcctgggccggccgggctgtggggatccacaggggctctgaccttttgggccagctctgagattcatctgagagatgggctaggtccacagtcactgactaaatacagaagattcagtaaccgggtggatgctgtcggggagaggagggctggggccggagaggggtggacgttgtacacaccagtcgtttccattcgctgcctgggctcggttccttccacttctcactcccttagctccggccacactggcctcctgcaggtcttcgaacttgccaacgtgcacccaccgcagggccttcgagagtgccgctccctcccctgggaggtctccccagctatccggggttctccccgacacttcctccccatccccattcagttatcaaagcctatgccaaaaaggcctcccgtctcccgagtccctgcacacctttcgcagtgtgtgttgaatgccttgccctctgtctcctgaacctgggcctaagatcccggagagcagggcagctccctgtgccccgtcatcgtccatacggacctggcccgcagtgggctctgtcactaaatggataaccagtgctggggagaagacccagatgatgtgctggtgaagagtgaggcgttcattcagcttgcagaaggaggcttaggaaggctttatagaagaaaggaaatgtgagcaaagatgtcgttgaaagtaactttttttgaattaaaaatattgtattaacaaaaattcaaagccttctgtgagttttcaaaatctgaatttcacaatacttgtgagttctaaagtttgttttttgagacagggttttgctctgtctcccaggctggagtgcagaggtgtgacagctcactgcaacctccgtctccagggctcaagtcatcctcccacctctgcctcccgagtagctgggactacaggcatgtgccaccacgcccaactaatttttgtattttttgtcgagatgaggtttcgccatgttgcccaggctggtcttgaactcctgagctcaagtgaactgcctgccttaacctcccaaagtgctgggattacagacgtgtgccaccacgcccagctaaagactgttttataaacttcattttaagctcatattttgcaagacaacataagtgggtttggattcagttgttctcggtgtgtgagccggtctttccagtcaattcattgatggtctagacaatttgtgaaggcgctggtttcaacctacagtttctgacatactcctaagaccaggtgaaaagaaaacccccataaagacacccgaatcgcctcaaaatatgacacttcagcccttgggactaaagaggacccctggcgcagtccctgagaaatgtctttggagaaatttttatttatttatttattatttttttgagacagagtttggctctgttgcccaggctggagtgcagtggtacaatctcagctcgctgcaacctccacctcccaggttcaagtgatcctcctgcctcagcctcctgagtagctgggattacaggtgcatgccactaagcccggctaagttttatatttttagtagagacagcattttgccatgtttgtcaggctggtcttgaactcctgaactcgggtgatctacctgccttggcctcccaaagtgccgggattacaggtgtgagccactgagcctggctgaggtgccatctcaaaaaaaaaaaaaaaaaaaaaaaaagatgtgaaggaatgccatagttctcagacttattgggagaactaaatctttttttttttttaacttttattttaagttcagaggtacatgtgcaggatgtatagacttgttaaataggtaaacttgtgtcatgggggttggttgtacagattatctcatcacccaggcagtaagctagtacccattagttatttttcctgatcctctccctcctcccacccaccaccctctgataggccccagtgtgtggtgttcccctctatgtgtccatgtgttctcattatttagctcccacttaaatgtaagaacatgtggtatctggttttctgttcctgcattagtttgctgaggataatggcctccagctccttctatgtccctgcaaaggataggatctcattccttttcatggctgtatagtattccatggtgtgtatgtaccacattttctttatccagtctatcattgatgggcatttgggttgattccatgtctttgctattgtgagtagtgctgcaatgaacatacgcgtgcatgtgtcttcatggcggaacaacttgtattcctttgggtatatagccagtaatgggattgctgggtcggatggtatttctgactttaggggttgagaattgccccactggggaagatgaaatatgaatgaaacacgcctgacagttcctggcacagagagagcaccgctgtggtagttattcatctgagcatgcatgcccggcgtttcaaatgcaaggtagatgctattatccccacctttcagatatggaactgtagtcaggagagcttaaggacgctgcttgattttgctcagccataactgagataaaccaggtctgttagactcgcagatgagtcacatcacagcctaagggctccacagactgccaggatgctcctgcatgagtcagcagaccacaggaaagggagttgagtcgcatattaattagcaagcagggtttcctgtccctggggctgtggagaggtttgtcagtgtccagacgaacaacagattttctggagtgggtcataactcaagatgctcacataacgttggggaccagatgtccattctgtaaggctatgtgtttttccctccctacctcttccagacagcatctttggggatttcctattcctggagaacatgaagactttctaatatttttttttgagagagggtcttgctctgttgcccaggctggagtgcagtggcatgatgtcgattcactgcagccttgaactcccgggctcaagccattctcccacctcagcctcccgagtagctgagacttcaggtgtgcgccaccacgcctggctaatgtttgtatttttagtagagatggggtttcaccatgttggccaggctgatctcgaactcctggactcaagcgatctgccccactgggcctcccaaagtggtgggattataggcatgagccaccgtgcctgacaatgaagaatttctgaggggtacatttgcatagataattttaagggaatgttttcggatccccaacttccacattcacccttttctaaaacagactgagaagtttgcttacattcacaatagtcttttactgctttgcaaacaataggccaagctcctatttatctcatgctcagtgctaggatgcaggacgtttgcaagttagcattcctagatttcttacatgtacaagaaagggcttagactagatggtttttggaaaactttttattttgaaataatttattttatgtaagtaggtatgtatttttgagatggagtctcgctttgtcccccaggctggactgcggtggcactatctcggctcactggaaactccgcctcctgggttcaagcgattcttgtgtctcagcctccctagtaggtgggattacaggtgcccgcctccacgcccagataattttcgcatttttagtagagatggggtttcactgtgttggccaggctgatctcgaactccaacctcaggtgatccgcccgcctcagcctcacaatgtgctgggattacagacgtgagccgccgcgcctggcctgaaataattttagatttacagaagagttgcaaagacagtacagagagttcctgtctatgtttcacccagctgcccgtaatataaacatcttacaacaacatggtacccttgtcaaaactatgagttaacatgattagtacagtactagtaacaaaactacagacttcattcaggtctcaccagtttttccactaatgccgtttttctgtttcagcatccagagtccagggtgtcaccttatctccttagactccttcaatctgtgacaatttctcactctttcctttttatttttattaccttgatgcttttgcagagtactagtcaggtatgttgtagaatgttcttttttttttttgagacagattctcactctgttgcccatgctggagtgcaatggcatgatctcagctcactgcaacctccatctcccaggttcaagtgattctcctgcctcagcctcccaagtagctgggattacaggtgcacaccaccatgcctggttaatttttttgtatttttagtagagacggggtttctccatgttggccaggctggtctcgaactcctgacctcgtgatccacccaccttggcctcccaaagtgctgggattacagctgtgagccaccgcgcctggccatagaatgttctttagtttgggtttgtctcatgttttctcatgatgggactgagtctggttagggattttgggaagaatcccaccgaggtgaagcgcccttctcatgacatcctctctgaggggacacggccacacaggacttccttctggggatgttaactttgatctttggtgaaggtggtgtctaaccactcttaccaggctggtatttttccccttcaactttcaattttttaggaaggagtcacttagtccagctccctttcaaggggagggcaatgagctccacctccggaagggagcagtatcaaagaatctgtggccatgtgttaaaaccatcaccaggccaggtcgcatggctcatgcctgtaatctcagtgctttgggaggccaaggtgggaggatcgcttaagcccaggagtccgataccagcctgagcaacatagtgagaccccatctcaacatacaaaaactaccagtgaaggagatactttgagggtatgtaaatatcctgtttctccttaatgtttcactttctaattttagcatccattagtgtattttccttgcagcagatattatttgtattgtggtgttctaatggtggttttcttttttttaatttttttttgctttcttttctttttttttttttaagagatggggatcttactctgtcacccaggctggagtgcagttgcacaattatagctgactgcagcctctaacacctgggctcaagcagtcctcccacctcagccccccgagtagctgggattacaggtgtgaaccaccatgtcctgcttaatttttaaattttttgtggagttgggtgtcactattttgcccaggctggtctttaactggcctcaagtgattcttcccgcctcagcctctcaaagtgcagggattataggcttatgctaccttgccaggcccttattcgtgagtttcaattttccttattccttttacacttatttgtaattctttcataaggaaaatctgttccgtctccccatttatttacttattcagtcatttatttatactactgtggactcatgatcattcctttgtagatgaattcttaagtctctgaactaagtctctgcaagctctgatttccatgaactccttgcctcccactctccagaatatttaacactttatattcctgcccaggacgggcctggccagggtacaccatcacccctatgtacagaagcaggtacctcgttttccagcctgatggcagcccagccacatcctcacttcgttttcctcatgcgccttaactattatgcatggtctctaatgtgtgcaggcgaacctgtgggatgaaactgttcccaccgtagtgccctgaagcagtgttctgtaaacatttttttttttttgagacggagtctcgctctgttgcccaggctggagtgcaatggtgtggtctcagctcactgcaacctccacctcctgagttcaagcgactctcctgcctctgcctctcaggtagctagaattacaggtgcacactaccacacccagctaatttttgtatttttcatagagacagggtttcgccatattggccaggctggtttcgaactcttgacctgaggtgatccgcccacctcggcctctcaaagtgttgggattacaggcgtgagccactgcgcccggcctaaacattttatttctataatttactttatagcagattcagttactgaccagcccaaaggggcttgtcttagtttttccagtgaggcttttataatatgacttgggggaggctgtctgtatcagcaagtatctgctgaatgcctgttatatgcaagccactgttctaagtattagggataaaaaaatactggaagactcggcaacaccctaccagagctaacgtctaattgattctctaggaatgctcaggtccttcaagttccaagacaaccaagagatctgtgaagaaagccagtgctccagagcgcgtttcattagagaaaaaaagagagatccctttaacaaccatgttgtaatcctcggaactgccgcacgtcccaagcagctggtcctgggacaacatattgagaatattttgtcagttctgagatttgaaggaaactcaaccaagactatctttacttagttattaaatcccagaaggcatcatggatgaagttagtcaggaatggcaagcatagagagaggaggaagaaagaaaaggaagcccacagtgttcgctttggagacaccctttcttccccctgggaagggaactgggacacgaccctgggcaggctctgggtgctgtcaccctagtcccatcagtggaggcagccgcttcctgcaacgctccccatagaggctgagacgttttccttctggggcctgttctctttccctaattcaactttgcagagctcctcaaatggagtggggaaggtgtgagagaaattattcttctgtcattttataactgccaggctttaggagtgcaatgtgtcagctatttctttccttttctttttttctgagacagtgtcttgctaggtcgcccaaggctgaagtgcagtggcacgattatagctcattgcaaccttcaactcctgggttcaagtgatcctcccacctcagcctcccaaatagctgggattacttagtgtgcgccatcatgcccagctaatgtttttattttttgtagagatagggcctcactatgttgcccaggctggtctcgaactcctgggctcaagcaatcctcccacctcaacctcccgagtagctgagactacaggtacatactatcacgcccagctaatacttttattttttgtagaaatggggcctcactatgttgcccaggctagtcttgaagtcctgggctcaagcaatccttccacagcctctccagtgttgggattacaggtgtgagccactgcacctgaagctggtgtcagcgatttcttcctcatcccattgaggggagagcgtggccttaactcagctgtttggatgtcaaatgaagagcagacatcaactcgcttgttagggctgagaatgtaccacacacacagggaaacacgaagtgaaggccacgtagtgaagaccaaacttcctgtttcccaggcagcttaaccaccacaggctgcaggaatattagtgaagcccatggggaagggaatttctggagggaccatggtctttctggaccaacttggctgctcattctttttgaggaaaacactaaccgtattccaattcggggcaggcctgagaatttgggcgcagcatccagaaaagctgtatttagcaggtgctctggggcaggtcctcctacaaagcacaccttagcccagttgagaatctgggctaagattctgtcgctattctcttacacggtaataaattagttcttttgcaagcagattagaccgagacaagtaattcttggtcttctaaatccacagctcacaaaggattagggagggatgagaagctggaaagggcagctaaggatataagcacgttggactggaaatgccctcatcacccagagggtgttatgtaaaagtgagaaaggctgggttaaatcaggttcattcgttcattcgtaattgagagggagagttcctattaatggcccgagattgtgctgaaagctaggagtccattttataagatatgaatgaaagaaacagttcctagcatacactcaccataaaatgagatttttagtcttagaagcccagtttgcttgagctgggaccttcgagatctgcaagtttaaactccaccactttacaggtggggaaactgaggctcacagagggaaagcgaggtcaggtgtcacagctgctgggactaaacaacttgacttgtggtctagctctcttatttatttatttagagatggagtcttgctctgttgcccaggctggaatgcagtggcacgatctcagctcactgcaacctctgtctcctgagttcaagcaattctccttcctcagcctcccgagtagctgggattacaggcatacgccaccatgcctggctaatttttatatttttagtagagacggggtttcaccatgttggccagactggtctcgaactcctgaccttgtgatctgcccgccttggcctcccaaagtgctaggattactggcatgagctactgcacccggcctatttgatttattattattattattattactattatttttgaaacagggtctggctctgtcgcccaggctggagtgcagtggtgcgatcagggctcactgcagtctcaacttcctaggttcaagggatcctccgtcctcagcctcccccgta

SEQ ID NO: 619 - DNA, 619 bp, Homo sapiens
cgcggggctgccgcttggacgtcgtcctgtctgggtgtcgcgggccggccccgcggggagcgcccccggcgcgatgcccttcaggaaagcctgtgggccaaagctgaccaactcccccaccgtcatcgtcatggtgggcctccccgcccggggcaagacctacatctccaagaagctgactcgctacctcaactggattggcgtccccacaaaagtgttcaacgtcggggagtatcgccgggaggctgtgaagcagtacagctcctacaacttcttccgccccgacaatgaggaagccatgaaagtccggaagcaatgtgccttagctgccttgagagatgtcaaaagctacctggcgaaagaagggggacaaattgcggttttcgatgccaccaatactactagagagaggagacacatgatccttcattttgccaaagaaaatgactttaaggcgtttttcatcgagtcggtgtgcgacgaccctacagttgtggcctccaatatcatggtaagacagccgggagccccgtgcttctgcggcagcgtagaccacaagggcatttgcagtctgaggaagtgggggaccgggtccagctcggaagcgcagctgagccct

SEQ ID NO: 620 - protein, 176 aa, Homo sapiens
MPFRKACGPKLTNSPTVIVMVGLPRKTYISKKLTRYLNWIGVPTKVFNVGEYRREAVKQYSSYNFFRPDNEEAMKVRKQCAALRDVKSYLAKEGGQIAVFDATNTTRERRHMILHFAKENDFKAFFIESVCDDPTVVNIMVRQPGAPCFCGSVDHKGICSLRKWGTGSSSEAQLSP

SEQ ID NO: 621 - DNA, 4071 bp, Homo sapiens
agccaagccggagaggaggcgagcggcagggcctggtggcgagagcgcggctgtcactgcgcccgagcatcccagagctttccgagcggacgagccggccgtgccgggcatccccagcctcgctaccctcgcagcacacgtcgagccccgcacaggcgagggtccggaacttagcccaaagcacgtttcccctggcagcgcaggaaacgcccggccgcgcgccggcgcacgcccccctctcctcctttgttccgggggtcggcggccgctctcctgccagcgtcgggatctcggccccgggaggcgggccgtcgggcgcagccgcgaagatgccgttggaactgacgcagagccgagtgcagaagatctgggtgcccgtggaccacaggccctcgttgcccagatcctgtgggccaaagctgaccaactcccccaccgtcatcgtcatggtgggcctccccgcccggggcaagacctacatctccaagaagctgactcgctacctcaactggattggcgtccccacaaaagtgttcaacgtcggggagtatcgccgggaggctgtgaagcagtacagctcctacaacttcttccgccccgacaatgaggaagccatgaaagtccggaagcaatgtgccttagctgccttgagagatgtcaaaagctacctggcgaaagaagggggacaaattgcggttttcgatgccaccaatactactagagagaggagacacatgatccttcattttgccaaagaaaatgactttaaggcgtttttcatcgagtcggtgtgcgacgaccctacagttgtggcctccaatatcatggaagttaaaatctccagcccggattacaaagactgcaactcggcagaagccatggacgacttcatgaagaggatcagttgctatgaagccagctaccagcccctcgaccccgacaaatgcgacagggacttgtcgctgatcaaggtgattgacgtgggccggaggttcctggtgaaccgggtgcaggaccacatccagagccgcatcgtgtactacctgatgaacatccacgtgcagccgcgtaccatctacctgtgccggcacggcgagaacgagcacaacctccagggccgcatcgggggcgactcaggcctgtccagccggggcaagaagtttgccagtgctctgagcaagttcgtggaggagcagaacctgaaggacctgcgcgtgtggaccagccagctgaagagcaccatccagacggccgaggcgctgcggctgccctacgagcagtggaaggcgctcaatgagatcgacgcgggcgtctgtgaggagctgacctacgaggagatcagggacacctaccctgaggagtatgcgctgcgggagcaggacaagtactattaccgctaccccaccggggagtcctaccaggacctggtccagcgcttggagccagtgatcatggagctggagcggcaggagaatgtgctggtcatctgccaccaggccgtcctgcgctgcctgcttgcctacttcctggataagagtgcagaggagatgccctacctgaaatgccctcttcacaccgtcctgaaactgacgcctgtcgcttatggctgccgtgtggaatccatctacctgaacgtggagtccgtctgcacacaccgggagaggtcagaggatgcaaagaagggacctaacccgctcatgagacgcaatagtgtcaccccgctagccagccccgaacccaccaaaaagcctcgcatcaacagctttgaggagcatgtggcctccacctcggccgccctgcccagctgcctgcccccggaggtgcccacgcagctgcctggacaaaacatgaaaggctcccggagcagcgctgactcctccaggaaacactgaggcagacgtgtcggttccattccatttccatttctgcagcttagcttgtgtcctgccctccgcccgaggcaaaacgtatcctgaggacttcttccggagagggtggggtggagcagcgggggagccttggccgaagagaaccatgcttggcaccgtctgtgtcccctcggccgctggacaccagaaagccacgtgggtccctggcgccctgcctttagccgtggggcccccacctccactctctgggtttcctaggaatgtccagcctcggagaccttcacaaagccttgggagggtgatgagtgctggtcctgacaagaggccgctggggacactgtgctgttttgtttcgtttctgtgatctcccggcacgtttggagctgggaagaccacactggtggcagaatcctaaaattaaaggaggcaggctcctagttgctgaaagttaaggaatgtgtaaaacctccacgtgactgtttggtgcatcttgacctgggaagacgcctcatgggaacgaacttggacaggtgttgggttgaggcctcttctgcaggaatggcccaagcaaggcctcactcgcagccacttcttcaagagctgcctgcacactgtcttggagcatctgccttgtgcctggcactctgccggtgccttgggaaggtcggaagagtggactttgtcctggccttcccttcatggcgtctatgacacttttgtggtgatggaaagcatgggacctgtcgtctcagcctgttggtttctcctcattgcctcaaaccctggggtaggtgggacggggggtctcgtgcccagatgaaaccatttggaaactcggcagcagagtttgtccaaatgacccttttcaggatgtctcaaagcttgtgccaaaggtcacttttctttcctgccttctgctgtgagccctgagatcctcctcccagctcaagggacaggtcctgggtgagggtgggagatttagacacctgaaactgggcgtggagagaagagccgttgctgtttgttttttgggaagagcttttaaagaatgcatgtttttttcctggttggaattgagtaggaactgaggctgtgcttcaggtatggtacaatcaagtgggggattttcatgctgaaccattcaagccctccccgcccgttgcacccactttggctggcgtctgctggagaggatgtctctgtccgcattcccgtgcagctccaggctcgcgcagttttctctctctccctggatgttgagtctcatcagaatatgtgggtagggggtggacgtgcacgggtgcatgattgtgcttaacttggttgtatttttcgatttgacatggaaggcctgttgctttgctcttgagaatagtttctcgtgtccccctcgcaggcctcattctttgaacatcaactctgaagtttgatacagataggggcttgatagctgtggtcccctctcccctctgactacctaaaatcaatacctaaatacagaagccttggtctaacacgggacttttagtttgcgaagggcctagatagggagagaggtaacatgaatctggacagggagggagatactatagaaaggagaacactgcctactttgcaagccagtgacctgccttttgaggggacattggacgggggccgggggcgggggttgggtttgagctacagtcatgaacttttggcgtctactgattcctccaactctccaccccacaaaataacggggaccaatatttttaactttgcctatttgtttttgggtgagtttcccccctccttattctgtcctgagaccacgggcaaagctcttcattttgagagagaagaaaaactgtttggaaccacaccaatgatatttttctttgtaatacttgaaatttatttttttattattttgatagcagatgtgctatttatttatttaatatgtataaggagcctaaacaatagaaagctgtagagattgggtttcattgttaattggtttgggagcctcctatgtgtgacttatgacttctctgtgttctgtgtatttgtctgaattaatgacctgggatataaagctatgctagctttcaaacaggagatgcctttcagaaatttgtatattttgcagttgccagaccaataaaatacctggttgaaatacatggacgaagtaaac

SEQ ID NO: 622 - protein, 510 aa, Homo sapiens
MPLELTQSRVQKIWVPVDHRPSLPRSCGPKLTNSPTVIVMVGLPRKTYISKKLTRYLNWIGVPTKVFNVGEYRREAVKQYSSYNFFRPDNEEAMKVRKQCAALRDVKSYLAKEGGQIAVFDATNTTRERRHMILHFAKENDFKAFFIESVCDDPTVVNIMEVKISSPDYKDCNSAEAMDDFMKRISCYEASYQPLDPDKCDRDLSLIKVIDVGRRFLVNRVQDHIQSRIVYYLMNIHVQPRTIYLCRHGENEHNLQGRIGGDSGLSSRGKKFASALSKFVEEQNLKDLRVWTSQLKSTIQTAEALRLPYEQWKALNEIDAGVCEELTYEEIRDTYPEEYALREQDKYYYRYPTGESYQDLVQRLEPVIMELERQENVLVICHQAVLRCLLAYFLDKSAEEMPYLKCPLHTVLKLTPVAYGCRVESIYLNVESVCTERSEDAKKGPNPLMRRNSVTPLDEPTKKPRINSFEEHVASTSAALPSCLPPEVPTQLPGQNMKGSRSSADSSRKH

SEQ ID NO: 623 - DNA, 1591 bp, Homo sapiens
cgcggggctgccgcttggacgtcgtcctgtctgggtgtcgcgggccggccccgcggggagcgcccccggcgcgatgcccttcaggaaagcctgtgggccaaagctgaccaactcccccaccgtcatcgtcatggtgggcctccccgcccggggcaagacctacatctccaagaagctgactcgctacctcaactggattggcgtccccacaaaagtgttcaacgtcggggagtatcgccgggaggctgtgaagcagtacagctcctacaacttcttccgccccgacaatgaggaagccatgaaagtccggaagcaatgtgccttagctgccttgagagatgtcaaaagctacctggcgaaagaagggggacaaattgcggttttcgatgccaccaatactactagagagaggagacacatgatccttcattttgccaaagaaaatgactttaaggcgtttttcatcgagtcggtgtgcgacgaccctacagttgtggcctccaatatcatggaagttaaaatctccagcccggattacaaagactgcaactcggcagaagccatggacgacttcatgaagaggatcagttgctatgaagccagctaccagcccctcgaccccgacaaatgcgacagggacttgtcgctgatcaaggtgattgacgtgggccggaggttcctggtgaaccgggtgcaggaccacatccagagccgcatcgtgtactacctgatgaacatccacgtgcagccgcgtaccatctacctgtgccggcacggcgagaacgagcacaacctccagggccgcatcgggggcgactcaggcctgtccagccggggcaagaagtttgccagtgctctgagcaagttcgtggaggagcagaacctgaaggacctgcgcgtgtggaccagccagctgaagagcaccatccagacggccgaggcgctgcggctgccctacgagcagtggaaggcgctcaatgagatcgacgcgggcgtctgtgaggagctgacctacgaggagatcagggacacctaccctgaggagtatgcgctgcgggagcaggacaagtactattaccgctaccccaccggggagtcctaccaggacctggtccagcgcttggagccagtgatcatggagctggagcggcaggagaatgtgctggtcatctgccaccaggccgtcctgcgctgcctgcttgcctacttcctggataagagtgcagaggagatgccctacctgaaatgccctcttcacaccgtcctgaaactgacgcctgtcgcttatggctgccgtgtggaatccatctacctgaacgtggagtccgtctgcacacaccgggagaggtcagaggatgcaaagaagggacctaacccgctcatgagacgcaatagtgtcaccccgctagccagccccgaacccaccaaaaagcctcgcatcaacagctttgaggagcatgtggcctccacctcggccgccctgcccagctgcctgcccccggaggtgcccacgcagctgcctggacaacctttgctagggcaagcctgtctacgaactgtctgtcacattttctcaaagttttctccttac

SEQ ID NO: 624 - protein, 496 aa, Homo sapiens
MPFRKACGPKLTNSPTVIVMVGLPRKTYISKKLTRYLNWIGVPTKVFNVGEYRREAVKQYSSYNFFRPDNEEAMKVRKQCAALRDVKSYLAKEGGQIAVFDATNTTRERRHMILHFAKENDFKAFFIESVCDDPTVVNIMEVKISSPDYKDCNSAEAMDDFMKRISCYEASYQPLDPDKCDRDLSLIKVIDVGRRFLVNRVQDHIQSRIVYYLMNIHVQPRTIYLCRHGENEHNLQGRIGGDSGLSSRGKKFASALSKFVEEQNLKDLRVWTSQLKSTIQTAEALRLPYEQWKALNEIDAGVCEELTYEEIRDTYPEEYALREQDKYYYRYPTGESYQDLVQRLEPVIMELERQENVLVICHQAVLRCLLAYFLDKSAEEMPYLKCPLHTVLKLTPVAYGCRVESIYLNVESVCTERSEDAKKGPNPLMRRNSVTPLDEPTKKPRINSFEEHVASTSAALPSCLPPEVPTQLPGQPLLGQACLRTVCHIFSKFSPY

SEQ ID NO: 625 - DNA, 4496 bp, Homo sapiens
agccaagccggagaggaggcgagcggcagggcctggtggcgagagcgcggctgtcactgcgcccgagcatcccagagctttccgagcggacgagccggccgtgccgggcatccccagcctcgctaccctcgcagcacacgtcgagccccgcacaggcgagggtccggaacttagcccaaagcacgtttcccctggcagcgcaggaaacgcccggccgcgcgccggcgcacgcccccctctcctcctttgttccgggggtcggcggccgctctcctgccagcgtcgggatctcggccccgggaggcgggccgtcgggcgcagccgcgaagatgccgttggaactgacgcagagccgagtgcagaagatctgggtgcccgtggaccacaggccctcgttgcccagatcctgtgggccaaagctgaccaactcccccaccgtcatcgtcatggtgggcctccccgcccggggcaagacctacatctccaagaagctgactcgctacctcaactggattggcgtccccacaaaagtgttcaacgtcggggagtatcgccgggaggctgtgaagcagtacagctcctacaacttcttccgccccgacaatgaggaagccatgaaagtccggaagcaatgtgccttagctgccttgagagatgtcaaaagctacctggcgaaagaagggggacaaattgcggttttcgatgccaccaatactactagagagaggagacacatgatccttcattttgccaaagaaaatgactttaaggcgtttttcatcgagtcggtgtgcgacgaccctacagttgtggcctccaatatcatggaagttaaaatctccagcccggattacaaagactgcaactcggcagaagccatggacgacttcatgaagaggatcagttgctatgaagccagctaccagcccctcgaccccgacaaatgcgacagggacttgtcgctgatcaaggtgattgacgtgggccggaggttcctggtgaaccgggtgcaggaccacatccagagccgcatcgtgtactacctgatgaacatccacgtgcagccgcgtaccatctacctgtgccggcacggcgagaacgagcacaacctccagggccgcatcgggggcgactcaggcctgtccagccggggcaagaagtttgccagtgctctgagcaagttcgtggaggagcagaacctgaaggacctgcgcgtgtggaccagccagctgaagagcaccatccagacggccgaggcgctgcggctgccctacgagcagtggaaggcgctcaatgagatcgacgcgggcgtctgtgaggagctgacctacgaggagatcagggacacctaccctgaggagtatgcgctgcgggagcaggacaagtactattaccgctaccccaccggggagtcctaccaggacctggtccagcgcttggagccagtgatcatggagctggagcggcaggagaatgtgctggtcatctgccaccaggccgtcctgcgctgcctgcttgcctacttcctggataagagtgcagaggagatgccctacctgaaatgccctcttcacaccgtcctgaaactgacgcctgtcgcttatggctgccgtgtggaatccatctacctgaacgtggagtccgtctgcacacaccgggagaggtcagaggatgcaaagaagggacctaacccgctcatgagacgcaatagtgtcaccccgctagccagccccgaacccaccaaaaagcctcgcatcaacagctttgaggagcatgtggcctccacctcggccgccctgcccagctgcctgcccccggaggtgcccacgcagctgcctggacaaaacatgaaaggctcccggagcagcgctgactcctccaggaaacactgaggcagacgtgtcggttccattccatttccatttctgcagcttagcttgtgtcctgccctccgcccgaggcaaaacgtatcctgaggacttcttccggagagggtggggtggagcagcgggggagccttggccgaagagaaccatgcttggcaccgtctgtgtcccctcggccgctggacaccagaaagccacgtgggtccctggcgccctgcctttagccgtggggcccccacctccactctctgggtttcctaggaatgtccagcctcggagaccttcacaaagccttgggagggtgatgagtgctggtcctgacaagaggccgctggggacactgtgctgttttgtttcgtttctgtgatctcccggcacgtttggagctgggaagaccacactggtggcagaatcctaaaattaaaggaggcaggctcctagttgctgaaagttaaggaatgtgtaaaacctccacgtgactgtttggtgcatcttgacctgggaagacgcctcatgggaacgaacttggacaggtgttgggttgaggcctcttctgcaggaagtccctgagctgagacgcaagttggctgggtggtccgcaccctggctctcctgcaggtccacacaccttccaggcctgtggcctgcctccaaagatgtgcaagggcaggctggctgcacggggagagggaagtattttgccgaaatatgagaactggggcctcctgctcccagggagctccagggcccctctctcctcccacctggacttggggggaactgagaaacactttcctggagctgctggcttttgcacttttttgatggcagaagtgtgacctgagagtcccaccttctcttcaggaacgtagatgttggggtgtcttgccctggggggcttggaacctctgaaggtggggagcggaacacctggcatccttccccagcacttgcattaccgtccctgctcttcccaggtggggacagtggcccaagcaaggcctcactcgcagccacttcttcaagagctgcctgcacactgtcttggagcatctgccttgtgcctggcactctgccggtgccttgggaaggtcggaagagtggactttgtcctggccttcccttcatggcgtctatgacacttttgtggtgatggaaagcatgggacctgtcgtctcagcctgttggtttctcctcattgcctcaaaccctggggtaggtgggacggggggtctcgtgcccagatgaaaccatttggaaactcggcagcagagtttgtccaaatgacccttttcaggatgtctcaaagcttgtgccaaaggtcacttttctttcctgccttctgctgtgagccctgagatcctcctcccagctcaagggacaggtcctgggtgagggtgggagatttagacacctgaaactgggcgtggagagaagagccgttgctgtttgttttttgggaagagcttttaaagaatgcatgtttttttcctggttggaattgagtaggaactgaggctgtgcttcaggtatggtacaatcaagtgggggattttcatgctgaaccattcaagccctccccgcccgttgcacccactttggctggcgtctgctggagaggatgtctctgtccgcattcccgtgcagctccaggctcgcgcagttttctctctctccctggatgttgagtctcatcagaatatgtgggtagggggtggacgtgcacgggtgcatgattgtgcttaacttggttgtatttttcgatttgacatggaaggcctgttgctttgctcttgagaatagtttctcgtgtccccctcgcaggcctcattctttgaacatcaactctgaagtttgatacagataggggcttgatagctgtggtcccctctcccctctgactacctaaaatcaatacctaaatacagaagccttggtctaacacgggacttttagtttgcgaagggcctagatagggagagaggtaacatgaatctggacagggagggagatactatagaaaggagaacactgcctactttgcaagccagtgacctgccttttgaggggacattggacgggggccgggggcgggggttgggtttgagctacagtcatgaacttttggcgtctactgattcctccaactctccaccccacaaaataacggggaccaatatttttaactttgcctatttgtttttgggtgagtttcccccctccttattctgtcctgagaccacgggcaaagctcttcattttgagagagaagaaaaactgtttggaaccacaccaatgatatttttctttgtaatacttgaaatttatttttttattattttgatagcagatgtgctatttatttatttaatatgtataaggagcctaaacaatagaaagctgtagagattgggtttcattgttaattggtttgggagcctcctatgtgtgacttatgacttctctgtgttctgtgtatttgtctgaattaatgacctgggatataaagctatgctagctttcaaacaggagatgcctttcagaaatttgtatattttgcagttgccagaccaataaaatacctggttgaaatacatggacgaagtaaac

SEQ ID NO: 626 - protein, 510 aa, Homo sapiens; identical to SEQ ID NO: 622

SEQ ID NO: 627 - DNA, 1582 bp, Homo sapiens
cgcggggctgccgcttggacgtcgtcctgtctgggtgtcgcgggccggccccgcggggagcgcccccggcgcgatgcccttcaggaaagcctgtgggccaaagctgaccaactcccccaccgtcatcgtcatggtgggcctccccgcccggggcaagacctacatctccaagaagctgactcgctacctcaactggattggcgtccccacaaaagtgttcaacgtcggggagtatcgccgggaggctgtgaagcagtacagctcctacaacttcttccgccccgacaatgaggaagccatgaaagtccggaagcaatgtgccttagctgccttgagagatgtcaaaagctacctggcgaaagaagggggacaaattgcggttttcgatgccaccaatactactagagagaggagacacatgatccttcattttgccaaagaaaatgactttaaggcgtttttcatcgagtcggtgtgcgacgaccctacagttgtggcctccaatatcatggaagttaaaatctccagcccggattacaaagactgcaactcggcagaagccatggacgacttcatgaagaggatcagttgctatgaagccagctaccagcccctcgaccccgacaaatgcgacagggacttgtcgctgatcaaggtgattgacgtgggccggaggttcctggtgaaccgggtgcaggaccacatccagagccgcatcgtgtactacctgatgaacatccacgtgcagccgcgtaccatctacctgtgccggcacggcgagaacgagcacaacctccagggccgcatcgggggcgactcaggcctgtccagccggggcaagaagtttgccagtgctctgagcaagttcgtggaggagcagaacctgaaggacctgcgcgtgtggaccagccagctgaagagcaccatccagacggccgaggcgctgcggctgccctacgagcagtggaaggcgctcaatgagatcgacgcgggcgtctgtgaggagctgacctacgaggagatcagggacacctaccctgaggagtatgcgctgcgggagcaggacaagtactattaccgctaccccaccggggagtcctaccaggacctggtccagcgcttggagccagtgatcatggagctggagcggcaggagaatgtgctggtcatctgccaccaggccgtcctgcgctgcctgcttgcctacttcctggataagagtgcagaggagatgccctacctgaaatgccctcttcacaccgtcctgaaactgacgcctgtcgcttatggctgccgtgtggaatccatctacctgaacgtggagtccgtctgcacacaccgggagaggtcagaggatgcaaagaagggacctaacccgctcatgagacgcaatagtgtcaccccgctagccagccccgaacccaccaaaaagcctcgcatcaacagctttgaggagcatgtggcctccacctcggccgccctgcccagctgcctgcccccggaggtgcccacgcagctgcctggacaacctttgctagggcaagcctgtctaaactggaaaggtgtgatgaggaatgcagcc

SEQ ID NO: 628 - protein, 493 aa, Homo sapiens
MPFRKACGPKLTNSPTVIVMVGLPRKTYISKKLTRYLNWIGVPTKVFNVGEYRREAVKQYSSYNFFRPDNEEAMKVRKQCAALRDVKSYLAKEGGQIAVFDATNTTRERRHMILHFAKENDFKAFFIESVCDDPTVVNIMEVKISSPDYKDCNSAEAMDDFMKRISCYEASYQPLDPDKCDRDLSLIKVIDVGRRFLVNRVQDHIQSRIVYYLMNIHVQPRTIYLCRHGENEHNLQGRIGGDSGLSSRGKKFASALSKFVEEQNLKDLRVWTSQLKSTIQTAEALRLPYEQWKALNEIDAGVCEELTYEEIRDTYPEEYALREQDKYYYRYPTGESYQDLVQRLEPVIMELERQENVLVICHQAVLRCLLAYFLDKSAEEMPYLKCPLHTVLKLTPVAYGCRVESIYLNVESVCTERSEDAKKGPNPLMRRNSVTPLDEPTKKPRINSFEEHVASTSAALPSCLPPEVPTQLPGQPLLGQACLNWKGVMRNAA

SEQ ID NO: 629 - DNA, 42782 bp, Mus musculus
  misc_feature (1)...(42782): n = A,T,C or G
gaaagctaatctaaatcccatctggatggaggttttggtccccagagtctgcttagaggctgtcctgcagcttgtcatttattctgtcccctgtccctgaggccctgtatgctggtggcactcctcaggttctggggtgtgggccccagagcacattgctgcctatctcctgcccatcctgtgctgctgcagccctgcgttggagtgggaggctgtgagtgatgatgaccaggtgggagatccatacttgctattgtcacctaggcagaactcacttccacttgctggtagatgagggggaagtatagagagcttgaccatacagcctgtgcacagagatccactggggtgacattcttgacgggggttcagccttatgggaattataggcccagctaagccagacatgggggtctcagaggctagggagatttctggagcttagcctgtggccccagactgtgagtgggatatactcgttcacatacctaccatggagacagccctgttatcctatggatggacatggtgagtggagtctctgttggtttccatgatcagcagtacagactctgtccatgtggagttagggacagtgaggtacctggctgtggatggtgattggaaactcccattcccactctcacagatgaaatcctgtaccactggaaagaggcttggcagccaggcccctatatttgttgggtacatgcattgtatgctctggccagtcacaaggcattgggcaagcccctgtggaggggaagagaaatgtgctggcgtggtataatgagaagtcacaaggcatgggtgagcccctgctgagggagggttgcatatgctgggtctggggtttctgcagaggctgtgtgggtcgggagagcttgatttctgaccctggtgcctaacagatcaggctaagctctgtttctgtctatcatgtgtgtctgggcgctacctgctacaccacatcgtgcttatgtgtggaaaatatcagcgggtgtgggaggatttggggatgtccccacaggggcactctctgcctgggagtatccctttgtcctgactgtccagagtccccagtgttcatgtcccatgaagccacttcattttatggtagatgggtgagacctgggtgggtatggcccagatcccctccaagtgtgatttgaagccagtcaggaatgcaaatgaaggtgaggactgtgagggaggacaggaagcccagccggggttccgtgggttccgcgacagagctgcgggcaggtgggcggtgggacctctgagccaccaggagcgacaatgctcaaattgaaacaatcatttctcttcctgttaaatagaaactgccttcgagagtttgtagcctcagggccccctctcctcaccaacattggggtttttcttgaagtcccccctcttcctctcccgcctacttactctcctccagagtctgggcaggcaccatagagtgttggggacaggcagacagttcaaggggacagcctggaagggaggcttcaaatgtccagaaagaagccctggctggccttagagaggtaagcatcctttcaggttcccagaagggaatgctgtcgtacctgtccctaagcccaggacatcatgacaggaattttcagggcccaggcttagggtagtttctgtagggctgcgctgtggtagagacagggttgtcaagaaactgagcacgggctagctggcagctcctctgggctcaggaaggctcactgcaggtcagcaacaggttcttcctgtggtgtgtctgctagcccacatggtacatgccagcctagagagggtgcaggatggggacttgagctgcagcgactgttgccaagtgtgtctctatcactctgcagtctgtttttgaggtgttgacagtcacctgccctgtgtgaatgtcaagtgattgctgttatcagtgtcttgtctggtactgggcagggagggcatcacacagctgctcctcagtggccctgtccctttggtcacgtccctctgtggctattctcccattcaggcagcctgaggatgagtgggtgtgactcccacctttgcctgcccctgcccccggcagtacctgtccagcttcagggcaggaggcttggcgtgaatgtcgggcagcaggctggagcaggctgcctgttgtgctcagagaacggctggccatgagtgggtctcttgcttgggattggaagccaattcacaggactttctcgggtcctggagctgagtgttacctgttcccctgttctcctgactttagctggggcagtaaggccactgactgttgccctgtagtcatccctgcagtagagaaagaaggtgcttttcagtacagtctggggttccagaccggaacttgggttctctcaggtagctccgaagcatctaactattctgaaaagcacccatctttctctactgcagggatggctatgtggcctatagactgggcacaagcatccattaagccgccttctcccctgggtaggtgagaggacagtacccaggtcaggagcctggtgccagacaaaggagtctggaatgatactcttcccccagagcaccttactgcaggcctccaaggaggagcccacctaaaggactagagtccaccttatctttgccaaagaaaatgcgttgctcttgacagagacaccttgaacacacaagaggcagtaacagcgaaagagccagaaattagacatgtctgtatagtatgctcaggttagagccgggcagggggtgtctgcagcgggcatgctggtacctgataagcctgaggcgtgaacagcttcgagacttccctctgctgccccctagttgtattcaggcaaaggaaaagtgccatacagccaggagctggagggggtccagctggaatcacctggctcctggacagagtgtgccctctatatagatacggatatatcaatggctagcatgcaggcacatctctaagcatgaagagtttgggattggagatggcctgcagcaattagacattccagacagtgaccaccatcgtaggtgcagacggtaatgacactgactggcaagtgtcaggggtggggtgtgaagccttgtgcagcacctgtggactgtgagcttcaggaagagttggcatggtggctacctgcctgtcagcaccatggccttcacccctgaatatactggtatctttacttctcaactcttacgtgaatgctgcctggcaccgacgcagcctgggcatggggcctcctcctcacctcctttgtcctggctctgcttcctgtgtctctgactgtggtttgattctagccacacctgtcaccagcaggcccaaccatactaccattcatggctgtatgggaggtagctgctagacaaagcactgattcccgtgcctcctggtgcccctccctggacagccccaaactcactgagtatggtcaagagaacccaaagcatagtctctttgccacctgcagaacttctccagcctccatctgcacaatggagtagaacagggtgttcttcaggtgatggtggtgatggtgatgatggtgttattgatagttatgatgttggtgatgctgctgttgttgatggtggtggtgattgtgatgttgatggtgaggatgttgattgggatagtggtggtgatgctgattgtgatgatggtggtgatgatggtggtgaccatattgatgatgttgaagatgatggtaatgatgccaacatggattatgatgattgcaatattgacgttgatggtgatactgttgattgtgttaatggtagggatggtgggatggtaattttgataatggtgcttcttgaggccctcacagccatcctcctgtcttgagatttatagtggatattgtttcccatgtctacacccttctcatctctgtgacaccattgcagaggtacactgtacactaggagttaagagtttggccaggacagtggaactttgggttgctatcccctgagtgaggctcagtgaaggtcaagggatggtacaacccttccttcagctcttgctgagtcccctgcagatctggcttgcagacttttgcctttgcctctgtccccgatgatcggctacacggccagccctctgcacttgctataatccttcctcagggatcagagaccttgaataatatacccctgagcccctcacctttaccttagacctcctcattaccatgtgtttcccagtctcccactctgagctgattcactggggagaatgcagtctccaccatcaaggcctcctggcctaggagggtaggtggtggtggaggtgaggccagggatatagcatagtgtgtgacagctcctaagacagggtacctttgtggctagtaaccataaaggtgggtttgacattcagagtctttgaggccccctgggtcagatgaactccggggttggagtggagctcgtaagagcagtatagccaacactacagactggtccagctctcaagatcttacggccttcatacttcagtgtgtcagggaatcgtctatctccctctgagttcagcttactgtgtgctccccccccccaacttcatccttacctctttcctagtagcctggtgtttagctacagggacaaatgttgacctcttggatgatcatggctgaccctcccactgggnnnnnnnnnnnnnnnnnnnnnnnnnnnnnnnnnnnnnnnnnnnnnnggatcatggctgaccctcccactgggcctctggggcatctctgccatgctaaaggttggttggatggggcagggccaggaagttagctttggactggtcaaccctttcctgtggggcatgcagggatagagcccagatgggtgcctgggattgctgctgtctgtggttaccatggtgatgaggggtgaagggaacgcacttctgtccactgtgcctttgtcttttcctctccctgctgcttctcttagggttctgtgggatggggccatcacaggctcagaaagaggctctgctgcattctggcccccatgtgccgacagactttctgggtctgagtctatgaggttatttactggctcacttctgaccagttcagttctctctgcttgaggggcccctgtggtgggctgcctgttccaactgggttggaatcagtctcactttctctgaccacccaggagggtctcgttggcctgaggcttcctgataggaggctgagatattggttggggcttttgagcaaagggcatggtgatcccagaacaggcccctagagtagtaagctgaccctgggagaggagacagctcacagctggaggtggccactgggaagtccctcctcagggagtcaggctcatagtagggttgggcacgcagggctactggagactattctctgggctggcacagatgccccagaccattttacagagaaggaaactgagacccagcaatattgagaggtccctgtgacctgccttcctcctccctcctgctctgaccacccttggcctccctcaagccctggtgccatggtccctgccacattcccattgctgctctccaggaccaccgcttctccctcccagggcttcaggggaagcagtacttcctaaaggaaggtggaggctggaggtgggcagcccaggaagctctgaggacccactgcaaagtttcagttccggggggtatccccaggcgaggatcagggcactgcttagaacatgacaggcatcctggtgccagctcattatgtgggctttggctgcatgctggataccctcctcaggcccctcctgggtggccccaggttatccccacctcctgtgtgctctccattggacccatctgtccttcctgccaggctctaaatagaacagccacatggtccactcactactgttcacccagacacacagacacgcagcctgcttagagtctgctgtgcatgtctgagctcccctttccaggagctggggttccctggctaccttggttgtgaggctttcctcaccccaccagctgcagtgggctgggattttgtgtacccttcctgtcaagcagaggctggaaggaagttcgtgggggttccctgggcctccttctgtgggtcttgctgctggcaggcattctgcagacactgtatggcataggaactggtgggggtggtgctcctcactagtgcctggcatcttgaagtcaccagaggtgtcaccaatatttcagcattcagtatttcagttttattagtgtcacccaccctttgaggactagggaatggtcctgggtgctgggctgggacagtctatctctgctctgtgctggcttgttacttaaacctccaagcattcacagtgtggtcagttttgcccctcttccgctcacccttcctggacggcagtgccagctgcccatgctgtgtgtgggatgatgggcagcttccttgtgaagatggactttctatcctttgtctatccatgaggcacatgcaagccccctggctgaattcctcctggctatgttagtggtggttttgcagaggtattttggattgtagttgtgtgtggtggtccttgtgactcgtaatctgaggttttagagttatgcaattcagttgcccccctactcatgttcctgaggccttcctgccacttcttggacagggagtatgtgtgttctgtgattcctaggtccgaagctggcactttgcagccctaggccccatcctacaagccctgatcccagagggttgtgcaggttttccttaagcagtggagatagctggtgctaacacccctgcaagtccaaggtgaggctgtcaaaagtgtgccttatggaggccatggcttatcagagtggtgacagctaagtgccagacagagcagagcatgcacacagcacacatgtatatatacacgcatacgtggcatacgtgcacatggcttgcatacatacaagatgaaccaggaggctttccttgcaaggatgtaaaggcatttcttgctcattcacttcctgattagaaagtttctccctccagaaggttccagaaaacacacccagcctattgtcacccaggctctgggaaggtgtctacagtggacattctttgtaaacaggaaagcctggggtggaggcctggggctgtggggatctgccaaggtaggcattgctctggtggcagccccttccactcaggagccctggggacttacagtcggcttgaaacaactgtctgaggcttggctgtctaccaccaggctgcaggcatgagggagggctgggggaggggtgcctaggggaaccttcacacagggacagccacattcccagactggaggcttggctcttgctcctgctgtctcactttcttcctgaagtctctgcctgtgccaccttggcctcttttctcctccactgggttttcccctccttagcagtttccatcttgagccatgtatgggcagtgccttgaagggccagaggagctttggggtacagcccataggtagctggcagccttacagtctgcttttctccctccctccctccctccctcagtccttcattctctcctgctgaagctttttcctgctactcccatagcaaagcccagagccagaggagcagctctggcttgtggctttttacacagacccagttgtggcctgaacatcctaccccagctgtcccctgtggctgcaaggattcctccatggctccttgggcggaaacactcttatatcgtgaacatggccagttttccctagtgtttggggacagtagcaaatgagagccacccttagtgtgacaagctgccctagaccctgtgccactcctagtgtccaagcccacccatgaacaggggatgcaaagagcctgaggactcagagggatttctcttctggtctcatcttgttctcaaagaccaggaagagtgcccagcccagctccttcctggtaccacagcattcccctgccttcttctggaactcctgcagaaggtgctcaaggtcagcaaaatgtgtctttcagtgagggcttagactggtgctatgtagggcatcacagtggtacacctcaaatgcaacacagcatgggatgggaagggcagggcacaggggaggtgtggctatgatgggtcggcccagtggcttccaggtatcccagtggttgtggttgcctggtctaggggcagctgcagatgtagtaagtttgcctttaggcagttcttatccatgaaccttcccagatccttcctctgtcataggtaggaggtggagacttttctgacgtggtcacagtaattcattttatgtcaaaggcacaaagacattcctggctcgtataagcaatcagattttgtatttgttacttttagacacactctctgttccctgtggatcttctcaaatccatacggagtttaaatagcctatagagctggtttgtagttgatgttgtggccagtaggtgctcatcactgccttggttccgatattaaatttttcttatgtattgggtgttttcccttcatgtatgtgagtatactctgtgcacagagtccctatggatgccagaagaaggtattagatccccctggaacaggagttacaggtaattgtgagccagcatgtgggtgctggtaacccaacctcgatcctgtggaagggcaggcagtgctcttaaccactgagccatctttcctgcccttttttttttttttttttgagacagggttgctctttgtaaaggctggttttgaactcacagagagttgagttctgcctccgcctctagttctggacttcttaaattggctttttttttttttttaaattttattatttttttttaagttcaacaagctgatttgttcccagttttgtgaatggtaagggtttctggcaggtgaagtaagattcgtttgctcatggaattgatcccttctgtcagtcagggcagtcatagtagccaggttggcctcaccatagcagacctggtcacagtgggacctccttactgcgtcctcctcttgaggggaagaggggagaagttctgggagtcttagacgtttctcttgaagggctggtcctggtggcagggcctctgtgccatcagtggcttggaactggcacaggtatagctactgagaccaccctgtactgtgcttgtcaccaggttcagaatgggcttgcgagctttgtccagcatcaagtctgctctgagccacagccacagtgcctgtgttgtcttaaggcctgtgtggtgtcctccatcatctgctcagggcttcttcctgttctactcacattccaggataagttaggctcagagtggtgaggtcagtcgcagggtacccacacctggggtgggttagtcactcatgtcatgtgcctgtaagttgttctcgacttaccaggagcaagtgtcatgccaggcagcaggaaaggccaagactgagagatgagagggaaggaagaaagcggggggagggaagggggattctcagagcaccagcctcagaggggtctgtagctcccaacatggtgtgtatctctgccctgtgcaggctcctcactgtcttctccgtggcctgtcaggcctgtgggcactagatttgacacctggtgacctccccagcctctggagttggggaggcctgactgagatttttcatgtgtttgaaaccctgcttgaaaggttggcatgtggcgtggagcgagaggggccaagggcctgtagtcggaactgccctgctgtggtacccagaagtctaggtcatgtggtccagagggaagggtcacagacattagagcctttagcttgctgtgctcgtcctgaacccagagagtctaagatggatgccagtggcatctcttggggcccttaaagatagtctggcttttagagtatggcaaggggtcctcgggagattcccaggtcctagaggatgctctaactctccttcctgccaattcttgtcttgcagacttctctacccaggtgaactcttcgtccctcaactctccaacgggtcgaggctccatggctgtcccctcgctgcacccctccttgggtccgggaatcggctctccactgggctcgcctgggcagctgcactctcctatcagcaccctgagctcccccatcaatggcatgggtccgcccttctctgtcatcagctcccccatgggcccgcactccatgtcggtacccaccacacccacattgggcttcgggactggtagcccccaggtaagtgctaggatgaggtttagtgacatgggacagaaaatgggagcttcccctgtaggctgtaaaccaatggttcagaactgagatttctactgtttcttcatgagagtgggctacagagcaaaagctggtctccgagagtagtggtaggactgagcctcactctggctgacccacactggcttcgaaagctctgtcagttgaaatttcttgcagctggtcttcagctcagcctggagcctgtccccaggactgtggaactctggggtatatgcttccccaggcttggggccatcttccagtggtccctgagggctcataggttcctcttcctgggacactggcctcagtatacccaggccttcagggaaagcacatcctggtcctgggaacccacccttaggttctacagaggcccctggcggcagcctctgcatgggctctggctctctgtggccctgtggatggtggctatctgcaagacgtgacttccttttctgtgggcttggtagagccctcgtcttgctgtgggcactctaggggtcttgctcagcctcttcctcccaagccctgaatgcttgatggatatcttatagagcctcaccctgcttctattttcttgagggtcttggtgagtttctaacaggattttgtccttggcgtacacgaaactctgcatctggaaaaccagctccttggggttccttttaccttttctgaaacaggtcagggatcccctttctgctctgagcttctcgggttgggttctgttttccacccccagtagctttgctgtgccacctccctgtggcatacctggaaccatcctcactagaaccagagggccaacagcacctttgtgtcccttgatttccaaagccttgtgccctgagccatgacatccgtgccccccttcctggtgccgggggtgtgtagagagaccacttacacctcaccaggtagcctcttgagactggtctgagcctcttaagcttctcctccagacaatctggctgctttttctaggtcgattccatataagcccctttgccctagtgtgtgtgtgtgtgtgtgtatgtgtgtgtgtgtttgcaagctaacccaagcatctgaacacatagaagggctagggtgttatttatgagcaatctgttacactgtcccctgctccccaccttgcttttcagaagcagacagaaggcctgaggtgctgctggcatgactgcctgtgtgcaggcatgaagcaggcctgatcatgcagccacctcccctggcatggccatgctcttttttatcatagcttctctgtacccttgctagctctggaagccatgagtagtgagggtaaatgaagagctgatctccatagttccctggcttcagtgttgacccctcttggctctcggctccatgaggttccttgctatgtcaggccacagccacccggtgcccaagccattgatgtggctcatgtgttttgggggctctactaagacagggcccagtgggatgctccccactacttcccagaccccactgtctgtctgtccatgctggcttccctgggtaatttacaactgggaagcatttctgactgcccagatgtagagagcaaggcatcaaggcctctgattgtcctgatttacggggaggatctcgcactgtgggaactgcagtgactttgtaagcgtgtgtttcatgatggctatagccaggcagatggggaacggggctgtggggagcgtgcagtgcatgagagcaggtctgctctggatagctcatctgagtgggcttgggaggacagggtgaggtaggagtggaagacagggtgcctgagagataggtggggacccaggtgcagtagtgatggggtggaactgaaataaatgctaaggatatgaaaggggaaatgggatggcccccacccagggagtcttcgggctccagcgagggctgcccagtcctgggtctcctgaaagatgggtcagaagtacccaggacgatggggctgtggttcgtgggggatgctgaggaaggaaagaatagaaactgtcctggtccgtcagctcaaatctgggaagggcaaagaaatcgtcttccaagtcacgggttcccacgttgcctactgtggagctctcggggccagggtgggggtgggggccggctcggtgctacagatcaacctctgctctgccctgacatcaggtttcacgggccccaagctgtttattctgcccagagccaagacctccagaaacctgcagggttaggcttcccatacagtgagtggagtggagggatgtacagtcttgccagcaaaagccggctgtctccctgccgcccgtctccctgccgccccaggattcctacatagggccttcagccagtgaacaccacagggactgctgctctcttctgcagtgagatggcctgcctgccgctaagaccttccacgtcctgacaaccccctctgacacactcagagttggttctctgtgtggatctccaggctccccagcagcccccctaaagctaaccgggatgaggtatccttgctgaacctcacagtctgtgtcacagtgccggccagctagggctgcagaatctgctcttttcctgccccgtgagaaaggggtgggggatggggcaggaggccctgaggaaggcggggaggttccccttgcaggggggcagcaggggctatacaaggccagtgcggactgtacagctggctttctgccgttgtcaggggttttcagaagtggggggactacccagccgggctctgacgccctggcagataggcaggctgagggaagcgcctctgggccctgtgcttactgcagagctaggctggaggctgcggaaccaaaactgctgtgtcattgcgacgctgcagctgttgcctgggtgacagggtgagtttcccacgcttgcccctggcggccagcgggcagggagaggcgaggggtgtgctgaggccaagatagccacatgggccctatggcttgatgtctggggtgtccacttgctttcctctcctgttctgcccccagataccactgtcatgcagggtggtggggatatgtgtgactctggaggagtccagcctgattgcagccctgaacctgggcctcttgtcctcacccgggtggtgggggagtgccgagtgcccgggctctcatgtgtccagggcccatggcacattgttaaatggcagctgtagctccttggtgggtggtggggagtaagtgagcctcttgtatggtgccgagagtgctgggatcactgagatgtaaggactttggtaccctgcagtggcctggctctcatgagggggtactctgaggatggtcctgttagcttgtagctgttctggcctgagtgaggctctgtagaggggagtttttccttgtaggagaccccgctctcattagtgcccatccccagcctgccagggctaacctaccccactcctcctcttgcagctcaattcacccatgaaccctgtgagcagcactgaggatatcaagccgccactaggcctcaatggcgtcctcaaggttcctgcccatccctcaggaaatatggcctccttcaccaagcacatctgtgctatctgtggggaccgctcctcaggtaggaatgcctggtgggcaggggcacaatacctgggcacagctcactgagtctccctagctttttccattgggttgggtacagagaagcaagagcccagggtagccccttgtgcctgatagaataaggggtgggttgggagctccaggggtctcattttgtcctcaagtgaggtggacattaggatgggaagggtggtctagaggtatgccaagagaagatgtaggcatggatggctgaggtgcagtgtctgctggcctccactctgggccaagcctgagccgagaatagtgcccatcctcttccagggcacaatagctcaggcacagagagcacaagaccaccattgttggggatgctgtgctcagggctgctgacccatagcgccaatctgtagtagcggtggacctgttctctgatgaacagggaggatcagagtccagcctgagcccagacaaggactctaaaacctggatacagagccctggtctgcagcatgacacgtgggtgagagagggccttgtcattaagttcacccatcctctacccccaccctgcaggcaaacactatggggtatacagttgtgagggctgcaagggcttcttcaagaggacagtacgcaaagacctgacctacacctgccgagacaacaaggactgcctgatcgacaagagacagcggaaccggtgtcagtactgccgctaccagaagtgcctggccatgggcatgaagcgggaaggtaggctttgaacaccctcctgcctggcatgctcttctcatcagggggcctccattgtcccttcctcagcattctttatgtggggggcatttgcatacagagtccaggcctgcagtttgcagtttgccagactctggtagagcctggcaggtttctctgtgtgcctcctgctcagcagagcccctggcctatgctgttaagacagctgtctggatagcttgccttcacgccagcccttccccaaccagactctccctgttctgctgtgtggctaggttttaggattttagaacagacaagatagaccaggtctgtcccactggcagcatggctcctaggacaagactcttgaggtatggctggggtgagccagcagtgttggagacagatgaggcttggagagcaagcaccgggccagaagcacagcagaggaggctggaagcagaagtgggggcgaggaaggtgggaagagaggcttggtacctacatgatctctgcctgcctagggaggagatggcaagggaggctcatgagataaggtacatttgggttggagtgggggaaggggcccctagagaccaccaagtatctcccagagcctgctgaattcaggtgagggtcatcttgggcttcccttcttctcaaggccacttgcagtttcatccctggcagggttacctgttagcctacaggtcctctgaggagcaggattctgagcctgttttatcagcaagatgtatatgtatgaggtcgggaggctaggtgacaagtccaggtgactccccagaggtcccagatgtcaagctgtatagctagacctcctgagctactctgtgtcctcctggtcctccatgtgggacagtagttctctggtttggtgtgtgtgtgtgtatctgtctgtctgtctgtctgggtgtatgtatctgtctgtatgtttgtatatctgtctatatgggtgcctgggtgagattccttcatcagtcttaggcctgggcctcacagggctgggcactctctgaggcaggctctataccacgctgtccccagcactgcccctccagcttcctctgtctgggttgtgcataggaaccaatgcctactgtgtgtccttctaccttcccatcagctcttcagtcgcctttgttcagggactcctgagtagggtcagtgctagagttttcttttctcttcacagtgaccccttcttttggtacaatacctctataagaggtttccatggcctttaggggccaagtcataacacagttgtctagctgagctagatcccagcttctggctctcccttttttttctatagtgagaaagcaaagggaggaagtgctctgccaatggagggggtacattgtctgtccttggggacatgccctcaagggagcacttgctgggagtagctgatacagcataccctctggaggacaggtccttgagtggtagatctggggtgggcctcggccagaaggtggacctgaggctgtatgagcctctcaggagctgagctcagccctgagtgcactctttctcagtgctattcctggtgatgggcactgttaatgatctctgggtatgagctcccatctcctgaaatggaccaccagataaacaggtagtccctggctttggtcagcatgagcttgggagctggtacctgacccagtgttgggtggtgagcatggctccatgtagagatatgttcagactgacgcctgagcatggacagattaggtactgtgtgccagcagaagggagtagtgtctgtgaaagccaaggctactagcacacctggcatgtggcgggcactagagttctgaccccagagagggactctctagctctaacatgacccttctaccattgctccagtggttaaccttgggtgctggcattcagattacagctgcctgagcttccagaggtgtgggcattgtacatgatgtcccctaatcccaatggaacagtaaatcttgaggtagggagtctggagtcgtctaggtcttactatgtacttcctgtgggtggggcactgagcaccccctctccagtccttgtccccccatgcctttgcctaacgctacctgtcttgcacagaagtagaagtggggtgcagaaaagagaactccactgcagcccgctctgttccttgggctacactgtgtgacacctgagaaatgctttacccattccactggagagatgcacccccgtgcctctttgttccagctggatttttgagtattcagtataagccctgtgaagctctgtcttgccctaaacaaagaagccatgcaacttggccccttgggctgcacgtatatctgtgtggcagctctaagatgtctggaggtccttaggcccggtgggcactgccattccatgtctggtccttggctgggggaagggactttttcttgcctacctgagacctatcctatttcccaatgcctgtggccgtagtccacagccctgctcttgagatggttggccctagagtatcctgggagcccactgtgcaggggtctttgaggattcccaagagctggtccctacttctacttgcttttaggtattggacactgcccccaccccaccctgggatctggaccagtcccagactgaattaatatttgattccttctgttctcctgggctaaccactaggagagttctatgagtagtgggtggggctgttggctgtaagagttgaatagtctgacagcctttggagaagttgtgaggccggttgccaacacagggcctttggcccagagaacgcaggacgtgcaccgtcggctcccgtgctagctcagcccccaggtacccagccccggtgagcagcagtcattaagccttggagctggaatctaatgatctctgtcttccaggcttggtcacacataacccagggaaccgagacgggtgtagaggtgctgtgaggagggaactgaccacaagaaggctgtgtctccctgtggggtggccctgccctgggaaaggcaccctgtcttcaggctgatgaaggatactgcaggctgatagcatctatgttgggcaatagcaggggcctgcgtgtgcaagcagccacggggacttgtttggcagcattccccagctgggggtaggcagtgcccttctcaggctgggcctggacctgttggctggggcaggtggtggtagggctgggggccctgcaagtgtgatgatctgcaggctggagaggctgcacactacacaccccatcctcagctcccttcccctgaggcctctttgcatttccttcctgactctcttagcttcctgcaccctgttctctggctctggagcacttgggtgcggaaatggcagtttcgtgtgtgtgtgtgtgtgtgtgtgtgtgtgtgtgtgtgtgtgtgtgtgtgtgtgagagagagagagagacagagacagagacagacagacagagacaggggtgtacccaccatttctgctatagggaaatggccctaccttagttgtttctctgggcttaggtctttacctctctgggcctggtgtctccatctgaacatggggcttcagtaaacagtttgtgggacagagcagaagacagctcaagctcagctggtagtgaggttggagcatggtgaccactgtgtatttttgtgttgtttgtgcatgatgcatgcctgtctgtgtcttcactcttcttgggacttgccccagacttgtccttgagggagggaatatcataccctgagcttgggaccttgggaagaagccgtccaacactgcctgggtattcagaaggggcaataaggccagtgttgatagaacctggtcctgcctattccaaggcccagctctgggcttttaaggggacagaggaaggccacagtttctggcagagccccaaacttgggaagcattaggatctgggatagccatttgcctctatatcctgttcaggtccctcagttctgcttgtgcccagtggctgagcagtaccccaaacactccacttttgactgtgtgtcctaagtgggagccaggtgtgctggaggagggtcatctcctgctcagcctgcatctggatcttgggagggctgaaccacaggcttcaggcaccaccagcaggctgagggaatctcagtctgcggcagccacctcccccgcaaggcctgcgcgggcttggaaggataacgaggctctgtatttacagacgcctcccgcccgaggcttccgggcgccagtggagcataagtcaaacatgagtgtgtctaaaaggtgattgagctggcaaaacataaatcccctactccctctgccccctccgctgtctataaataaaacgataatatttataacgatgccgccctgagctgctggggcctttggaggcttcaaagtgcttcacaaaacatttgctaattaattctcagctgcccccgcatgggaggcaggtgtgaggagcccctcacccgcccatggccaagctctcagggataactggctgcggtgagggcctgccttctgggttgcctccttctgggcttcccatatcccaaggctgtctctgtgagcaaggaagtcccttactggggaatgaaactgggccagcagggtggggcccagcctgctcaggtacttctttcagggtcccctgaagggcagactctgcattgacattttacaggaagtgggacacagagatgctagaggaattgcccaaagtaccacatctgctcaaggtataccgctcattccagagcctgccgtttgctgtggcacttggccctcagagtctgtttttcccatctgggaaggtgaggctgttgagttgacattgtcctagcctgaggtggaagaagagttttgtcatctggctttgggatagggtggctgcctgaccctggctacaattggtctgttcaggtgtctctcagtggggctgcttaatattggtgggctgagtggccagagccctcagtgacttgtggagtgaccctaacacagatgcactggcagccacatggagggcctgtagaagcccagctgggaagggatggagtctggcagccttttgcagcccccatagactgggcaccatctgcccatggcattcaactctacaccagccccaacctgctgtcagattttccaaaagagccaagcttgcaaaacaccagcctctgcccagttcctcagcccagctggtgttctgcaggcgtcagatcagcctcccatccttggcttgttcacaggtagaaagtctctgctacaaccaggtcattgggtttggggagcttggcccccaacgtgggagaaccccagcgcaatggtattggtgggcccagcaaggagcggtagccaggggattaaaaatgtcactcagaatcgatgcagagctgtggcaagaaagggagcccagtgggatcctgggaggactgaggggagatgggcagggagagaagtctcctccctgggaggtggctgctgggagctatgaagccctccccccttcagccctccccacttcagccctcctgttggccctgtgatttactctgtaagccattcaaggaggttgtaggccaggaggtaggtctgattgtagagcaggaggctggtgctgccctgctcgtgagctcctgatgctgctgagctgtgtgctctaccatctgggaactcaagggttaggagagctctgaccaaggtcctgagatagcagcaccaggaagatcccttgggccacacacacccttgggctctctgaaaggcgccctcctggggcactggtctggagaggaggtcatccaggtctccacctcgcctgctgcaggaacccagaatggagagaggggcatgttggctgtccaggcaggaacagaatagagtaggttcacaggagctgttagaggtgggtgggaggagaaggcacgctcactctgttgctcccacctgaggctctgcactggacctgcttcccagaggtcagcctgcccaccccactagttcttttccttccatgagagccaggctgctcacagctatatgggggctcttgtctggggtgtgaagcagggtgggcagtcccaaggcctgtggcatcatggaggaaggggaccaagctatgggctgtgtgaggtcggagtgcttcttggcagaggcaaggatggagagcatgggacattgggtgccttcacctttgcccagtgtgtctctgagtgtgactgtctattgctgtggatgaccactgtcatcacctcagtggtcacctgtttgtcacagtcacccatcctgcccctgatcaagagaacgtcctgtactctcctgcgtacttttatacgttgttccagtgaattggtttcttcattttactcctccttcaggcccattcctacttcttccaggaagccttcttgggttttcccacatcttagaccaccatcgtcttgaaatcccctgttagtattcctgtgacccatcagctccaggaaaggccatctgcccttagctcagatggggtctggtgtatttatataattagctgagtgtgttcagggtatacagccatcctggcaagggccaggcaggtattaggctggccctaagcatgtgggggatgtcctaggaactgtggggccggccagcccaggtgactgtctcctgtttacagctgtgcaggaggagcggcagcggggcaaggaccggaatgagaacgaggtggagtccaccagcagtgccaacgaggacatgcctgtagagaagattctggaagccgagcttgctgtcgagcccaagactgagacatacgtggaggcaaacatggggctgaaccccagctcagtgagtgtcagatgctcacctgcctcggtttcccctgtactcactctcttaccctcctgcttcaacaaccaatgaacccccagccctttggctgcctggcctttgtccccagcagtgagacctctgtccagctgggtggccctgtgagtgtggggatacgccagccttcctgctggccttgcttgtctggcccatccaaatacgcagcagggtcactgtgggatctcggcatacatcacggtgaggcttgagctcagtgcaggggagtccttcagagaagctatgtggagctgagcttgggcagagccctctaagctccctttcccacacactgctacaagaaggtgcagaggccaacagggaggtgctcatcgctcgtgggtggcagctgttgtgacgactgttgaagcagaagtgtctcttggccttcagctgtcaccctcgagctggccacctgtaggaatggcctagacaatcatcttccctcgtttccctgtgccacctgccatctatagctgtcgtagcctccagacaagaccggagggccatagttcccactgctggttcacctcctggctgctcgcaggatcttagtttcagatctttctggcttccatgcctgttcctggactttcacctgagctcttcccccactgtcccctgccctgctcctgctgtcacttaggggccattggccggtgtggatgtgtttgggtggggtactccatttgcccaaggccccagtgacgaggctacagccatgtcccggattggaacagggccttgcacaaacccacaggcctcatgttgtctcaagctcatagcccaactatgtctgcctcatatgagctttttattgacatcctgacctcatctggaccctcatgtaggcttcagatctgggaccagagtcctgccattaaccactggacacccagtccaggtagaccttaaggaagtccctttcggcttccccctctgaagcagacttagctagtcttctcttgcatcttagtaccctcgtctcagcctgtgactgtggtggacacagagtacccattcttttcctccaactccaggcacagggcagcggtatagtgagctatcccaggagtcagtggggtgactgagctctgtgttgtcaggagccttgccctgtcccaggggctcgggcatgtctcttcctctctgtagtctgtgagcggagatccccccttgcatatttgtgaggacccgtgacccagttcctattcccccacccccaccctgttacccagcattcatctgtctaatcccagagctgccttactgcagacaatgcctagggccttgcaggtggtcttccttgggggacccaatcctggccgtgtgaagatagctcccaatggagggagaccacagaaacccttgccctctggaacctgcccagtgctctggttggcatctgttccctaagccctcttcccagtcctggaagggagaggagagcagcaggactcggctttgtggactagggcctgagggtggttggctggggtctgaagggtgactagggttttcctttatcaagtaaggccattgttgggaatggcctcagacgtggccttagctgttcttccatgagggttcaggtctttagagcgacactgtggaaagcctgtgtgctccagtgtcttgtgactggccttgatctacatacatggacctctcaggcaagctgaggaggataggctgcacctagcctcacagatgggctgctggctcctccgggtcctgcctgggtggtcttgtgaccacgcctagctggcaagtggtagctcattaaatgtctgctgtggagtctgctgagaggagtgaagctacagtggaacggaacagggcaggaccagagtactctcagccctcccttccagacagccctcctgtgggtgcctgctgggtgtgggccctcacacctacgtggcccctgcctccttctttcccggctcctctgctcaagccttgtgtccagtcctggcagacagcatgtgtgtacatggccgcagaggccacagtcagccccggaataactttgagctctttttcccaatcatagtagtattgtgacactggattcaagagggtggcggccagggagaaagctgagatcacagagcttgggtgtgaggcttgttgtcttacagtccggtctatgcattctcccagctggcttagggccctcactgtctcctgtcttggggctgcctccccaggagatggcagggaaggaatacatccacggagcagccccttgtggctgagaggcagagccaggctgcagacagacagtccctagtacctgtggtgccggggctccactggcctctcaggtttgctgagggttgtgtggctgggagatgtcacccattcctttggactctgtcctggggaccatgggctgccgtcccctgtccttgcagccctgggcttccctgcagccaggcctgccaggccagtgatgggaagctgatttgtcagtgcctttcactgagcgcttcacgggcccttcacacggggctgggtgtttagactgaacgtcactgctgagcagatggtttctgtcagctgaaggaagccctttaaagccgacagttctctccttatcggatgcttggctacttcttttttcaaaatcaggagtcttgtatcctgttcttgggtactcttgcccaccacaccctgaggtcagaggctgtgaccctggcccacccgacagggtaggcttcccagcctactgtaaggcccacctgagttcctcacctataacaaggcctgggtgttcctcttctgggcagaactttctagaaggcttctggtgatatcacctctacctgcaacttggaatccggaccaagcaaagaccagtccagccccaagcttgtacttgcatgtttgataggacttctcacctgggtggctactgctacctttagagatggggtctggccctatctcagctccctcaccttcctgttaaatggctccttttcctcttcccccagcacctgctctcaggggtggggaagacctgataggcttccatggtacagattacgtttccttcagccattgagctgtgtgaccctagtctgtcttgatgggccccagtcaggttttgggcagcgctgactcttatcttcctgcctttcctgatttggaggttccccaggccccctgacttgggactcctgccagcttcaggtcagccatgtcctctaatctgcttttcctgataacatcccttctgacttacagcctcctgcttcttctgatgaccactgccttggtactagtcccgctccaataagccagggcttcctccagcctgttactatggtggatctcttctcagagtcctttcactgtgccaggcctccgatggtttgggatgcagatcctgggaccccactccatgggtgttttgtgtggggtgaggtggctctgtcggctatcaggtgtgaggtttgatcaatgtcctttctccgttctagccaaatgaccctgttaccaacatctgtcaagcagcagacaagcagctcttcactcttgtggagtgggccaagaggatcccacacttttctgagctgcccctagacgaccaggtcatcctgctacgggcaggtgagtagcctgggcaagtggctgctagtggatcagtgggctcctgcccactcctgcatgcggtatagcgctaccttccccttccagcttagaaagtcagtaaagggtctcctcggctgcccgccaggtctatgtgacctctgcagccgtgtcaccttggaagcttcaggcttttttctgagcagaggtcttgatgcaagtgtctggagcataagagtgtgtgtctctcatagccaaggggactgtcgggaaggagtgtagccttggaacttgggctgaggctaggtctgtaggctgccctggtccttattgattaactgggcattggggcatgctgactgttgctcagagtccaccaggtcaccagtaggggtgttaggatcgagagacttagatcgccaacctgtggagagatggggatatattgagaatgtcacctgcaactcttgctcgccacagaactgtggtgacagttgacactaccccactccggtgaagagccctggagaccatgctgtctcgaggggactgagtgccctgacttgctttggttttctgcttgcaccaagggctctcagcctcagcccaccccagtagataccatgagcagagatggttccctgttgttttggaacctatttagttggggtgaggctcgcatgggcactgatcttcctaacttccctttgaaaagacctcttggtaggtatgggttgctgagatgaacaagatggatcctgccatgtttgcctctgcctaggtgggcttgtgggatggggcatgtgaacacaggacttctctgaggctgggaagcactgttcagggggaactgccacggctgtaggaactgcagagccatctggccttctcgcttaacacaggtgtcccagtgagcacttgccactgaggcatgtcaacccatgtagaagggacagctctagggtggagcctcgggtgacctgctcagtgtggggctcaggtgcctagaaatgagatgaggcagaattggccccacatatccttatggggaccctgaggtcacatttctgggcgtgatctcccctgtggcaagaagcttatcagcaggccccacttctcaaatgctgactgcttccatttcccattgtaaaaggggtcggtaggcttggagccgggatatgggaaccacaaggcttgggaagtttctggacctgctgaaaggctcctgccaccttgtcaaggagcccctggctgtttgtgcagagttctgtcttctctccctcttgaaggcccctttttagtgctttcatagtagctctggttggtcggtgctgggatgcatggcactaggcctgtggttctaaggtggtcgtcctctcggtactcaactctcctggcattctgcatgctccagactggcagcagtcacctcatagctgtcacggggaaagtcctcaggagatctcccagctcctctgggacacatgcatgccctcttcatgtaagaaagaaggttccatgccctgtgtttgttagagggagtcctcgggcagaatttcccaggctggtacattggtagaatgtgtgcttgctagaaggaagaggcactgctcatgctcaggtgctcaggaatcttcctccaggtacacttactggggtcccactttgaggaccctgacttgagtatggcaggagatgagtctggagcatgctgcttctgtgatctggctgtgggtgagggaagggacagtgatggggtcatagaaacagcagagtgaccatatgcctcaccccttccccaggctggaacgagctgctgatcgcctccttctcccaccgctccatagctgtgaaagatgggattctcctggccaccggcctgcacgtacaccggaacagcgctcacagtgctggggtgggcgccatctttgacaggtgggctgggtggcactgtctttgataagtaggcagggtaggtaccatctcagataggtgggatagatgccatcttcaacgcatgagtggtgtagcatcatctttgatggtatatgggttggggactgtctttgattggtaggctaagtatggattgtattcaacaggtaggtggggtgggtgtccttttccataggtgggccatcctgaataggtatgtagtggaagggggctacctttgacaggtggggacaggccccttaatctctttctgctctgttggacatagcctctgcgtagaaaagacattaatgtaaaaaaatgcaggccagacatatggagactactgtctgtggagtggaatatcaggggagttgaggccacaggcagccctcttcctttgtgagctgagtatccccaagtataacaaaaacagattatgccactggtacggttttataagtgtcaacatctggcacatctcagccatgagcactgttgtgatcctggggtgaactgtgccctgacctatcactgaataactggtgtttctgatctgctgctccttacagccccagcagacctgagtctaaggcacctctgcatgtgccttagctgctttttagaaacatgctcaaaggagcaggctgcctggagtgcagccacatgcagaggccacctggccccagccagttacgctcctgcaatgcctgtcttatatgcctaccaggtgagggactgtgactgcctgttttatgtctggatgcccagccttcgtatataggctaagggcctgtgccagacctcagtgttctggggccctggatgccagtctctgccagctgaagttgggggcgctggggctggtgcataaggcagtgagtgggaatgagcaggcccataagaagaagtggggtaggggcgaagcaggcgagtccctgagctcctgaaattggaggtgagcagagccacccaccagtgctccgggatagcaaggacagtacacaggctgagttcttcccagggaaaggccagctggagcacacaggcaggtaaatgctaacctcagctcagtaccaggctctgtgcggcaagcccttgacaagctaacttacagggccactccgcaggggaaggtattggagcttagcctatggggtctgattttgggaaatgtgaagtgacagttctgggggcttgatgcttttatcttctggggacgcgaagtgctagttggagaggccctcgcttatccttgctgtcaaagcgagtggactgtgaagtctgattcttggtggcagggctcctccttgccgctgaggtcagagagactctggttcaggtggctgacggcagagtggagcctaggattcttccagactccgtacatgttgaatgggctaaggacacttgaaggtcctttggaggggtccctatcttgctgaggaagctatgtgatatctgctgatgaaaaatgactcccaccaagaggctttgtcccagggaaaagtctaacctggagctaaaagaaacagctctgagtgcagggcgaccttgactagccacgaagtgggaggtctcgtctcagctctccttggcttatcaatcttggggttcctcctctggtctcagattcccagaatgcactgggggagtggaggaccccatcttccacaggactgtgaggtcacattgatgctcacttcctgtggacttggccaggcccagagctttcagtcattctcggtccgtcctgggcttcacgcgtccagtggatcctcctcggtggggctctggtgaggatgtgtctaatgtggactttggcacctgccttttcctgcagggtgctaacagagctggtgtctaagatgcgtgacatgcagatggacaagacggagctgggctgcctgcgagccattgtcctgttcaaccctggtacggtcctcctgcctcccacctggccaagagcatgcgagtcttcccagctgctctgcgccatgctttgaccttcagggcccagtgtccacattacaacagacaccaatctcctgcctccacttgtctggagatgtaatggagaggctcaagtggcactctatgcggccagagtaggcacttgacattagtgctctccagctgagcctcgtgggctctgctgtccacagtggtctagtgttagagtgagctcccaggatggggttggtggtcagttggtcagtccatcttgttaggtgtcctgagggtagctaacttgtctcaggccttggcttcaaggatatttggggacagggcagagcagcctcttgaggacagcaaatctttttggtagctctggagctgcagtgttcagggcctccaagctgttgctgtcacagaggccgagactgtcttctgtgtgggaggctgtggtgtgaagagtggcccaggcctgtgctcacagcactgggttggtggcagatgccactggtggccagtccacatggtgatgggagcacacaactgagagcgtggaattcttcctggggagaaattcagggattcaagagatggctgtgggcttgtgggtggctctgactaggctccaggaagccgcggaggctggagcactcgctgccgcagggtatgcatgggcttctgtatttgaaagtccatccttgtctgccaggggaggggttgaatatgggttggaagcttggctgacggggctcaccagccctgcacatggtgagtagaaaatatggggggacagggatataggcttctaccccagatagctcattcctgagccaacctgatagtttctcaggttaggtctgagtggtctggctggaggcatggtgaaccagggaggcctcagctggggctccgagggatagggagggactgtcagggactagatcagttgaaggtgtcttgtgtattctaaagagctcccagaccccaaagtgccctcagcattcttactggtacactgtgccctgatggtgttaatgactatggctgtggtttttctctagcctgtattgtggccagtgtttaggcgctgaggaggggtctcctggctcatggtatggggagatcctcagggaagggcttacagctttcttcctgtcattgggaccaggcccaagggcagtgagaggattggttatctctcatgaccacctggagaaagatggggaaactaagtccctgaatgacaaggtactggtttaaggtcacttgactttcaagtggccgaatggagacataatatgactctagaacacccatcctcctggtctgggagctatgggtctgcagggcagccatatctagttgtgtagcatgcacactctctgctatgcttgcatgtggataggagatagtctgggggctctgacctgaggctatttttctctacagactctaaggggctctcaaaccctgctgaggtggaggcgttgagggagaaggtgtatgcgtcactagaagcgtactgcaaacacaagtaccctgagcagccgggcaggtgagccccgcctccatcttggacagccccctgcctctacccttgggctcagccacacatctccaaagccctctgtatgccacaaaacaatggtgtcctccttaaaccagcctggggtgcttttcaggctttgagcaggagctaggcagcccttggactcatgagctctgaggactacccacttccccctatacccagttgagataattgatccatttcttagtgcacagtaggtccttgctatttacgagtatgaagccttatgttcttcacctgttacgtgacctggaaatgccagcacagcgtaggtgctgtacagttgtgcataatacgtggctgagactggagaacacattctttctgctggcctaaggaagactggcatctagtcatgttcagtgctgggtgcacagtctagtgttaggcacacagtaggtgtccaggagaaatggtgttttccaaggattcagttctgcttcttcttgcagtctcccagtgtgcaggctaggtgtgagtggaatagtggaagaccggggagatgggcacactaaccaatctcgttgcctggcacacacatggttaactgtccacactgctgtttagccctcatctggtttggtttaaagtgaaacttcccggaggaggacaggagggtggcagcggcttgtttttcctggcttcctgccttagcccatctcgccagctcagcagaaaacagcctgttctctggcacctctccagcctccaagctacgcttgtgcctttaaactgaggactgcggggcagccagccacaaggcttcctccctggaaatgaaagacattgttaataattaatgaggcccagagccccctccagtatatagggaggccctgagcagacacagaggtcacacgtgggaccccaggtcctgtccccacaccacactgtcctctcttgtctgtccaccttccatgagttctcagattcctttcccatgcctatcggtcttttgcccaggaaacattccaggggtaaaggaacccaaaggcctctgcggtcctctccagggaggtgctcctgctgaagcaggggatctcccagctcactgctggctccactgtcagtcaccccgagtaccatgcgtgtgactgactaccagtcaggctgcccacagagcttcctggtgcctcttcctaggacatgccccactgcctctagcgagacagccgctcttgcagaggcctctccgatgcacaaaacatgttcatgctcttacctgccgaaatttctatcaaggctccccgttgcccgtggagcaagcccacactcgtaactgctctcccaacccctgccaggcctgtcctggccgacagtagtcaagcattggctcttcctttcattttaggatcttgatgcaactcagcctgctgcacccctgccgcacccccactccacccctgccactcctctgccccttgtgctcttttgtctccaaggagcctcctttctctagtccccacttcttcctggagcatcagtttaggcagtttcctctgcagaccaggttctggtcccaggcactgggcttggctggtctccggggaagttacaagtcaccaggtagagcagggagcactccgaggggagcattccctgcctcctggcctgtccttactctctcctgtcctgcaggtttgccaagctgctgctccgcctgcctgcactgcgttccatcgggctcaagtgcctggagcacctgttcttcttcaagctcatcggggacacgcccatcgacaccttcctcatggagatgctggaggcaccacatcaagccacctaggcccccgccgccgtgtgccggtcccgtgccctgcctggacacagctgctcagctccagccctgcccctgccctttctgatggcccgtgtggatctttggggtgcagtgtccttatgggcccaaaagatgcatcaccatcctcgccatctttactcatgcttgcctttggcccagggccatagcagagttggtgtgacacctggccagctcctgccctacatcaggctctaaggctatgctgctgtcaccccgagggtcgtggggttcgtcatggggccttcagcacctggagctgcaagagctgggaaaagggcttgttctggttgctggttgctgtcgctggttctcgacatcccacatggcacctctgtttggagtgccccatcttggcctgttcagagtcctggtacccagttagggtgggaatccacctgggatcaagaaggagcaggtggggcaggccgtatcctcctgggtcatagctaacctataaagcctctttccaaagatgccctgagatatcactccaagcaggattctgggaccaccttgaggctgcgtgggctggaggtcctctgtcatgtcccccagttgaccagttcctttttatgtcatcgtccctcttcatgtctcaccaatccagggttagccaactatagtagcctggcttttccctatcacagatcttcctttctggtcttcaagatggcaccaccaatcatcctggagggctgccctggctcacgtagagtggggtttccacttcagtggtcctgtgggacactgggcatcctgaggctcagggaggagaggagggctgttgtctggttttggggaaggtggcctgagggacttggagctgaaccatgaaggcatggcaggtggctgtcctggtgtgactgagtcaacaggctctgtgtgggactctagcatgggccctttctcggactggccacttctgttagaatcctgacagacagggactttctgggacttcttttggaatggtggtgtctgtggacagtgtttgctcagaatctgacccaatggttctgtcatgcctgctcaggtggctggctgcagactcaggcttcagccctgtcccatgtggctcttgagtgtgcctctccagttgaccagccttgtttgcactgtggagcctccttgggtgtcagtcttcatgatctagtctcagactccagggcccaggcttgtcaggagcaggtgccttagtgggtgtggccatactgcctcccctgtagctggtctcccatgaggtaggagggagaaggtcctcacaaaacagaccacctaggggattggacctagaggtggtgggtgggagggtccagtttcctgggctctgcggggaaggacacattgcttttccatcttttcaaaatcctaaaccataaccggcagaggcacccataaaagattccagaaacatcttccctgtatcccttctctccatgtagtggcatgggagctgaccgtggagacagcacggttcccaggacccgctggctgcccctttcctaggctttgctagaaaatccgtacagcctttggggctagtagcatcaggcggaggagcggattccctagtccatacccagcaccgtgccttctgcagacccccctcttccattgttcatgccagccccattccacactgtaccctgtccctctgagccacagagaatgcacagtggctccagcagaggaagtcctggggctgagccatgtctgggcttggctggctgtcaggcactggggccttggccgaaagccccactggcccacatagccttacctgccactgcttgtcactatagattccctggtgagcttcctgctcctttggcctcattgtcactgtcatgggggcagtgttgcttgtttgcaatggtggtgtgggcgtggtgtcactaaggagaaaattggagcttcatttaaccagaccttcagtcgtgttaccaatttggctcaattaaggtgattgtaattattattgttattattttggtggaacaatctttaattttctaaagatagctctaacatcagctcattagccaccctgcgcccatccccacctcaacctgattggattgttgccaccaatggtcatgtgacttccacattgcagcttctgggccatattcctcatgtgtgtcaccaccctgcttggagattcatctggggctcctgtggccgagaaacgaagatgaccacagggcctgtggcagctgctggcctgtgtcaccctgaaacagtcactgggggaatttggcccccacgccctcaattttccaaattacagcatccccaggatcctgggcaacttggtgacagtgccaagagacacccagcccccctcccctggcatcccaggatacctggcgaaagcaggcaaccaatggctagtcatctgctgtccccgttgtagaactggggcttgtgaccgggtctccatgcacacgtgtatggtgtgaacacatgtgctatacagagactgcccactgacgacgggagatgcggcacagttactggtgttttgtgttctttttaatcaagactttcccattttcctgtacatttgcttctcgtgagcaaggacctgaggtccccttctgtggggaagtcgggctctggggactctctggaggcaggggatgcatctattttcagatgcttcagggctggagtgccctgaactctagccatgccttagctgggatgtgcggccaccatggggaggaggccgcgtccgcagggagtaaagatagaggaatgtttaacgcaccgggaagggtaaatgaatctatttttgtacaaatgtaattttatccctcatgtaaactggatggcatggtgggggacctattttgtttctgctttgagtgtcaaaaactgttgggacaccctgacgctgagacagcagaggaggcgcttaccaggcggctgaaggcgtgagaacagcacagacagacacttccttcggtgggaggggggccgcacgggcagggtttccttccccttcttggtgatttgaacagccctgctctgtcctcggtgcctgcctgcctgcctgcctgccggcctctgactgtgaactgactccccacggaactactcactgggacattgtggtgcagacgccggggggttgatgaacagcagtctcaggattatagaaaagaaacaacaacatgagaggagagacaaatatgagcgtttcaaaatatatctccattcggttctcatctgtcctgtgttggggagtccgatctggggggttgcagacttctggggcagtgggagtgggaggtcctgtggtcagctccagtccccagcttccttgggagggtcttctcttccatgtctgctgtgctgtgaagctctcccctggggcccctttgaggcctgcacagagccatccccaatctgtgttgctacctgcccagccctggctttcctgcacccagcttctacttctgtgctagctagagtgggcaggaggttcacacggagggactcagatacgtgatgtcatctaactgcccgattaattacaggttaacaatgccccatctgtgccatcttgtgataaatgccctttgtctccgtgctgtctgcaggtcgggcttcatctgaccccaagtttggtgacactgccctgtcatctcacgcccctctctgctgatgggttcactcctgggagaaactgggtactagtctgaggctgggagcaatgggacccgaggggccttgtgatgttggacaactgtttctagctgtggccagcagcctgcagagccagtctgctgatttcccaggctaggagcgttctgtcacagtacacttcatacgtttcactgaaataccctgtgtatttcccccttggctgcagagggcaacgggaagctgagcccagacttcatactgctgttcccacttcctcaggcacagaggaaaaaaacaaaaccccaaaacaaaaaacttcggttccctgaaatagccttccttccacaggtccccagttagtgagactttgcaaggtacagtttctcttctttactcagagggtctttgtcctgagccaggccttcccctggctagagccagtgtcagccccaggttcaatgtggacttttggcagtccaaaggtaggggacctggagggtctctgaattgctgagctgtctacctgatgcctctgcgtgagtccagccctctgccagcccacttcagcccttttgtgatttaatttttgtgcccaaggctcaagctggcccgctccttggtctggaaagagggtcatctctgaggagtggccacttggcttctgtacttggtgctgactcaccgtgcgttacaagctaggtcggtcctctgttggtcctaacccttctacagaagtcagaaaggacaagggaccctgtgagaggcttcaggttagggcagagagcaaggggacaacaactgtagaaaggacagttctcagggcccttggtgctgggttttagtgacccacggttaacgggatgagaaggcactgagggaggccagtctgggtggggtctccctggggtggcacatgggtctgatcacctccagggacataggactgcagagtgctccaccagctgagtagacccaggctgcttgccggcatcacttggcaacctggtctaaggcctccttgctgcctctggttgccatggcaatgcctgctcagggcagtccctctggaccagagatgctgggcttgataagtttatcagcagtagaatcaggcagcggcaggctgagccagcctctaggcctgtgtaacctgagaggccagggtgggggtagggcctcaggtctggggacacatgatgtttgcatggaatatcaccaagcccccgttttctttctctggtcttatgcccagtaccaggagccaaggggaaggaaagaacagacctacccatcagcaagcaatagtgctaacgtgagtgtgtgtagtggtggtagtatagtgggcacatcttggagcaaatggggctagccttgtctcagggcctgaggacagcagtgccatgcaagtgctaatgtgtgtcaggaaagtcgggcaggtagggggtcagagcattgagggagtcaagagaggtggcagctcagaggggagtgcatcctggctgactccagagagtgaagcagacggtcagctgatgcagaggccctcagaaatgccaggagaagctctgagggcttgaagatgaaggcccagcttgccagtacttgaagaaccctgggggcaaagaagctacctggagtgctgtgctaatatggatgaaaagtctgaggctgtggaggctgtcctgggtggcccaagattgaccgcagcagcagcagttctcaaatgtagggtagcactgccccctgctggagatatttgcacaaggctgattccttccaggaccttctggttcctcctaaggccttgtgctctgcaatatactctatccccccatgattagaatactcctagtcccaaggcagacaattcaccatgctgacaagagcagggctcggcagggttgtagcatctggaacattcaccaggacctggggaatgcgcaaggttaggctcctatcaccagtgcttgattggcagcagaggcaaaccttgggtctatttccccatctctgctaaggacaggatccccatgcccagggccctgatatcaagagtcctggtcacgtgggagaagatcttcaggtaccactgctgtaaagaggctctaatgctggcactgaggtagggcagtttggattcagataccagccttgagacccaccttgaagactggggctgagggcccaggtcccaggaaaaggcaccatcccttgcttactggaagaaggcaactctactggcaccaatgcaccctcaaaggtgaacagtgagtgtcagagctgcctgaggaggtcaagtaagaggaaagcttggagctgtgaggaaactatagcttctctccttctctccccctgcctccatccatcccttcttccctctcttttctcttcctgtcttcccctccctccccttcccccctcccctctccctctctatatccttgttatctctccctccctttttctccctctctctccctcactcccttcttccctcttttcctccctctccccctcttccccttccttccctttccccctctcctttccctctctcactccctccatcccttcttccctttcttttcctccatttccctctcttcccctgtccctcccttctattttccctttatctctcactcccctttgctttcctccctctctccttccttccctctatctccctccctctgtcccttgtgtctcttttctctccctctcttccccctccttcccctcttcttctttctccctcccttctggccctccttttatctctcacccctgtccttccccctcttttttcctctctcccttctttcatccatttatgcaatgttcttgccaccttctgctcatctatctttctgtttatccaaatgctcgcccactgtctacccagctgttcttctactcttccatatgttcactcaaccatccatacatctgtccatccatctttccatctattggctctctgtctggacatttcctaggctcgggtcccatcctgagggggctttatctgtccctcctggacaggaaggcatcatcgaccggaatccctaagactctaggttgctttcctcctggccttgtcaccattaagtggtgtgactgatgctgtcagacccacaataagaaaccagctccaatgtcctaggtgctgaaagatgagggagccctgtcctctggagcagatggctggagcatcactttctatctgtcttcctattgtcagcagctgtcagtgtgtggtccagcttgtgtagggggcagtagtaccccatgccctggtgtgagagtcaggaagccaggtctgggactcaagcccagctcatgaaagcagacaatattgtttccctggcttcagactcccacctgtgggtgctgtcagacctggcacagttactgtatcctatgggacacaatcacaaggatagttatccaagagctcagactagaaattgtccaagagaaaggatcactatgggtcagctggcagctggcagctggcaggcctctgctcccaggccggtgctctggatgaaatcaggcgtaggccagccttggtggacctcacagctctggggatggagctacacactcagagcccacagcccaaggctgggtctgttcagagtcaaacatggagatggacggaaggagtgcaggaggcttcaggataggcaagacgcacagctgcagtagccactgtcctgatgctgcaggccttggtgtgtgtgtgtgtgtgtgtgtgtgtgtgtgtgtgtgtgtgtgtgtgtaggtgtgtgtgttacacactctaaattcccaagatgcacttgaggattcagaaagaagagaggctgttgccaccagaggcttccagtagtcccactggatgatgtaggcctgaggcaaacaggttttgagggctgaagatggtccagcagtcaccatccatgccatgcaccctgcaggcttgaaaacttatatctaccacaaaccttgccagggaacactgataacacctttccctaataactctaagctagaagtgacaaagatgtcctttgatgacactccccccccccccccgtaccatgccatgctgctcagcaataaatgggcggggttaggggcaccctaaacatacatggaaacatcctaaatgcttcacacgatgggaagatcaaggagagcccttctttgagtgttcttgggggctccgctgagaggaaggcagagttggtgaaagccagggttcttttgtagagcagtaaagttattctgggctatccagggtcagtgggctcttgtcagcacctcagaggcttttggcatcatgaggcaacccactgcacacaggaggtgagggtcttccagggtggaggtggagggaggacatggttagcctgtgtcataggagtgagccttctgaagggcaagacagctgcctggtggcttggcagaggggagggtgaaccagcggaggtcaagagggtcatgccagaataatgcagtaattggattgtagctagaagtttgaaatccacaaggctgtgctcatgtaaataaatgattgaataaataaacaaagagaaggaaagaggaagggaaattccaaacaaactttgccgccctcagcagatattgagtggaagcttccgtttgtgcctgagcgtggggcctgcacggtgacttccccggaggctcgtgtgaggctctcactaagagtcccagaagtctgaagcagcagtcccagtacaagctgggcatggtggaagactcctgtaattccttcactcaggaggccaaggcaggagcaccacatcccagttttgaggcctggctgagctatacataccaagagcctttctttaaaaaaacaaaacaaaacaacaataacaataacaacaacaacaacaacaaatcagcccaaggctctctctgcctaggccccagtagaaccagataggcagcactatacttctgacagacggaggcagagcagaaactgaccaggaggaatgcatcagatgaaccccacatggggccctctaggcagcttaaggtctttaaaagagatgttctgagaaacccaaagagatatggtgagtaaatgtgacatgatcacaaactgtcagtactacctcagttaagggatgtgttaaagatgagacagaggggagagcctgaggcaggaggaggagggatgggaggatgaagggaggagagagggaggaaggaaggggcctggagggagggagacactaggaacgtgcagaatctctgttgacagcaagtcttcagcaaacctaaaaccattcttaggtttaaaaatgtattatggggtgtggtcattatacaatacctacttcaggtcctgttggagccaccaggaactaggccaggcggtttttgtttagtgtttactagcatatattaattctacataataaatactaggttacagccaagtgtggtggcacacacttttaatcctagtagtcgggaggcagaagcaggcagatctctgtgggtctaaagccagcctgtctacatggtaattttagagaaattgctgccaatgtgtttccttaggaacagtctgtcaacagaaggcctgtgagataccctagcaataataaataaggacatggcatttctaaaaacacctgtggctttgtccctatccaagaagaagacagggaggaagagaatagagcaagcaacccatggtgagatgaggccagaaagcgtttcatgggctagctcatacctcctccccatgcactgcttctccgctccccacctctaaacgactcccttgctcagttgtgctgggacaaacgctgctttataaagtgactgctggcttgcaggtgaccatggggactatcccatcaccagacaactcaatgctttctgtgtgcgtgattagcacacacagaagcgattacaagcctaagggtgttgagaatcaaagcactgtggcaagggactagaggtgcccacagtgtgagacacactggacttcagagcagaacagcacaggatggggtagagggtaagctggttctctggagctaaagggtcctggggtgagcaggtggaggcttgagggtcaagctgtcacggaggactgtgacttgccagggccctgggtggggacaagtcagtgggaaagtccaggaatctgacagtaaatgcaaaccaggtgagttttgaattcctctcatatgacattctaaacagcaaaggacgatgtcgtgcaataagcaagcaaagggaaaatgcactgtgaggcaggggctgcttcagccgtggctaccatgttgagaaggaagatcagagaccctgcctgggcacaagagatgaacacctgatgactcgttctgtggcagcatcaggactgtggagggcaactgtagaagccaatagaacaaccaccagctgcctgggaagggctgagtgcagacaggagcgtagctgtcagtagtgcctaggcattccaggcttcaggtctgactctgccgccacgctggctctggtggccacttcctgttggtgggatcaggtatcagccctgctggagagagagctttggaaactcctctactccctgtctgccctttccctggcagagacaggctcttctgtctgcagaagtttaatagctggggtgcaaatcttggagctgtcagcagg

SEQ ID NO: 630 - DNA, 1766 bp, Mus musculus
gcagacttctctacccaggtgaactcttcgtccctcaactctccaacgggtcgaggctccatggctgtcccctcgctgcacccctccttgggtccgggaatcggctctccactgggctcgcctgggcagctgcactctcctatcagcaccctgagctcccccatcaatggcatgggtccgcccttctctgtcatcagctcccccatgggcccgcactccatgtcggtacccaccacacccacattgggcttcgggactggtagcccccagctcaattcacccatgaaccctgtgagcagcactgaggatatcaagccgccactaggcctcaatggcgtcctcaaggttcctgcccatccctcaggaaatatggcctccttcaccaagcacatctgtgctatctgtggggaccgctcctcaggcaaacactatggggtatacagttgtgagggctgcaagggcttcttcaagaggacagtacgcaaagacctgacctacacctgccgagacaacaaggactgcctgatcgacaagagacagcggaaccggtgtcagtactgccgctaccagaagtgcctggccatgggcatgaagcgggaagctgtgcaggaggagcggcagcggggcaaggaccggaatgagaacgaggtggagtccaccagcagtgccaacgaggacatgcctgtagagaagattctggaagccgagcttgctgtcgagcccaagactgagacatacgtggaggcaaacatggggctgaaccccagctcaccaaatgaccctgttaccaacatctgtcaagcagcagacaagcagctcttcactcttgtggagtgggccaagaggatcccacacttttctgagctgcccctagacgaccaggtcatcctgctacgggcaggctggaacgagctgctgatcgcctccttctcccaccgctccatagctgtgaaagatgggattctcctggccaccggcctgcacgtacaccggaacagcgctcacagtgctggggtgggcgccatctttgacagggtgctaacagagctggtgtctaagatgcgtgacatgcagatggacaagacggagctgggctgcctgcgagccattgtcctgttcaaccctgactctaaggggctctcaaaccctgctgaggtggaggcgttgagggagaaggtgtatgcgtcactagaagcgtactgcaaacacaagtaccctgagcagccgggcaggtttgccaagctgctgctccgcctgcctgcactgcgttccatcgggctcaagtgcctggagcacctgttcttcttcaagctcatcggggacacgcccatcgacaccttcctcatggagatgctggaggcaccacatcaagccacctaggcccccgccgccgtgtgccggtcccgtgccctgcctggacacagctgctcagctccagccctgcccctgccctttctgatggcccgtgtggatctttggggtgcagtgtccttatgggcccaaaagatgcatcaccatcctcgccatctttactcatgcttgcctttggcccagggccatagcagagttggtgtgacacctggccagctcctgccctacatcaggctctaaggctatgctgctgtcaccccgagggtcgtggggttcgtcatggggccttcagcacctggagctgcaagagctgggaaaagggcttgttctggttgctggttgctgtcgctggttctcgacatcccacatggcacctctgtttggagtgccccatc

SEQ ID NO: 631 - protein, 453 aa, Mus musculus
ADFSTQVNSSSLNSPTGRGSMAVPSLHPSLGPGIGSPLGSPGQLHSPISTLSSPINGMGPPFSVISSPMGPHSMSVPTTPTLGFGTGSPQLNSPMNPVSSTEDIKPPLQGVLKVPAHPSGNMASFTKHICAICGDRSSGKHYGVYSCEGCKGFFKRTVRKDLTYTCRDNKDCLIDKRQRNRCQYCRYQKCLAMGMKREAVQEERQRGKDRNENEVESTSSANEDMPVEKIAELAVEPKTETYVEANMQPSSPNDPVTNICQAADKQLFTLVEWAKRIPHFSELPLDDQVILLRAGWNELLIASFSHRSIAVKDGILLATGLHVHRNSAHSAGVGAIFDRVLTELVSKMRDMQMDKTELGCLRAIVLFNPDSKGLSNPAEVEALREKVYASLEAYCKHKYPEQPGRFAKLLLRLPALRSIGLKCLEHLFFFKLIGDTPIDTFLMEMLEAPHQAT

SEQ ID NO: 632 - DNA, 134082 bp, Homo sapiens
  misc_feature (1)...(134082): n = A,T,C or G
ctgtgttggacaccggtgcgtcacctgttgcttcccgggcaggggaagcacctggcctgtgttccccccctctgccctccaccccttgcccacaggaggtgctgcaaagcctgcgtggcgttggcggggtgctggggtctggaggagcccagccagtcggttgtgttggcaagagacgggcctgaacaagagccaagtggcttctgcgtcagcttttaaaaccaccaaaaggagctcacttgtcatgctgtggtccaaatattttggccatttagatgcaaccttctgtgcctctgaaattaggtgtattattaatctcatccagcccagtgacagagtgggcagatcagacaaggatccttgcagcgggatgaagggtgagcatgttcttatcggtgcaaagctgacacggggtgtttccagaatgacactgatggagtgcagcctgcctgggggaggggtggctgggaacccccggtgatgaggagggcatgggcacagggcttgcttagggaggagaagagagggctccagagacacggttgctggcttccagggtgtcacatggggtgacgtggcagggggtttctgcaggggtgcttctgagatagggcgatagggccagctggggttggctgcaggctccaggagttaggttccagatggatttcagatgggactttcttgctaaccctactttttttctgattataaaagtaataaagactccttgtagagaaggaggcaaaatacaaagaagagtgtgaagcccccatcactccattaatgttcaccagtcggggggtgggaggtgttttccttcagatttctgtgtatacatttataactggcatccttttgtgtgcaatgttaaccgccttttgttttcactaagcaatgtattatgttgagcacccattttgggggagtagacagcctgcaccatggtcagcccgcagacaggctgcacggatccaggcacctcgctggctccaaaacccacgaagtgaccccacccaggatgtcagagtaagagcgtgcctgcttggctaatgtctctcgcgtgcctgcttggctaatgtctctcgcgtgcccgcttggctaatgtctctctgaacccagagagcggagaggacccgtggctgggctgctgtgtgttgggggcttttgaggccagcctggtggccagctccttggcactgccagttgcaggggctaaccaccttgtgagggacagcccgcttcccccggggtctcttggctcttcctctctgccgagttgtgacaaggtatgggcgtggtgaagcgagagctcccctctctgccagtgtccatgtggccactctgtgacagcaggaatccataccccacccagccagctcacagcaggaatccatacccccccaccccagccagctcacagcaggaatccataccgccccctccagccagctcacagcaggaatccatactcccccaccccagccagctcacagcaggaatccataaccccccaccccagccagctcacagcaggaatccatacccccccaacccagccagctcacagcaggaatctataccccccacccagccagctcacagcaggaatccataccccccacccagccagctcacagcaggaatccataccccccccagccagctcacagcaggaatccatacccccccaccccagccagctcacagaaggaatccacacccccccgcagccagctcacagcaggaatccatacccccgccagccagctcagaacagccctgggtccctgttggtggcacttctgttcccctcctgcctttctgagtgtagaacttcttaagagctaagatccagggggccaacccagccggtgcagctcatggggaggaaccctccaggcagctccatgcccatgggctcaggatagcaacccatcatcccatccagggatggacttctctaaaacggccctggacccacccagaagatcagggacaagtctatcagtaccaggacagtctggaagtttttggccatgcttaaattagttaaggctggggcctggccacgggcaagcttgcctttcgcacaactgctggactccctgctgagcatgaccacgggccatggggctgagatgttccctgatggaatatgccttggagagcctcgccctggccagtctgatgatcccattcactaggctgtttattgagtgcccgcgaagggctggcctgggctggtggctgtatagacatctcattcaagttacacgagggtgctgcagagggagaaactgaggcctggggtctcgcccgggggggactcgggatcagacagcgctgacccctgggcccctcaaagtccaggatgccctctcccaccacctggccagggtctaccatggatacataggtatgattaacctggaacacaccacattattttctcaaacactaaatatccccaatcacaacagcagaacttcaaacagcaactgtgccacagaagcaaatgaagtcagctgacccctggggtgtggaaatcagacggagtccagtccctcccttggctgctggcagggcaggtggaacctgggggatgctggcttcctttcctgagcgtgtacagccctcagctgttcctacagccctgagcttcagcatcgcagggcagagacatggggctggggccctggggttacttccagggttgggtggtctgtgactctgtggaatctagtgggtgcctcagggcgggggcctagtggacaggctccggggcccccaagtggcttccagcagggcatggcacccctatctgacaccccctttccatgttcaggggattttgggaaagggcctggtaattaaacccttttaaagcccactggtcctgggcagttgtccagggcgtgggacccaaggcctcctggtcctatctccctttgcctttcctaggtctctgtcactcccgggcaggaggagacagtgatgacgggaaggaggtgaggacagggtgaggtcagccagcccactctgatagcgcctactgcatgcaggggtccggcaggcttcgcaggggaggcaggggagcctgagacccaggggtctgctgcccatgggaggccccagcagggtgacagcaaggccctggagtcttgggtaggaggcggagggcctggtgagagccccacacataggtgctccagtggccagccctgcaaatgaaacaggaggctgggaacagggcgggcaggggcccgggaggatggggccaggcctgcagcttaaaaagcaggcatggatgcgtcttttggctcctcagagatgctctttcggtccagccaacgacctgcctacgacggttgtgcctctgccccgaggagtggtgccggggccaggctgcagacccctggagctggagggctgcaggcggctggcccggcctcctcctgggtgatctcatttccagggcagcccctcccctccctgcgtctcagctcaagcggctccttccttggggaccctcgttagtgggagaaacaaaggccagttgtcaccaggagctggcgattcatcagcctccggcctgggctccccctcagggagtgtggtggctgtctgctgggggctcggagctgggggctggcagggcaggatctggtggggcagtgatatgggtggggtgaaaagcgtccccccattctaatcttcgggggaaagaaaaaatgttttaaaagtgctgcccccccaccctccgtccagcagatatttttctgggttgtctttggtgcttcccacagcaaaccctaccaggctccctcgtgggtagatgcccctgagccttcaaggggccttcgtccccggggccgcggattcatttactgataggtaaaccgaggccctgggagggaagataattttttctaagtatagaaggactgagatgtaaacaagtatcctggttgcccactagggcttggagagaagccgctgacccggtggcctagctgggccccttgaaaatagcgtctgtgagcattctgatcccacagctgtgcccagtggggaaggcggagactggagctcccagttcctgccctcagcaagctccgaccgtgggaagacacggccagcccagggctagaggcacatgcaggttgctgcagggtgcagagaagccagcccaggcagtgtgtgcatgcgtgcatgtgtgcgtgtgcgtgtgtgtgtgtgttggggactggggtggagatgggtgagctgctgagggccacattggagcttaggcagcaaggaatgcggagtggccaggtgtggatggcctgcaacagcagtctctcctgtgctagcctggggggctcttgtgggaagagctcggagcgggcaggagggagatgatgaagggaagggagggagggagggcctggtgagttttgctcaggagtttggactttatcccaagggcagtgggcagcatgaaagagtttttaagctgagagtgtcagggttgggggcagggggtgctgcctgcttaggccaggcgaggttgggaacaggctgacggagagggggtggggccagggcctttggggacctagccacacgtggctgtcctgaggcctcctcggggaggatgacagcctcatcggaccctgagctgcagcctggagccacgccaggccctccacaagccaatgagcggaacaatgtgtgccgggctgcgtctgcacccccacttgctggcagtgtgggggtggagggagccgcattttaaagtacagtttattttgatgcaagcaccgaggggcgttaggcaaactcctgggctcagttccccatccttcaatgcaaaacgactcttctttacggcccgtcaataaccgctgccatctcctcgccgccgcagaggccacatagatcatatttaaaccacactggtggatgacagagacgtacggatatttttaatcccaacagactattacggttcatatcatgtctgtcaaataaatattatgaatcatttcccgttatctttatgggggccgcttgactacatcgggggactgggctcggggccttcccctgcacatccatccccctcgtatgtacacatatgtgtagggggagatgtatgtagaaagtgtcgataataaatgcccccgataaaacacataatctccttgcctgatgggcgtctgggggtgcacggtggagaggtgtcagggaggggcgtgccaccttcagagccagggaggctgggctgggccccaggctgggagcgtcagcctcagcctgtctccttagctcctgtgagacaggctgtcattctatttccccgtagtcatattcttgtttctgtgattagctggttcttttctctattttatagaagagactgatgtccagagagtacccttgtccaagggccatgtaagagttggtggcagagccaggctatggcctcttcctcctggtaccttccccagcaccttgttttccaagtctgttacctatgtcccttctctctggactttggtctcacctggcaccggctgctttggctggccgacctgtgccatgagaagcggggaggtggtgtggctcattggaggctgggggcggaggtcggtggttgtctggggtctttcctgggggttctgaccactgacctcagccctgggtctggggactgtggtgccagagtcaccacacggtttggagtcagtcactgctgctcttcgcctcagtgtttccatctgggaaacggggaaaccagagtcttggtcagccggggtggggttagaggggatggtacctggcagtgtgcagcagactggcacctcggaggcagcttggaaagctcaggttcctcctctccggactctcagaactgttcctgcccttctttgagcatctgtgaccccttgcggctggcgctgggattcggtggggctctttggtggcccctggagggaacccactgtctcttgcctggagctgcactgaaatcctggctcttcattacaaaccagctcctgtccccttaagcctcactcacctgaactctttggctcacgccaccattcagctccccagagttctggaagtaagaccccagctgatgacggaggcagcggctggccttcggaggacctcacctttctcttcccctgcactgctttgggtttggggtgtgcagggccagccagctgactgctaccagggcagacgctgtcagtggtgactgccctgcaggcctgcaaacattttgccagagggccagacccaggagcagaggggtcctcttctcttcctcctcctcccctcctgtcctctcctctcccctccctcctatcctttctcttcctctccactcagcagaacagactggagcccaggtgtggacaagtggcttgagtgtttccctctagactgatggagagacaagctatgactgagaaagggggttcgggctgggacccctgggcctagtcccagttccatgtggacctgccgggtggccccttgcctctctgagctttcggctctacttcccagctcgagtcatcatcggtcaccacagacaaaaggtgttgtccccaaaggagccacaacggatgtgagagagagtccccttaggctgaggtgcttggggacagatcgggccaccttgcccagcagtacccaagcccttggcctcccttgttggaggctgagctccccaaacccctgtgaggtcctgctagtgaccagctcaggaccacagggaacctctggaagcagcttagagccccgttggtgtcctgggaacttctgggagcagtccacccagacgccagcttcctcatgctcagccagcacagagaccagcctttaaaaatattattcaacaagcaattcccgggactgtttacaagactgagccgagacaggcatatgaaataggccaaagtaccttaaaaagcgtccctcagggaaattaaaaaaaaaaagacccaaacaaaaaaacaaaaaaacaaaaccttcttagatcgcaggttgtgaataaatggatactactataaaaatagttttggctgtagcagcacatggtgggaaggctggggtgtttttttccatggctggctcagacctggccatttcatatggggcagccactatcccgggaggtttcgtgtagaatcatttgcaccaaaaagctccaaactgagggggaggataaaaagtagtggccacagaaataacaagcggcatcgtcattttccatcaaggacctggtgtgttttcggcggccgagcacccaggcccctgccccatggaagagaagggcggggctgagagccattcaccgtctgtgggcacagaggctggatgtgagcccagatctgcaggactccggactccgtgcgctctccacgtggtctctagagcaggggatgacgccttccggtgtttcttaggaacagagggcccttctggaaccttcagccttcccaggaggaacccacatggaaatctgtctgcatgtgcctccccgactccaggcaccaacagctcctgagtcttgagttttcagggacaaggagtgagatgggggtggggtggagagtccagcatgccacaccgcccactattgggaggtgacctcagacacttcagcccagccttcccaccattgcctggcgtgtcctgacctgccgtccgcggcctgctgctccttctctctgcaggccgctgctcagccggccctgctgcctgggcggccactgcctgatggaacctccctgctccaaaacctgactcaagaaccagtgatcccaaaagctgcctgagccctttggctggatagagccttgctctccctgcactgagcataggcgaacggcctgcctaattcagcgtcatttcatcatcatcatcatcacaataactgtcacaccgagctcgtcctcccgagcgcagactctccatattatctcacttagtcatctcagtgactcagtgaggagggagtggttgttcccactttacagatgagaaaactgagatacaaggagggaagtgacccagctaggccacacggttggtaggaggtggacctgcaatctggcccaggccttgtctatctgggactcccccccaaccccccaacctgagtacagtcaggaggggcccaagcagtcacagagacaggcctggaacgcggcgggcacatggcacttttgcagtgtatgttggtgcttacgggggctctttctcagtcctatcctttgtttgccgcccccctccctggcaggaggaactcagttttagaagggcagtgggttgggccggcatgccatgtgcagtggggaagtgggtctgttgtggctgtaaccacagtgggtgaggaccaggtgtcaacagtggccctcatcccggagggagtggggcaggctgcctgttggacagggtgtgtgaatagggggacggggtggcctttggtaggggcccaggggtcagtgaagagggggagggggagagggctgccttgggctctggctgtgctgggggtgggctgcccaaccagggcacttctgtcccaagtggaaccaagacctcccaccggaacaggccaccggagccctcgtggaacccagctccgggtggcccgacttgaggggcacccaggcagcaggacacctctctggtctcgggctgttatctttgggccgtgtcatggctgtccacacgcggtcatcacctcctcacctccctccccattagcgtcccctgacccgggccaccacgcgcagcctgcgtgaatggtcagtccctgtgcctcgcagcccgggcccttaggtctaggtggtcagcaagctcgcggtgggggtgcggagggagggcgcggcggggcgcctcggcgcctgctcaggaaggctgggcttggcggcgcgcaggtagctcacacccaaatccgaattccagccgcccgagacggcgggcggcgggcggcgcgcggcggaggcggcccgagctgtcccggggcaggagtgcttcctttcgttttcaaacaaatcgtgaatttaaaagtcaggcagagaactacccagggtataaaaatagccaccggccacaaagtctgtgtccaactccgggcagcgcctgcccagcctggtgcctttgaagaggggtcccaggagtgcgggtcgatgaggaggcgaagcgcgcacccctcctcgttcccggtgggctcgtgggtctctccgtgggggtagggcgtgaaagtgtggggtggaccgggggtagcgtccggaagacgaaaccttccccggacgaggagcttgtcctctgccgttggggcacatcgccactcccgggcctcagtttccccacgtgtccgccgcggcggggtgcgaggtatgggtgccgcggccatcccgcccggctctgcgcttgcctggcccgggccggggtcccctcgcggccaccgcccggccgctttgtgtggccgcgcagacaatggcccggccgctgggctcccggcccggctctccgcctcctccgggcccttgcgcgcaagtgtgtgtgtgcgcgagtgtgtggcgggcccggggagggagttctgctcccgcccccgcccccgccccgctccctctgcgccccgccccctcccacgccgcctcctcgcggctcccgggaacccctggcggaggcgaactcgcaagtttgcacggcgctctcaactcggcggccgggcgggcggcgatcgcggggcggcggcggcggaggggggcgcgctccgggcggggctgggcgggcggggcgcgggccgagcggtggcggcggcgctgcgccgagtcagcgcccgtcgcgggccccccgccacccccccgccggcgccgcagcgccgcggtcggagcggggcgcgggcgcgcggcggcgggggcgcgggccgggcgcgcgcggcggcggcgcgcagacacaagtagtttacattgttgggcgacttttgcaacaactcgccgcgccgcggcctccgcgcgccgccgccgccaccgcagccgccggctccccgccgcccgggcccgggccggccgcgccgggggccgccgcgcccgccgcccgctgcctgcgccgccggccgggcatgagttagtcgcagacatggacaccaaacatttcctgccgctcggtgagtgctcgccgggccgggcggggacggggccgggggccgggggccggcgggcgggagggggccgggggcgcgttggcggcgcgcgcggggggtcgccggcccgggccccgctcggacccctcgccgaccttcgcgtgagttcgggcgccgggcccggggagggtcgacccggggcaacttttcgcggggccggggcggggctgggcagcgggcgggcggcggggccggggggcgggtggcaggttcgcccgggacgaggaggggtctcccgctcaccggcggccgcctgcgccccggcgcccagctgcagccgcgccgcacaggaacccggccggagcgggaggagcaacttctgcgctccgcggctccggcctccctggcctggggaccgggacggcgcgctgggccccgagcggcctctgcgccgcccgcccgtcgggctgcggcttctagcaggccgctggcccttgggtgtgtgtccgcccaggaaacagactgggaccctgttatccccaaagcagcccacgcccgggtgggcagggtcccccggggctgtatgaacagaacgtcagacctgggaaggccccattccagaaatggggcccctcactctggcacccccgggtgttctcccaggctggctctccatttgtgagcaggacagcgcagaggcgcgtagggtcagtttccctcctcctcctgccatcccgcccggtagcttcctatcccagactgcccgccaactccaggcccagacctaccgagaagggggagagggcatggctggggcccccacccattgccctcccaagggtttggaagctagtgagaagggggagactttataaattagctccgggaaggatattaatttggtggtgggacggcagccaggctgtcaggccgggtgaaggatttgtgctgaatggaaatcgaaacagctgattatgaatgaagcccccgccatccgtagcccctcctgcccaccctccctgcagcctggggtgcagcttggccaccccaggaggtgctcagaagccaatgtagctgcagggatgtttagtgagatggggcatcaaggggagccagcatggacctagcccctcctggatgtgagggtgagagtctgagtacctctgctactcacaggcaggtgtgctgccccgtgaccggggcaggcggtgggttccaggtttgtcagacctaacgcttactccctgcctctgtcatgatggagtggtgggctcgaggccttgaatgagctccagggctcagcctccaggggtgggcgctcatgcccattttgcagatgagaaaactggctgggagaggctgagcccccaggatacaaggtggtggatttgggattagcacccccagctcgtggtactgctgagtgtgaggcaggagggaatgctgcgctgtctgtgaccgagtgcagtgtggagtgggctggggctgcctttccctgttaaagctttgcactcacacatgtgcacacacacatccacacacacagagctaggctctcccagacgattcctctggaacaagaatgctcagctcagtgtctggcccctggacgtggcaggggcctggctggttgcacttcagctgagtactgagaaccgaacaggtccctgtttctaatgctccgggtgggacagggatagtccacggagttggtggatgtagggcgagggagcaaggggtgcccagtcgccatggtggcttgctggagtccctgtgaggaggagaggtcgtgcctccgagccactgccccagggatctccctgggcactcccctgccacaaggaagctaggagtcttctgttctcgagcagcagctctcccgaccggcccatggcctcccaggcagcccacgccccagggctgagcagagagccctgggctctgattacattttattttttttctaagcttgtgaccagctctgaagtccagagcagtcgaaggtccatttaagcggctacttttctaagcccttttgtcaacacagcctaatccctcctcggggtgagtggtggtggagggcctggcttgtcttggcccggctggccgaccggtcagacctggagctgctggggagactcggccaccccttacagctgcccagccgcttttggggtctggggtagagagggcttcctcctcccagcattcactaccgctgggcttggtgggcagggagaggatcccagtcggtgtccaccgagccgctcagtgagggcagggatgagtgcagcgtccagatctggaaggaaagcaaggccgagggactcgccagaggcagccccagcttcctggccctgctgcccggggctggccgcgctcccacgcctgccggggagaaggcccccgctggccttatcctgaatggtgggactcaggcggagtccacagagtccaaaggtctcagaccacaccagaccccatgcgcctgtggagagacccggtggcaaagctgtaggcccgctgaccactcttggagttggggcacttgggggcctgggtgagcttgcagcctgtgtgaggggcttctggtaacatcagagcccttgggacccaaaatagagcacattccggggcctcccgaaataacagggtcatgtgactctcaggaggctgggcttggagtcccgctcgggcctgacgagggcgtcttttagcgcgggcgctgcccgacggcagggtgtttgttttggtaaactctggaggggccctgtttgttgactggggaggtgtcagggagagaaaaatggcccagtccgatggtggccctggcttgctagcctccaaccttgcctagggctggctgctgggcctggacccgagcatgcagctgtgaccctctgcccagatgtggatgggacgagctgggcccctaggaagggctggtggggggcgggtgctctgagtcccttggggtgtggggtgcaggttgagccggcagccctggtcacgcgggcagctgctgtgactggctcccggctctgccagcacctggtggttcttccagctgtgcctgtccttcagggcctgtggggggctcacctccaccaggaggcccctctgactgccctctcttggcccctgccccatctcccccgtggctgtgtgggaggtcgctgtcagtggtctttgtttcctcccctgggaaagggtgcctgcaggatttgctgtggaattactgtgggaacagggggtactcaggggtgtgcccctctgcccctggggcctggtcgtgcatgtggcagggggctctggcatcaggagagggtgggacagacctcagctgcatggaaggtggtgtgggggcggggtgaaagctttacaggtccacccagtgccagtggaggctgcctggggagtttcctttcttgggtgacgtttggttttgccatgggtcaaatgtttcagggctgggacctcgagtggtgagcaatgcctgtcctctggagaagagggcacagctgtcccagcagacacagggcagaggccctccccaacccccagctggctcagggctgggacactgtccctgggacccgggctttgcaagccaagacctgcccctccttcccttctctgccaggcttgagtttgtgttttttagctggctttggtggccagggccttgggttggcctgttaactggtgtgttttcataggaattggccatttgctgggctagggatgaggctggggtctagggccacaagggcctggggggctggcctgtggctgttgggggctggtgtccatttgggggtcaccttccagacctttgtcctgagattcttaagctgatcagtttcagggtgctatggtgtgggtagaggggtcaccctcctcccccctgcaccttgcccacctgcctgtatgtttccattttatagggtgcagctctgtctttcatccttccttcctctcctctgccccctcccattcagggcctttgttacctgcaggatggaggtggtggtggttttgcagggatcagcaccttcccaggaagaggttctgacaggtggtgtcccattgctgggcgggtggtcaggccacctggggttgggccttctgtcctcgctgcctgcctggtctgctctttggcctcttggggctttggctgtccatctgaaaaatggacatactcattggctcttccaaatgctggagaaggcagcctggtgtgttgtaggctggctgggagtttggggagtctgtttgtggggcgtttcccctatcctgtggctaggtcctctctgtgcctcctgcctgggtcaggtggggccaggtttccagcactggaccagaacaggccatgatggtcgctgggggctgtcaggtgtagaggaacagactcaggaatagaggacatcggggacactgaggtagccctttctgtggatataggcctgccacaggagagcgctcgctgctgctgggtccttgggaccagcccctgtgccactccagggaccctcctcagagtcccaagaaggcaggtggggcgagggaccgcggtttgcacacccacccgagcctggtgcgagatgttctgagcagttgtgccccagcgcctcacagacagggaaattgcgccctagagttacaaagcaattgtctagctcagcagctgaatgagcgtgaaatggagcagaaagcagctaaggaaaattggcccggccgctgtggggagagcgggtgcggaccgcgtgcagggcttgggtgtgtgcacgctcactgttgcacacacacagagtcacaggctctcacctggcgctgttggccgctggcccgtgtcctggcgtgcccgtgagtgagccaggcctcatggggtcccccaaggatcatggtgctccctgctgggtttgttggcctcctttttttctaaatctccccaacttgtccaggactcaccctacccccacgaaggtgccgatggctgcagcgggtgcctgctgcgtgccagggactttatttttgggaccttgtggaggtgtcacagagacaagcccacttagtggatggggacactgaaccctgggtgaggtctgtgggccagcctttgtgtcccgctgtggggcctgctttttctccggcacttgactggcgggggccgccttgagctccagctgggaggacctgtccccagggtgggggctctgctgcccctggtcctcctgcctctcagcatcctcagaggctgctcaccgaccaggctgggtctatgccccatgctggttcccaggagccccattgctggtcttggcccgagtgagtgaggtttttgttcagtggggaccctggtggagggctgaggtctcaccatgccagctctgtgccctgggactgggcatcttggcctcttgtgctggttgaaggccctctaaggagtggcgaccccttgatcctcactccagggttgtccttggcttggggtggtggctaggagaagtccccactcccaggtggaaagctgtagttgggtgagcagcagaggcccagcctggaactgtggcttgcccacctcctcatgccaccagggcagcactgtctgcagcaaattcctgaggtacctgggggagtggacggagtgagattggacccccgggtcccagggcagggcagggtaggggcacagttctttctgaggtcctaacccagcacacgcggcccaccccatgcatgcaggcgtccgccgcagccttcccagggtgacctggcagagccttgacaaccctggctggggaggcggggattgctggtgggcttgtccacacgtggcttagggagcgcccgctgggtgctggcctggtcctgctgcctgtggaggaggggtgggggaggggtgcccagaggtagggacagcaaggtctggcctggagggggtgaagagggtgaggacgcaagggtggggttgcagggctggaaccaggagggggttcacgtgtgaggtgaggctgggtagggcctgtgtgccgggcgtaggtgcatgggtgcccggagactgggggatcccagtgtggtgctcatggctggaatgaggccaccagtgctgtgcagagggtggtctggaggcagccaggcaaggcctggaaggaggaagtgactctctccaggtggctcactggtttcaggtgggccttggggcccctgtgaatggccttgcacccttgccctggctgggctcctcagcatggcagcctgggaaggggggaggattcctagcatcttcctgggggcttaggccaggtccctgggctggcctgggggtcgtctttcccgggcacgggtatgggtgaggcaccttttccctggccctggctccggccccccctgcactccccaggctctggatgaagtagggggcaggccgtccagggggagtagagcagccgggcctcttggggccggatcagggatgctgagaccatggaggggaccagactttggggctggggagtgggacattcaggggtccttcaggggatcagagcctctcagggtctctgtgtgagaagttgccacggggtctgtcctgcacagcccacatctgtctttgatgataggcttcagccccagctcctcttccaggcactgcctgctggggtgagggatgccgggaagcccttggtcacagtcctacctctggggtgacccagaggccgtgcctggcctccccgcacctctgttggccctctaagccatagtaatttccagctgggcctcggtttccccagctgtacccggggccagggctgggggtgatgggtgtcggcgcagactgctgccgtgcgtgcggggtctggagcctctggcgctgaggggaggggagagtgagttgggcctgggccaggccgtgtgtaaatcctccagccgccatggataaaccctcggagttcaaagacaaccccgggtgcggccgccggctgtaatgaggttactgattcaacaggcttcctggtgctgcagcccagaatgcagtgaggctgggaagccccggggagggatctaagtatcctgtaattgaccaatttagcttaagtgtccacactggccctgggcagaggtcaggcagtgacagcacaggtggctggagtcgctggggtgggctcccaacagctgctgtgtccgagcccctctgaatcgggcgctctcgggcctgggcagccctgtgcctctgccgggactcccgctgcctgctcttccctctccacctgtgcaggctcagccttccttcccagccagagcccacctgccatccttggtgcccagcagcccccttggtacagggcttggggtggggctgcagctttggacttggtgcccagagcctgcattcagctcccgctggcaagcctgctgggtctgtgcctgactattgcccagtttcctcccgcctgagggccgtggagtgatcccacgcctgtgttaggtgttgaggccgctgctggtggaggtgcctggcggatgggagctctccacgtgccagccacccatccagcctcttttttcccaggcttcctgagggcagggcccttctgaggcgagggcatccttgcagcacccagtacaggtatgcaggaaggactcgcttgacttagagagtgggatcagaagcacctctcctgcctgtcagcagtggcttcagtgcctgtgcttggggaggatgtatctggtaccttggagagaggctggcaggccgcatccagctcctggtttcctgtcaacccaggcctggtgtgcagagggccaccaaggtgacagtttgctcctcagaaataggactgggcattgggcagcagtgtcattgactgccgcagtgatagcatgggctgtggcggtggcagtgtgtgctgagccgtccctcgaactcagctctctacatggtggggctgctctctgaccaggctgctgtgtagccctgggcaggtcccttcccctctgtgggcttcagtttccctggggccctctggctgtcaaagcctctgccttgccttcttggcaccctggctttgttctgatatgctgttggccattggtcagggtggcaccctggggaccagctccctgggaaatggctctatgccctccccagctgaggggacaggacttgggctggggtagggcctgggttgctggcgtccaggaagccgtgggctctgagctagccagggtgggtgtgggtctggatgtggactgggcatgttgtggtgaagcgctttcgggatgtgcagcttataatggggaagaggtggcctgggggcatggcagagcagaggcagtaggggccacagatgagtggggtcagtccccatgacggttatcactcaaggccaggctagtccttctctctttgggcactgaccttccttgcctggaaccttccatggcaccccattgtccccaggatggaggccaggcctccacctagtgtcatgtggctctgtagcctctcccacctcattaggcacctctcactgattttctcatgtctaaaactaactggtgaggtaggctgccccatgcgatgagtgagcgcccctctgagtcacaggctgtatggccctgggctagcaaattcacctcactaggcctcagttgtctcacccataaactgcctgggggaggtcagggaagcttcacagaggaggtgatgtagttgggttttgagggatgagtaggagtttgttgggtgggaagtggggaaggaatcaaggcagagagaatggatggattctttccagggggatctggttctagccaagggtatggggaagggatgcccgtgcgggcgtaagtaggggcttccctggagggtttctgagggtctgactgtgtgaccaggctcctctggcctgccccttgctggctggcttccaggtctgtgctggtggggacccctgtgagcatgaggctatggtcagctggcctgggaataattaaccctgggaggagctcaggctaggggtgggcctcgctgcagcctggccgcccccagctggcctgatgtcccctctccttcctgcccaggtctggagtgtgactcctaccggcgcccatgtgcggtaccccacctcggggccctggctcccagggtgtgtccactactgggaggaacggctggggcccttccctaccacctattcctataccccttggtctgtccctgtagtgccctgtggtcctgccttggtccctgcctctccctgtgggcagcttaggcgccatttgcccgggagccccctgtgtgagtgcaaggctattggatggcttctcgccctctccccacccggagggaggaaaacagctctgaccgtgagcagagtccacgggaggcggtggagctgcccctaccccaccccttcatggactttctgcccaggatcaaggtcgaggtgtagggcagggaggcggggccttcgtcaggggtgccaggtcactctgggcacagacagtggcaaggcgggcctggcaggcagcaccaccgcaccatcccgggcccagtggaggggtgaggactggaagggcagtggggccttcctcttccctcccctcagtctcctgggcacaaggtcagagccatccacccctctgtcctgtgtgacccaccttctcctgaggctgggatcacagggggcgtcaccccttagcggcaacgtagagctggtctccaggcccctgcagacagtgggcctgggcaatggcatgctcacagcccgggtcttctctgccacatggactttgtgacttggagcacgttccttcttccctcttcgtcttgatttcctcatttggaaaatagaaggaaggatgccaggcagagtccacggctggaagtgtgccgctgtgcccctgtggccggccggagccttggtggatgtcgctgaatgggccctgctcctcttcccgtggggccctcagacctcagagtctttttcaagacagggctggctccaggcaccccctctcatggctcggagctggctctggatctttgtggctgcggagcccacagtgccaggtgccatataagcctcatgaagtttgtggcacgaattcatgtggtcagccaactgatcccctccgcccctcaggttcagaaatgtgacgggtgagcccgttccttgcaaagttgatttctcaaatcgtgaccatgacttgaatccccctcgttctggaggccggtccagtttccagggaagggaagtcctgtgtgtctagctcggtgtcggtttctgggagtgggagtagatggagggtctgggactgtcctcgaggactctgtgggccagctggaatccctgggggccctgggtgggagctgaggctgaggcttaaggctggggggtgcccctgcctgtggagaggccccagcagtgctcagcgtgttggagatgtggctgccaccggctgctggacagagcctgggagtccttgaactcagattcccagatcgagagagggaggggtgctcagccccagtgcctgcccttgttggggacctgggtccttcctttgctggtaagcatgtcttgttgaaacttgtagcagtgtggggggtcaaggccagccacgagggaagtaagcgcctcccacctgcctgctgtctgtccgtccgctcatctgtctgtccgtccgtccatccacatccatcaggctcctcctggccactaggaaggcccagtagagccaggcttagccctcaagcgggcagtagtggtctctggggtcagatggcctgggatggaccccagtgctgccacttgatgggatatgaccttggaccagatgttttaaccctctttgggccttagttctcttacctgtaaggtatccctgaccccagtctggggtggagatggtgtgtgagcgtggtggtgggaggaggtactggagacagaagggacacggaggaggcattagcggctcaccctggcatgcagagagttggggcttttgaattgggtcatgaaggatgcgtaggagttggcctgggaaaagccaatgtctcgtcctcacacctgtgtcttcactttgcgtcgtcgaaggtttccagggcagagctcgctgactctgccttcccttgcatcagacagcagtgcgcctccctctggggggtcgcccagagactcttggatgtcctcggagcagacgtagaatgcaaaacttgaacctctccaaaaagaaacgagacaggcgggtttcgttcagttcaggtggccgcgtgccagccctgagaggtggcgggggagagatgggtgactgcgcccccagtgctcacggagggcccctctgtccagagccgctctgaggatgcgacaggcaggtccttgccctcgtgggctgccaggccagcgggggagatgggcggtcagcggcagccacagacgacgtagggctcaggaagggcatggagggaaacgctgggcagtgaccacagggagggacagaggtgtcaggagccctgacagaagacaagcatgtggttctgctgcactgtcccggggcctccctgggcctccctctggctggtagcacgggcaggtgtgtggggcacggccatcgccaggcattcgacccctgctggctcattcttggctccctgtggctgccgtgggacatggtttctaaagaacaaatgccagctgtggcgctgaaagggcctcctcatgtcagggtgcccctggctgcaggacacaggccacttctggtcccagattgacgggcctccagcccaagtggcacctgggtccctctgacctgggctggcatcccccaggccatggggtcacaggggaggtcactgccactcttgctggctgggagaggcgtgtccccacgtgcgtctggccgcagtcagtggccaggacctgcctgcgtgtggacagttaggcctcctgcctaggaagcagtgatgcttgccggctgctggtgggggcaggggaggggctggctgccggatcccacgcagcctggacgtggctgataagctgtgaactcattatcggagggggcagctggtgcccctctccctgcagccggcaccccagccttgccctggggccagacccctgcactgtgcccagccttgcgggtgagactgggggagcgagcaggcctctgttgggacttgggagtctccagggtcccccagagcccagagatcctccctccaggactctggagacagccgccgttctgccctccctgctgacccctctgccctccctcaggtctgcctggccgcctttctgagaacaaggagccgattgttgtcaccactgctgtctgcctcctgctgtggatgccttgcttggcgctggcagtgcccacaccggcagggacctggggacttggagccggacctaggtcgccggccgtgtgcctggtgtcggggcagggctggtggtcaccccccctggggttggccccgtgggctcagggccctgcctccctgtgccctgtccgtagggaccctctcatgccctctggccagcctggagagctcttggcagaaaggccaggactgaggtggctggcatggcgcctcccgcgctgttcctccctccctgcctggccttcaggggcgcgtcgtcctccccagaccctcctctgtctgcgtgtgagcccgtgagcctgtgtgggcttatgtgtgtggctgggattccagccagggtttgtgcgcgtgagcctctgtctgcgtgtgagcccgtgagcctgtgtgtgagagtgtgtgggtgccatgcctgtgtgagtgtgtgcctgtgtgtgagcctgtgtgtgggtgtgcatgcccacgcccttgtgtgagtgtgtgtgagtctgtgtgtgtgtgtgtgtgagcccgtgtgtgtgtgagtctctgcatacccatggccttttgtgagcctgtgtgtgtgagcctgtgcgtgtgtttctgtgtgagtctctgtgtgtgtgagcctgtgcgtgtgtctgtgtgtgtgcctgtgtgtgtgtgagcctgtgtgtgtgtgtgtctctgtgtgtgtgcctgtgtgtgtttgagcctgtgtgtgtgtgtctatgtgtgagatcccgtgtgtgtctgtgcacacccatgcccttgtgtgagcctgtgtgtatgagtctgtgtgtaagcctctgtgtgtgtgtgtgtgtgagtctgtgtgtgtgtgagcccatgtgtgtgtgtctgtgaacatccatgcccttgtgtgagcctgtgtgtgtctgtgtgtgaacctgtgtgtatgtgagtgtgcacgcctgtgctcttgtgtgagcctgtctgtgtgcacccgtgcatgtgtgttcctctgtgcacatctgtgtccatgtctgagcctgtatctgtgtgcacccatgtctgtgtccctctgtccctgtccctgtgtgagtgtgtatccgtgtgcacttgtgtcctcgtgtctccctgtgcccgtgctgtgtcggcatgtgtgcctgtgtgtgcttctgtgtgtcttgtgccccacaccttctgatggcttgtgcctgcgggtccaggtttgagactggccactgcccgtgctgtccggctccctccttagctaagggtcctgagggctcggggtccaggacaggagaatgagaagctgtagggggctgtggagggctgcaggcagatatatgttctagaaagactttggccatcgtggggatggtggtttggggcagaccagtgatgccacccactgacctttcagccagttcccaggaagtgtcacaggggtgataattgtccagccaggagtgagggccgaggggctttaggaagtgccagggagcactctgaagcagtatgttttggtctaagtggggctcacgtggcaccggctcactgcctgccctctggcctacagcgtggcaggtatcaccgaccacccgaagcactcagatccctttctgcaggcacccaggcagacggtctcggtgcatgagcctcgatgcacgcctcggcccgcagctgccttcttgagcaatgccagcagtgcctaagccacatgccgtccaggctgagcaggtagattggatgtgtgagctgtggcccaagcggtcctccctggccctctagctggggtgtctcagctccgggagcaaggagcctgtcttctgcggaattctgcgccctgggagaatgagctgagccaatcctgaagccagggtcagtcacacacgctttggtgcgaatgagcctcatgtgaaccctggaaaggcctcgcaggaaaggagaggaaggaaggcttcctctaattgtgtggatgaggaaattgaggtctgagagcggcatggctggcaagcggggcgagctgacagccaggctgtctcctgaccctggcctcgtgccctcacctcttgacggcccaccttggggcggagtgagagcacagatgggagggtcctggtggggacagggagaggtgggtggctggagctgtgaccgcaggccccgccgtgggtggtggtacctggagtgtgtgcccagcacagcatggcacgctccctcgttccctgcaccccagtgctgatgaggaggccgagctacagataggggctcagctgcttgcccaatatcatgtggccagttaacagcagagtcgggatttgaacccagattcttgggactcttctttgagccacttccagcctggggttctggcgtgtggttggagtcctgggggctgctagggtggggggacattcctcctctgggaggaacctggagccgagccctccctgctggctggggaggggccttgcttcctacacaaacaaccaggcctggctggagccattttatttttatttcctatttttacttccccgttggctctttttagcaactctgggtgagataggcccccgccctccagtctccacccggcttcctggcccaggccaggaccttggaggaggcgtgggcatgggtggcccagggttgggctggctcgcagcttggccggcacacacctggtggcagagctcctctctttctgggagctccagggcggctggcctcttcccgccctccatggggagcaccatggggcatgcatggtggcaggggaatgtcttggtgtgtgactgtttgttgccacccctcctctgggtcttggcctgaggttggagtttgggaggtagaggcactgggcggtgtggtcttggagctgggtgcgtgactggcagcgtcactgcctggggcctggctgggcagggctgggcttgggtttgttgaggctctgcccactactggcctggccccacttgctgagggtccgctgtgctccagggtctgtgaagcccaaccctgggggtaggggctgtcagagcatccggctagctggagcctgcctgtggtgggtgttgctggctgggggacatgaagaccccgaatgaggaggcgtctccctgaaggcgctctgctgggcccggggtgggggctctcgtgctggcatttggtgggtagtgagttctgaactgtgagatcaggctggagaaagccctggacccactgtggatcccaggccagagtgagggcaggggcgggggtccgggtcgaggactagcaagccacagtgcaccaggtgccccggtaccagcttgtgccaagcccattgccctcccagaaccctgggggagggagttgccctcatttacagagggggcctgggctcagagaggctgagccgatcttcaaggccacacagcttgtgggcatggaggggccgatccttgccctttccctgccaggaaactgaggcacagagagcaggggtcccccaggtggtcaggccccagaggcttgcacttgggatggcgtgctgtgcgccctcttcctgccatcagcggggggcagtgggttggtgcaggcagagtggtaacagcaagctgtgggcaagggactgcttgggagctgctgtgagcccaggcaggtggtggggctgcggggctgcgggaggaggcccctgtggttcccacagggccatgtgtggtctccagggctgagatggctggtgtgggccgccctgacctggtgggtttgggggaacctggccccataggagagtggacagcgccgcggaggaggctgcctacctgccttcctggcccttcctgctctggctggctcagcaggttgagcgcaggtggtggctgtggccctgccaccaccacagtgaccttccctttgtatgtgagtgatgtgggtggcatgactgcggatgcaggcacgtgtgggtgctggggattgtctggtaatcctttgattagaggccaggaaacccaatcccgcagcctaggcagtggggggacctccttctagagaggccccagcagattatgggattttcacctgcccagccctgggaggtgtcttggacccagagcatttggccttgggaggtggggagggggttcctgccctggagccagggaagctgtctgcggcccacagttcagggccccacacagaccttttacatgctgtgtgacctggggcagcgtgtctctctctctgagtgtcgactttctcatctgtgacgtggggtgagggcacttgctgcccaggtggttgtgagggttgactgaagtaaggcctgtccttcagttcttgcctgggagcagggaaggccctggctggggttgcctctgaacctcagtgtctttgagggctgggaggaggagtttcttcttctgggttctgggggttcatgcaggattgcccgtcagcatcctgcagcccctggaatagggggcgctcagtgtagggcaaaggaacgtgaggagggcatgagtgttgtatctcatgggaagaagcatttttttgggaggagtggttgcaggggcagctagttctggaaccatcctaggacctagaaattgctcggggccaggaagcgagaccagtcactgggtgcaaccttgacataggcttgaggggtcacgtcccctgccctgtccccatcttgctcagtggccagaggagagaccgtgtgcacttggtggactgccacgggcctgggggcctcgggaccaaccctccatccgcccgtccccagccgggcgcggcactgagctgagggagcctgcgttcttccttcaagcagaggatcttctgcaactgtggggaagagtgtttcttcccggaaggcggggccagctggctgggtcagcagatgggctcctctggcgtcttctcaccttctggccggtcattggccctcgtggccctaccacagtggggtgggcatctccccataggccctccccacaggatgcagcccttcctcatggggcctggtcctgctgaggttcccgggggccgtgccctatgtggccctacctctgtgccacctctcaaaccgttgcctctgcctggcgtgtgtgcctgctctgcccttctttttccatccttgtaggcctgagtccagcgttccctgcgcttgaagctggccccaggaacctggcaggccagggcccatgcagtacaaatgtggacaggtctgcccccaccctgccctgggcctccctttttcccagcctcctctggcaccggcatgtgcggaggctgtggtgtgtctcctccctgggtggaggagtgggtagggggctggctttgcagcttggggtctatctagcctggtgtctggagagacttgtggggtgcagcttcctgcccttgccgccggaaggggctgagattggggtcccgcccctttgctcctgactcagcagctgcagggtgggggaaactggaggtttcttgacaaaagccccaaccctgggcacccgcccaaggcttagattcctcttaaaaaggtggaagtggagtccttggttcctttctctgggggctcccaacaggaggttgggacggggctggatcccaggccctgggccctggagccctctcctccccacctcccgggcctctgagaactgtgcttctctgctgcgtagcgccctctgtggctccccagggtggagttctcactgctgcctggccacggacgccccttcatcctcaggagccaggcaggccccaccaccataccccttagcaaccagcttcccactctgaccggtgtctgtctgtgtgctgccttccgtaggagactttctgagcttaggttccctcgacgctctatgggcactgggcttcctgtcccaacacactggtggtagtgatgggacgcagcctctgtgcgggccctgtgcctggtgtggacccagcagagttgggcagcggatgtagagttggggaggggagcagtgacaaccattcagagtgggctctgcctcctgcacccctgggccgtgtgcctggggacagcggccagaatcacgaggcccagtgctcgagctgcagtgtggatgggtggcttctctaccccagactccagctctctccagctcagcgactgtggcagcccctggtctgctgggaccactgccagtggctgagaaaatgaaagtggacgtgccctggaggttatgggcttcagggtccccaccggattagtgaggataacgtatccccctctagctggtatttgcacagcccacggctgtgctggctctgtggagggccagttgtcaggtgctcatgaagtgtagctgctgggaaggaggtggaaagtttgggccaaagccctgatgggtttttgtgtgcccttgggtggtcagcagtgggggtacctggttggttcattgcacttcaggccctaccctggcactggcatggatcctcgtggagggttctggagtttggggttggagaagcctcagccctggccttggtggcctccatcaagtagagaccaaggccacaggcaggacgggggctctggcgggagccgacatcacatgtctggcctggctgcacccactaggtgttcatccaggagctgctggtagccccggcagaggctgtcccaccagctgcctgcctccattctccataggaacttgtgaaacctggaaccgaaaaagagccaaggcaggagggagcaactgaagttgaaattagctgctgctatatctccccagccccagccgtgccattgtcagtgcaaaatgcatgacggggaaggtgaaaataatcaaagtcttgactctctggcccggctcattcatgactaaacacgtgtcagttcccggcacagatgaacatggaatgggtacccccgggtgggactgtggctgctcctgtgtccagatgtcccctcctccaggaagccctccttgatttccccattcaggaggtcctctcctatacctgtgtttcctgatacatgtgcgtcttacggtgttcatatagggacagttgagagtcggggcagcagcctaggccatttctggggggtggggtccaggcggggtatggctgacagcccagagtggtgtggtattggggggccacgcagggtccctcggctctaccactgctggctcattctaagcacctgatcaggaccatgccgccctcctctttagttcctcctgttccgctgtggtcctaggggtggagtcccagcccgggacctggcgttcatccttgccctgccctccctgccctcccgcggcttgctggggaccagctgtgctgactaatgtgatgtcttcaagcatcacagctttgcacttgctgtcccctcccccaaatgcccttctgccgttgccccttcaggtctccctcggctgtcggctcatccaggagcctccccagacccccagctgccgtggcctcacccccactggtccttgcagctggttctgcttgttccttctgagcactcaccaggtcctgccagtggctggccgttcccgggcgtgttgggggctctcgttaatcttcttgaccaggacctgggctctggggactaggggtgcccagggactgcaggacctgccctaggtcctggcactgcccagcttcacattagtgggggaaagaagcgtgtgtctgggtgctgtgggtggatgcccccaagggtggagcccccattttggggatgtcatgtaccttcaccccactgtctgctcgcacttgtgtgctgctggagtctgaagcccagggtgggacaaggagctgcctctgagggagggtcctcctggaggcccaggggcttgaggagcccttgtcgggacagtgtgggttggaagagtcacaggtgggactggctgggaccccaccagcgcttcactgctcccatcttacggagggggagggcaaggctggtggggggcagcttgagaggcactgcttccaggcaccacatcctggacctggcccttgcggggagggcccagctgtcactgtggaggtggcaggcaggtgggagtagggtggtggcctttccatcactgtggaggtgacaggcgggtgggagtggggtggtggcctctctgtccctgtggaggtgacgggcaagggtgggatggaggccttgccatcactatgggggtggcaggcaggtggggttggggtggggacctcactgtcatctgtgggcaggatggggcagccataaggagagcaggtagagaaagggttaaagggccaagggaagtaataatgtttctaattttcctgtgtaatttaatgaaaatgtaaattgctgggcagatgacgcgccctgccgcggtgttgaccaagatgaattgcgggtgctcgtggtcagcctgcctttgtctctgcgccctgagtgcagcgcagctcctccgtctgcctgggaggcagacaccgtgccgtccaccctgatgggggccgcagtgtccgggcttctgccgagcaggaggggggcctggtcagtcagagccagcccctgctgtgaccccacacccctgtccggaggagcacaaggctgggggaggacggccaggggcctgcgttgatgggcaggttccaggtatgcggagggtcactggccagcgtggttagggaaagccctccagggggatgctgcgggtgggcttgtgcatgggaaggagcagccggtggggaggtggagaaggacctctcaggccaggggaacggtgtgtgcaaaggccccagagtggggctcactggcaggggctggggcggtcagttcagagctggacattgaggtctggtggccaggagggggctggtgggtgacagagccaggcaggacatggccagaggtgctgggcctgtcctgacagtggtgagcatccttcagaggccgtgagtgctgagtgagggtcctggctgccggtgaggatggaccccaggggcaggaggggagtccgtggccacttaggaggcagaagcagaggtggtcatggccatggctgtggggatggaggagccggtgggtctggttgcagttacagctgtggccaacaggccgggagagagggcttggggtgaccatgtggtttgggcctgcacagtggtgctgtttctagggacatgaggcaccaaggggagtcgagggtgccaggcgcggcagttgcgattgaggtcatgcaggacccctggcaggttacaagagcagtgtgcattgaatgccagagctctgggggagacctggaagcctcccaggaggtgaaaccccagggtctgtggttggagcttggaacattttggcggcaggaccagccagggttttgagaaggaggacagagcagcatttgctggtgcagcgggcatcgtggtgcgatgatcttcaggatgcagggcagtgagagccaggtgcagctcctctgagctcaggctggctgagagggtccctgtagcccagttttgtcccgaggtcccccagggcccatgtggctgcttgtcccctgctgcagatggggaggccagtcacgggcagaatgttgatctgatcccgggggacgcaggtggccgacacgtgggttgagtcttggctgagttcatccaggcttgaacagccaccctgctgtggcactgcgatggagggctggctcctgcccagtgcttcccggcctacgtacgccctgtcctcggggtcctaggctgcatggcacctgcccatccatccgctgtcaaaggcatcacgtgtccgccatgtgctgcctcaggcacaatgcaggattcggtggtcagaagacttcccggacgctggacgtcgaggtgggtgaaaccgggcctggggttgcagtccctgaggtagagctgaatttgggtgtgtgtggctttgaaacacccacgacccccagaccttggcaggaccttactttggacaccagctctgtaccacctgagtgccaaccgtggcgttgcgccagctgggccttgagactcgggaggggctggcatatccgagacccagttctgtcacttgcagtgaagggctggtccccgctgagaaggctggtgatgcatggtgggtacgctgcttcccgggaggggacttgtgctgtccctgaactcaccgagggccaggaggggtcctgaacactgccctgcctcatgagggcctgcacagagggtcttgcagaagaagggtctggctgggcctgcagaccccaactccctgcaccagcctggccccgagctcccacttcctcatgctgggcacatggggagccctgctgacccctgttctgcacctggacagccgggtgtcattggtgggcctgttgggccggggcgcctcggcctggtggagggcttcgccgagcttggtggcagggagggaaggcctctccacggggagcaggagggaggagagggacaggctggtgggtcggggaagagaagaggctggctcaggtgggctggggtcttcagctgccacacctggcagtggtgctgcgggggtggctcggccctgaagctcgtggcgggcaggagtgtgcacggacagggacccagcaacttggcgagcatgggccagacaggggcagggttctcaggtggcccccatgagtgggtgacatcaggagaccccgcatcaggcaaggttacctgtgtgcctgctgacttgtctcatgaggtttggggactttagttcaagctgaatgcctgtctccctggaggcgcagggctgtgcacaggattccccagggctgggccagcctggcggtgtccacccaggaaggctgcttggaggaggggcagagctgggctagctcgggtgggcgggcgggtgccgcaggctctcctgtggtaggagtcgggtggacagtttgcacgatctcatcctgcctgtgacaccttcctctcctcctgtttgggtcagctcctggctgcagctggtgtctggaggtccccaggcactgctgggaccccttccccaagcccaggacccctgattcatgcctctttccagagcacttgctggcctatggtcaggaagagcagacccgccagatggctgtgtgtgtgtgtaggggggggtggaaggtgggggtacagctgcccagagatgccaggagatgtcatgccgatcgcatgctttgattaaacagcctgtctggggccgagtgggcagctggtcagtgtcaggctcccagggcaggatgtatggaaaccactgggggagggaggaactggccccagagagccagtggggctggggccgcggagtggcctgaacacagtgctggcatcgctctctggcccccgcctcgccagctgcagccttggaaggccctttgcccctccaagcctcagtttccttttctgtaaggggcatggctgtcctcgccccctgggtggtggctcagagctggacatgctgtgaagtagccacctgcgtggcgtgctggtggctggggtccccaggggctgcccgtgggcggtcagctccattcggaggcctgtggtttccggctagtgtcttccttcgggcacagcaggccccagacgatgccgcatgaggactgtgtgggcctctgtgctgtgccctgtgctgtgctcacccacacggggagcctgaggcactgcccagtggggcctccctggcccagctccaccctgcccttccccacggagaagccagcctcccccgcaggagcagctccatctggggcattctcatgccttctgccgaggtgggtgggggtggggattgggccagtggctctgctttcctccccacctgtccccactgcacgaggagatgcattcgaggggctgagcggctgagcctggggccggcctggcctggatggtgcctcccctgccgccttgtcctcatctgtacccagggccaacgtcagcacctcggctgtgtgatggtgtggaggccacctgtccagcacccacaagaggccctgtgcctcagcaagggggggctgagcatccctcacctgcctaagtgtcctttcctataacatggagcaccggcctcagacttcatgggaagtgcgtgtggcctcaaggtacaaacaccgcattgtgaggaagcgctggctgcagggggctgagccctctgaatgctttgcttaggaaatcagaatgttggggcccccttctcccacacaggccaggcttggagcccgcagagtctgaagaggtggcaggtctggggctaggaggcccggcgggaaatcacaggaggccttgggcgagtgcctggccctgtgggctgcagcgtcctcctcagagaaggggcagtcgggaggtcactcgaaaggggccctatgccagcagcgggcagaggggagggcaaagtggtggtcccgggcccggcaggctggttgtgaggcaggctggtctccagtccctgcctgcattgctctgttcctccagacagtcctgaccccagcaccctaaactctgcgtcttcccatgtggggagccccaatagggcagggatccttcacctcaggaaacgcaatcccttccctggcctgtgaatatttcatcagcagattaaaaattgaagctgaacctccctgctcccccgggagggtggaggagggtgccggctccgtttcaggccggtttgagtatttttcttgataatggagctgcgtcaattagaaaatgacattgctggttaaaatgccgttctgcggccctctttaattaaggccgagatgtaataaccaatccgctgctgcgaacttgtttttaaccatcagaacgcgaggtgaatgacatggagttgggttgatcagaggcgggtgtgcggggcctcggagagatttatggaggccacgcagcagctgcggctctggcggggcgtggggtgtgccagtgtgtgttgggtcagatgggtgctctgttctgtgtgcacgtgtgcgtgcatgtggcatatgtgtgttgggaccagaagggcctgggggctgaggttgagagtcctaccaagtttgcctgcatgggtcatggtgctggagccagagggcggctcggggcagcccggggagggagcgaggctgcacaggctgcgggagtcagaggctgtcgaaggcagagtcgggctggggtgcagcaaggggagggttctgggcatgggatgaggatgacagcgcggcccaggagcccctgtgggtttgatggtgcctgatgagatgaggaaaggggcagactgactctgcgcctcctggggtgcctggaaaaccctgtggaggtgcttggagggcgaggggaggggagcagggaggtggtgtctggccatcccctcaggtgtctgaagggtgagtacgggaaggggctgcctcggggaccctggatgagtctggggcatgaggaagccggaggggccacaatccttccctgcttctgagcaggggccctgctctaggccccaggtgggcagcacaggacctggtggggctgtcctgccctccctgcctcgcccctgcccagcagtgggcagcagtggtcacccggcagtgtgcagactgtgtgggaactggcgtctgtccggaccacccagcctcctgctggccccgctttcctttggtgggactgaagatgcaccctggctgagccctgcagctcccggggtgctggcttgacacagagggtcagctgccccaaggaaacgaggtcagggcttgcctgggactatctggggcgggcagtgtgggggccagcatggggcgggctccacagctgacggctcgcatgcctgtctgggctgtgttgggtctcgcttgaggttggagcggtctccctttggggacatccagggctcttgggtctctctttggcagggaatcaggagccctggagacatgggagttctctcctgcttccttggtgtgaggaagtacgtcctcagcctgctcttctctccttggggacacttggccctgccttctggtgcccacttggaaagccagctgggggctgtgacgtttgttgacaccctcccaccacctgtgctctctgggctggcctctgggggtgcaggctggggggatgagccaccccaggtacagggtccccttctggaggggggaggaggggctggggctgctggtgtggctgggaggggcaggcccataactgggaggttctggggcttgaggaagaatcccaacttttacttttgaaacaagagcaaacagcaaattgagctctcccggctgtggaggaggtgggcttgttttcttcggtggatttcctggagtccttctcaggggtatccctggtgtgcagaggtgggatctctgatggcccatggttgtaggaggccttgggccagcatactggagagtgggaaggcaggtggtctgggaaggtggtgagtgcacatgtgtgcatgtgtgtgcacggccccatgcatgtacaccgcacgtgtatgcacattaagctggtgtcccgtcatgtggcccggccacaggcatccttcactttgagcaaaccgtcacttactttcaaaggcgtgttcattgcccagtggtgccccagcagcttccacggccccacgagtccacgagcccctgtacctccaacactgcttctccccacagctagcggggaggacgttggcagcttttctgcctcctcctgctttccccagggtggcagggcagaggtgcccttggggtgggggtgccaggccctggcaggcaggagagggaactgctgtctcctcatgctacccatgggcctggttggcctccaggcctgggatgtcccgttggggccgtgcctgttgggtgtgtacctgacttcaggctgagaatctggtgggactccagcagccgtactcatccacgagccctgctggcggtgagctcggacagcctggctgcatttggggaacgtgtccccaaggctggtggtgatgggactgtgggtggatgagagctaagggtgcctggtagctgttcactgcggatggagggggccacaagctcctggggaaagggggcagaggcaaagacggagcctagacttcactgttgccaccataaaataacacttaggtccatgcctgggaaagcctagaggtgcattccagcctttgtgtctcttctgacggatgggatggggtgcctgggtcccagcaggcaccagcagggaaggtgggttggtggattggtgatgtctgcaaggagggctgtggggcacttctgcgtgccgagtgctcccatcctggccctgcggtctctgcggctaatctaatgtctcccttctaccgggagcttagtaccgcagctgcgtgtgttttcactgtgacttctgcagaattttctgcccatactgctggctcttctgggtccccctccttggacagtgttggcgtgaggaggtggtcggtgcgtgtgtggtggtggaacgaatgaactcacccgggttggagccagccccacactgccgtggcttagtgggtctcacctgggctgcccatcaggcactattgaagatgaggagcttttaagattcctggtacccaggccacaccccagacccatcagatcggcagccgtgggggtggtgcctgggcaccagggctccctggtgattctgttgtgccccagggtgagccctgctggtggagatggcctgggccgggcattcccagggttcctcctgcagctgtgctgtgcactggccttcgctgtaagactgaaatgttcagaggccgtgttgttgctcgaagtctcagatctgggccaaacctgcctccgctgtctttggccctccaggctccccaggctgcaattgtcctcgtcctggatttgcctctccccgtcccataggcctgtgcactcccagtcccctaagagccagtggagctggcttagggatggagggactgagaagccactgggaagccgtggttgggagtcagggagcctgtcctggagttctggggtgtctggagcagaggggctctgggagactgcatgagcagggcctctggtctagaagtggtcaggaccatgatcccaggaggcatatacatcccatctcctgcagggatgcggtggctcagctccaattctgcccacgttggcttttggggttcaaggtggggctggggctgggccaccccatctctgcaggcacatctctgctggcgtttgtcctcacctgtgggaaatgcaggcccagttgtcagaagctgtgctgtgggtgccaggtgtatgagaagtacctagtgtgcctgggcccggcatgggcatctctgtgtctctttgcgctccccggccaggccaggcactgttaactgaacagcaaacagtaaaaagcagcctgacccttggacagatcccccgactccttcccagcttcagtttcctgatatgctggtctccgaaaagctgggagggtgaacagagatgaagctgacagagctcacctgcagctcagtcagcgccgggaactgctagttgttatttttggttactttttccttgcctgggcttcacttctcagggtgggttgggagggagaggcagtggcccagaattacagtggaggggtggggcagtagagtccggcagggaggggcaccactgtccacagacaggttttcaaagctgccctctgcagccaggctgaggacccagaggccggggagctgtgtgcacccccgctgggtgggggaggtcctgggcctgctcctctggagtgttcagcttggaacgcagccttgccacacgttggaggcaggtagggacctggcccgttgtgcaacctgcagctgtgcaggagaattcctcccagggccctgggctcaccctgccctggagtctgcatttttcggaaagctccgcaggtaccctctcagtgggtcagaggctttgaggaggtcagggtctgcgcccaggtgtcagacaagccctgggggagggcagctgagggggtggggggcagctccctgccctcgggatggccgctgggcccagactgccaagagtagcggcagggaggtgcttccacgacgccctcactgtgggatctggcttgggcctgtctcaggccaggcctcctttccctggtgacctggaaaagcatggactctgctggcatgtccttccctcctgcccctgccaggtggagcagggtggggcctttggggaagctgcctcaccctcacctggcttccttgccccagccctgcaagggaggggaactgtgtcaggctctcgtaggtgactctccctgggggagttctggggccttgggtaggtcacctcatcaacctcagccttgctctcctcattggtaaaaagcggggaagagtttctaccttggattttggtaagggggagccattgtttagctcccaccgggaacacacctgggatggccttgggctggggattgcatgctggccgggccggggagccaggagttgctgcctgtgctcctgcaatgcccaccagggctttcggggtatatagagcagcacggtctgcgggatggaggcccttcctgctgacacaggaggctggggaaggtccgtggctggagaaggtccgtgccttgcccagaagtgtgtcttatcaccaagagatggcccggtgcactgagcacctactgtatgctagcactgcggtggccgtcctgctcagcggctcttggattagccatccttggctgcctgcaggggaggacgagtgttctcaccgttgtcctgctatggaggggaaggtgacaagcttctctggtggcacctgtgcctcaaagtgttgggaaagggtggttttcccaggtgggggcccctgccctgccccagcctcaccctgcctgaggccctgctcagccaccaccctcgatggccctggtagaaagtgtctcccgacacctccgcaccctgcctgtctcccagcctcagcagccctggaggtggcccaaggcccatgcccatgcccagtgctgggcacccccaggaagctcagaggcccccaggcagagccggggaggcgtgaaggcatagccagggcagaagcagaacaaaagaaaagaaaaaaatccacccccaaacccacccagcccacaccctgaatctccttatctgtgtctccgcagcctgttgcaattgcctgctctgagtgggttgagaaattcgatggagcagatagttgcccaggcactgaggcgtctagggcggttggacaggtttggctcctgccccgggtggagggcccttctccagagcccggagcagaaacctggccagagttcgctgctgagcgggctgcagcctcccgcatcctcacctgggctccctgcaggttactgggaaaaggggactttcagggccaggggcaggggattgcacagagctgattcgcaccttggcccctctgctgtagccgcgtgaagtcaggcgctttgtgggcctcagatttctcgcctgtgcagggggttgggggatgtggagttggtgaggtccgtatgtctacgaggactgtccacgccacgagcacagtgggggagtcgtgggtggagggtgggagacccccagacctgagtcagcccctcagagagccttggccctgggttcgaggccaagggttcggctgtggtttgtgcagtcccaagcagaaaggcgaggtctttgctagggaatgccctgcttaaccagtcagatatgttacccagaaccttccagaacacaaacatgcaccagaggtaagcagaattggccaccctcggggcagagcacccgggaaattacgtgttcttagaaaattatgtgtaaatcacggtttcttcataagtttgtttattggtttttccctggcaaccttcacactgtctgatcctagggtgaggccatgggggcagtctacagcggaccctgtgggcaaggggaggagccacagcagaggaggaggaggaggaggagggcagcatcccgcctggggcctggggtgcccccacagaacacggggacatgggatgagaggcgtacccactgtgctccccgacatccctgctgctcgctggcccgagggctggctcctgcagcaccatctccacgggaggccgtgggccgcttccaagagggctgctgctgggtgtgccacccaggccccggccacctgccgaggacggagccaggcgtgagcccgtgcaggacagagtggaaacaccgagttctgcctgcacagtccttgggcccttgctggagggctctggctcacgagccaggagatgggcaccagtcctgttaggccgccaccatccactttcctccggcagcaggcaggcaggcaggcaggcaggagccacagctcagggccaacaggcctccctcagcctgggtagggtggagctggagggagggcttcctgggggaggtaacagggaacatatggggaacagcatatgcaaaggcccagagctgggagagttccggggcctgtaatggggaggtcagtagctgagcctgtgcagtcctcagaggccttgtgcagggtctggacttggccctgtgggtgccacccaggaactgacaaggtcttgttccagagacttccccagaggtctgggacctgctttccaggctcctgtttggatgctgttccagcccagcagcactgccctaggccctgccctcccctccccgcccctccctggtcgtctgcaggactgggcagagcccctggaccctgcctgagacaagcagtttccagggcaggcctgggccccggctggggtctcaatggggtgtgctggctttgggaacgttggcaggtctgagcctggcctatgtaagtgctgcttgctcatgtgggtggtgagggctgtgggcagagggccaggagtccccggggcctgctgctgggctcaggggaagggcaggcggagctctggggccaacagccccacgtggcaggggattttcattaagcgttgcgcccactcctaccccatgcccagttctggaaggctcaacagggtccagggagcattcatggaacagctgctgggggctgccgtgtgggagaggccgagaggaaggccagggtgtagccaggggcggaggaagcttccagacctgctgtctataaaattgaggaaggcagaggtgttcttcctgcttttggggtcccctgctcacatctgagggcacggagagtgagatataaagaacactcactccactgaatagctggggaaattgaggcagagccagggccacctgcctttggggtcctcaggcgttggctgtgagatgggtgtgctgctgccgccggcggctctgaagtgggcttcgaaagctttggaggccccggagataattatctggcaataacgagctaattaatggctgcaggtgtgccccagcccacctcccctcccttcccaggctccattctgcctcgtgcctcccacccttcctcatcctctccaccgggtgcgccctcacctcggtgtgaacatcaattccataagtcatcgcattattcctggggcactgtggctttgcctgcttggagggtgagggtgcccgcctggggagggctggaaggggctaccttgacctccggggaggggtgtgacctaccccctgcggatcagccacctgcattgttttccctccctccctccctctgctggataaatagcacacacaggctgagggcaggggaagcgtggccctggagccacgtgtggccctggcggggtggggaggtgacacgcagccccgcccctcccagcaaggatgtggcctgtctgtcctggaaggtcctgggtaggctctgggccctggtcccagcccgtttcccccaggggctttgctcccgagattgtcctgccatgctgggcagcctggtggctctgggtgggcctggcctgtgaggggatggggccctggcagcagaggcctttccttgccccacctaggaacagggaagcttctggagccgcgggggtccctgggctaggggtgtgtaggaccgggcggggaatggagcggtaaccggagggtggaggtgtggcgtgcccagtgggcccacccggcacagatgccaccatgctttcgaggccgctgaggggccccagggctttacctaaggcccccgcgattgctctgtcctgcctggggtgggccaggatccctgggcagggcctggaagctgccacctgtcctcagtagcctcggtggggggcactgggctgggtgtctgccttccctggaggctgcactgcctgagccggtgacaggctgcggactggcctgtcgggcggcagggcagagcgagcaggaagcgctggttccttctccatttccaccccgctggtcacgggagcctgccgtgcccaggcctgggcttgccgacgcctggagttctgggttcgagctctggctctgttgtggctgcaggcgaggcccatccttcccctggtcccgccgcctgcagcctccgtttccctttctgaaggactggtatcaggagacagtgtgggcagccagtgcccgccgtgccagcgccccttccggcgcacttgtgtgcaggtcgctcgcggttacctgccgcttgctggtctgcgggaggctcttttgaaagtggcgccctttggctgctcagcctggcgttgcatgggggacatggtggccacagggccttcgtgtattgggggtgaatccaggacctgggaccacagagagaggagttctggctagaatctcctggaataaagagcccccttacaattcctgggactcattggattgagggactgcccccaggcaggctgaagctggggaccccgaggcctgccagtgggtagtggagaagcctgctggggggatgctagagccctgggctccctgcaggggctctgagcccgatgcagggcgagggttccgttggccctcagaattgcgggtgactcctgtcttttcccctggcttggggttcagtaatccaggaggcctggagagcttttggtgtgctgcccacctcggagcccggatgtggcgagtgctgcctcaccccggccctgccaggcatcttatctgatgggcaggagctggcccttcgctgtcagactggactggcgcacgtgccctgccatctgactcatccaattaatgccgtgatcattttgctaattccctcagctaactgattctggaaccttttccggttgggcactgggtctcggagctgggagggaacctggagacccttttcaatgtcctcatttcactgaggggtaaactgaggcctcccaggaagcacagccctgcctgccatgcctcctcccaggccctcccctgagcccccaagccgttctgtactgagggcctgctgtgtgcccggcccctgggcatctcctgtggggaggccccttccaagggtctgccttgcctacctggtgccgaccctgtcgtttctctttgtctcccggctgggtggctgggacagggatggtggtggtgggaaggtgcgggtgacagatgaggccatgggcactgaggtgttgcgtctcctgagactaaatgcctccaacgtgcgtgattcatcagggccttccacaccgtcagtggccgtcgcccgtcatttgctggtaatgagctttttcatactgtaatttgtgtctcctaattgccgaacaagcacctaatggctctgattaacatcggagggactctgagcttccgtgtttgggagcaggcctgtggcttccaggactgcctgccacctgcctgtgtgactgggggaggcagaatgttccggaacaggggctcagggcctgagcacggtgggtctccttctggtctgacccaggtaggggtttcagtgctggtcctcagggtccccatctgtagaatggggacagcagtgtgttcatgccctggggggccagggtgtgcacatagctccggctgcgctgggtttctgatgccgccgggctccggtcctcccctcctgctgggcttggcagggctgccattggtgggaggagccccaatctgtctcccagcctggagctgccccctggcttggcactgccctctgtgcctctgtgctctccctggactgcctgctggctctgcccgccctgggccttctgtgcgggttgggaggggatgggctcagaggagtgagcggcacttgtccagggcccagtgcgtggccgctgctcatggcagcctctgcctagagccctcagtggctcccctgtgcccctggggtagctcccagcaagccttgaccctgaaccccctccctgcctggtcgcccctccttcgaagactcttgctcatcccccaagtcccatctctccctggggtggcaggggcatctcttaggcccgcctcgctgggtgcccctgcagacactctgcagcccgcgtttctccattcatgccacaaactgtgtttccagcggcttgtccaaggtttggcttccccagctcccgccagaccgtgagcttcaagggggcaggagccgagtctgcctcgtggtcacagcatggtgctggcatggcacaggccttcatgggtttcatggagtgaataaatgatggtgttccagggagcagagcctactcctgggagctgggcatgggctgggcacggggctgacggttaagtcgtggattccttcacacctacagacacacactgccgtcttagctggtgaggcccagcaaggcccccacgagtgtacccagctctgcccgccccactttctgtcggcccctcatgtggtcccggtcagctcccagctggagtgaacacttggctggtggcgcttagaggagggggcccacttggacggggatcctgcctgtgtgtgcccccatgcccgggtctgcaccagcctcactcccacagcgttgtccccagcctgatgtgcccgctgtcagcagccacctcggctccatttggagacctgagctctgggtctgggcaaatccttgctcttgttaatttggggagagtgtggacggttgcaaaacaggacccctttctcttgccccttctcccagacagaagctaggaagtgagcctagggcaccaagttcagtaagttcactttccccgggggctgttgggtgccatgttctccctgtgccatgtgccctgtgcctgttggatgccacgttctccccatggggaccttttgggagtcgtcattagtgatggaagtaacccaagtcatggccacgggcgagggggtgggggcctcgttgctctgtcctctcccagtccagcatgtggcagggccgtcgggcctcagaggtgtcccctcactcagggagcctggcggtgggccctgtccacccaccccattttcctgagcagcgggaggtgggaaggcatccgtttagggagtcagctaatttcatacctctctggtttctcatctaaagcccagccctcatgggcctggtgtggcaccacaagcccaggctcctgggtaccgtgcccctcctctgcagggcagtgtgtctgtggggcagtttgcttctgtcctgtttctgggatgggcctacactgccctccagggaggccccaaggggtgcaggtgagcagggttggcaacggcagctttgggcaggacgggcactgtgccgcacctgtgcggcaccgggtgtggctggcacggtttggctgctgtctgcctgagcactgcctgtgctggccagtgcgtctcccagtccttgggacagccttgtgggaggcccaggccgccctgagcatggggaccccagggccggaggtgcgacctgagcatggggatcccggggccggaggcgtgacgtgggtctcctcatcccgacctcagctccagacatgtcaccatctcccccgggtttggcattttttggggaaaagcctcccctaaaaactgtacagccagaaaaaagaagaagagaaagggttgtgccaagagccttgtggtgggcatactgggtccgtgccgggcttctcctctcccagttgcccctccttcagcccatgtttccatggtgggcataccgggtctgcaccaggtttctcctctcccagctgcccctccttcagcccatgtttccagactcctccacaaccgtgatgttgcccatttcttttccccccaaatctccagccgcctgaagacacttcccactcagtggggtgaggtccacagcgtcacgtgtaaggtccaggcatcagggatgaggtgcaaaagccgtgcggtgggagcttgtgctggggtgggagggaggtctggcaaacgcccactgcgtgggcaccagggcactggtggcttcagggggctccaagccctggcatattaaatggcctccaccccagcattgatgggcagctgaccctcagatgccgactccaggaagggcctagggtcggtgtctttgggaacaatgtcaacagcagcctttgtgtgggggtccggctgtcatgggctctgtgtttggatgctcccagcagccaccagagggcagcttgcatctgtgggaaactgaggcccagacaggccggggcatggttctggtggggcctcacctgcccttctggccttggcccctgcagaccctctgggccacttcctgccaggggtgtggatatggcagagcagccctgggtgctctgtggctcccagctccccacaccccctaagctgggctcttccgggcaaggctggggcggtaaccctggggtgttctgggagattggagaccccctggggttccatgctttgcccagcctgcccctgctgacgttagggctgcctgggactcagctgggtccctagtgttggtggctgggggagaggagccaggagcgtggactttggcatcccaggctggggctggcctctcggcccctagctcgtggccctggctttgaatgttacatagatgaggcctcatgtgggtccctccccttctgcttacctgccctcttacttatgaggaggctgatgctagagaggggtgtgccctgtcccggttgcccagctgggggatggggcaggcccacagcttctggggagagcgtttcccaaggtggggtctggtgctggcaggagggggcggggtgagccaatggctccggggccaccacagaggcggctgttgctggagggctgatggcacgctgggcccgggaaagcccctcgtgggccatctcccggagttctcttgagggcccctgtcttacggatgaggagatagaggttgaggatcacagccccagcctgcaggcgctcgagctgaaagccctcgcccctcgtggtggggcagcgcgtccctgggtgagtgaccaggcggccttgggtctctggtgagctcagggagcggggtccacgttgcctggcccaggtgggatttggcgggtaacgctcgtggtgtgtcctggtgtgagacccggtgttcttggctgatgtgtgggtttgctcatggggtggaccaggccgctgcccctgcctcctgtctctggctgtggccatggctgtgtggaccaggctggggctgcactggggcctgggtggtagggggtgatctgcttgtccagtggtttctgtggcttttctggggtcctgggctgtccctcagcaggcctgggactgggcggggacagtggggatgagtttcaggtctgttcttggtggctgttaactctaggccagatgtagccctgaggggcccggcagagtctcggtgggtctcggtggggccagctgtcggtgggtgaggtgccccaggggaagggagggccagcccagaaggaccctcccattaccctctggtggcttgcccatgccaccattcctactgctaggctcaggcctgtcttggggagggttcctgggctgggattggccgtcggggaggtgcacacagacgctcagcacagttgtggctgcctccagtcaggcgtccgctgagcgacccctaggagccgcctgtctttgcaggagccgcggggatcatctggcggctgcctccacccctgcctccacccctccctttttgggaggtggggcttggcatcttcagcatctctcgtgcctcagtaacaacctgggagcggtgctgtccctgggtacagatgagaagccaaggctcagaggcaccagggccccagtgggaggcggcagagcctctggtggctccgtgtggcatgttctgggctgtgtgtggggccagggagggtgtcttcagcacaggtgcccgctgggtggtctcccatgtgtgcccaggaggagtgccacagcctctccctctgcccaccccccccatgcctgccctgccagcaggtccagcaggccttggcacaggctccagaattgcacgtgatctcagacggttcccagcttcctctgcagggcggggctgctccagtctcttacaccagcgcatctgcaactcattacacagcggtgtcggtggcagagtggcctggccacggcgagatactggcgggagtcccctccccagcagccacnnnnnnnnnnnnnnnnnnnnnnnnnnnnnnnnnnnnnnnnnnnnnnnnnnnnnntcccccgggtgctggcctggggacagcaccacagggcccagccagggctggggcagggaggaagggcccctccactagtgggctttggcctcctcgtgaggagctgggtggggctggagaaatcagctcccgccagcctgatcttcctgcctcagaagctgaaccccggggacagtgttggtcagaaaagccatagactctccacggaaaaggaagcctggcaccccccatgtttcacgtaggccaccctaaggtccacagatgcctggggacaaggattagtgtgagcaaagacacaggagtcggggacacatcccagtcggaacgtggtggaaaggcgccaggcaggctgagtcggagatgtccctcaggctcctgctgggagaaggggctggtggttcccgggcctgcacatccccacccctgccctgcgtgccactctcagcctttgcccagcaccaggcttattatccgattggttaattggttgagatacgggtcacctcccgtaacagtcatctttttaaggcgtgcagttcagtgggttttcatccacacacttgcacagccaccaccacagccagctttagaatttcgaagcacttccaccaaccccccaaaagaagccccgtgcccgctggagctgctgcagtgccccgcctgaccccaccagccactcccctgcctgccttctttgtggatctgcctggtctggcgtttgtgatctccctccatcttcacagcagtctaggtgctgcgctgggcagggactgagtctgcggtgggggggagggtggtgaccctgtccggggagacccagccttgctccccggagcccacccttccactctctgtgggaagagaaggacactgagtctgccttgggtttctcttgcgtccccacatgcagggacgacgtgccagggcccgctgtgtgcccttaccgtggagatcccactttacagatgggaaactgaggttcagtggtcgaggagccagcacttggagacaggatgtgaaacccccggctcctggcccctcggccaagctgtcggtgcagtgcggtgaccctcgccggctggggagtgtggggtgggcttccctttgtgggggcctcaacttgcctgcctgtgcagggggtgtgtggggcaccatggtcccccaaggggcacagagcctccttagcacctgcagctccccctcgggtggggggtgccggggtgtcttgtggccccttctgggtccttggggttcctctcccacacctgagggcctgcccagcctgtctctggcagccgaaactggttcctgggccccggctcagccagcagttttgtgctgaccctgcaggaactgctaattaagctaatagttcccagagctgcctgacagcagctgatggtatcggccttgccggagatgctcggccgataagccgctccctgcctgctcagagtaatttgttattaaacaccacagctcgcgcatgctctccgctctggaggtgccagcttgcagggccaggagcctgcggcagcgggcctggggctagggtctcctcaaccccctccccccgggactccctgccatgcacctgtgtctctggagagccctctgtaggggagggaggccaggctgctccccgatggatggtcagtgcctggctgtggctcccacagtgccctgtgtccccagggctctgctgatggtcagctggccttgacaggcacagccaggtgcctgtgaggtgctgttccgtccagtgggcttgaggcccccttgggaagtagggcagctgctcactctgcccttgccacccactcccctggggctggatagcccctgccatgggggccaccgggtccttcccgcactgtggtgttcggagatgcgccctccaggatgagaggctcaggcagcagaaggctgcagagagctggctggctttgagcaaaaagtcatgtgtgccgttctgttagggtgtgtgtgtgtatgagtgtgtgtgtgtgactgtgtattttgtatgtataggtatgtgtgactgtaggtgactgtgagtgtacatgcatgtggatgtatgtgtgtggctgtgtggtgtgtgtgtgagggtgtgtgtgtgtgactgaggatgtatgtgtgagtatacgtgaatgtgtgtggatgtatgtgtgacttcatgccatgtgtggatgtgactgggtgagtgtggatgtgtgtgtgactgtgagtgtgtttgggtgtgtgcatgtgactgtgcatgtgagatgtgtgtgtgctgtgcatatgtgtgactgcatatgtgtgtgtgaaagtgtgtgagtgcaggggttatgtgtgtgagtgcaggggttatgtgtgtgtgggggttgtgtgtgtgtgtgagtgcgggggttatgtatgtgtgtgagtgcgggggttatgtgtgtgtgtgggggttatgtgtgtgtgagtgcaggggttgtgtgtgtggggggggttatgtgtgtgtgagtgcaggggttgtgtgtgtgtgcgggggttgtgtgtgggagtacaggggttgtgtgtgtgtgggttatatgtgtgtgagtgcaggggttatgtgtgtatgtgggggggttgtgagtgcgggggttttgtgtgtgggttgtatgtgtgagagtgcgggggttgtctgcgtgtgtgtgggggggttatgtgtgttggagatcgcagctgttgtgcctccgggggcttcttggatactgtcacccattccctgtgagctctccacacccccacctttgtgtcccctccagccccacccagggcctcctccctgtgggcatgggagtcatgggcctgggtttgaggtctgacctgctcggtggccttggcgtgttgaggcctctcgggtatcctgtctcagagctgccttggtgcaccctcccacagcctcacatttggaggcagaggtgtgggaggagaggctgagtccagaggtcccctcctcctagttcaaggctcactgtaacctgaaactttacagactccatttacacagtcccgtgtgtgcgggtgcatgagcccagcatgtgtactgtgtttgcacacgtgggagctcgccacggagtctgcctcctgcccagtgggatgagcagggtgtactcagagcctcggtgcaccgaggaaagcacagcccgtttccctttgctggactggaagtcacagtggggtactgggggctcccagacaggtgggaatgggggcccactgcctgactccctgggacccagctgggatctggtccttggtcttctgatgtcccgggtcggaaggatgactgtctgtcccatggctatggctttgaggagccccggaggccctgtggggtggtgtccatctgcatgggacgtgggggagcacacgctctgagcttgagcactggctccgccgctgctgggcagtgtgacctcgggcagggctgcgctgagcttggcagggctctctgccctcgccgtgtccactgctgggagcacgtcaggcctccctgcccggctggttccaaggcctttctggtccctgtgtgcagacgaggctcctcacctcgggaccccacattactttcttatttgtgcgctggtttactttgtctctcgccgtggggcatcacctctacaggacaaggccaagcctttgccccgtagacgaagggctcatggtgagcccctcatttgggattctgtagctctgttggggcagcctggtcatgccagggcctttcagggtttcagagtgctgcctgctatgtgacctccctggtcgtccttcctcgccacctgcaagccatccccgtgtgctggctgggccctgggctgcagactggggccagggagatctggacagcagcgtccaccccatgcagttcgctgtgtggcggcgccgggtgggccttgtgcacagcccagctcagaccacggagggtctggggttggaggtggtgtggacatgatgagtgctctcactccaggagagaacgctgccaagagaagggtggctggcccggcgggtggctgctgaggggccatcgcggaaggtgggtggtcagcagagagtacagtgtcccttcttccactgggttccacctgagggagtggcaggagccggagggcttggggaagaggccgcatcagcctcacttgagggctgagtgctgaagacagtgtggggggccctgggctggcaggtgggtcaccctcgctctgggacacgctcaagagagtgccctggagaggggtttgcatccgaagctgatcctgcttccccatcacattcccacccagttacaaaagtcatccctcccaccggcccagtgggggctgctggggcttggggctgagtggggtccttgctgcctgccttgtctgatgtgtggctttggaaaagtcccttgacccccccaggcctctgtgtcctttgccgtgaggtctcaggggaccagtcgtctagagccagggtgctcttgggcagccgccactgtctctggcccccctggtgttcattcaggcagggccagggtagccgtggctatgagcccaggtgggtatggggcttggcggggctgccgtgtgtccagcgagagccagctgggctgagcttctcctcaaatgctgatgggggccagacttctgggggcaccgtctctttccataacatgatctcccctaggcctcgcccctaacaagctggcagagaactctcgccccatttcatggccatggcactggtggcttggggcagggcctggcggccagctcttgggccggtgcctctggttcactgggcctgtggcctggcccttggggtatggaggacgggcctgggggtggcgtgcgcccccttgaagtggtccgcccttgtctctgcctgtcctgaggatgagggtcatcaactgagtcggggccacagggcagccatgggtgcgcgagtgcagggccgggcctgtctcctccgggcggcgtggcaggtggctgggccaagatggctgcagcgcttcctgggcgctgctgcgtgttgaaacccgtctgtgacgtggccagcggtgttgaaataagtgcctgtgcatttcccaacatcctgccagcctggtgcaggactgggtgccaggcccagcctgggcctcccttgtggggtgctcaggccccacttccctccctggggaggggaggagaggccacctcgagggagtgacgtcaaggcagggtgacattagtctgggcccacgggatccttgctacttccccatttatggaggggaaactgaggtgtggagaggggtgaggatgggtttgaagcccggccatccagtctcagtgccgcttgtagaggcagaagggcgtagggagggagagggagagccaggtaggccgaaggcgcctggcagtgtggcaggacacgcgcccactggggaggtggagggccgcagccagggcctcagctgagggcctcctggatgctggctttgctgttggggctggagcatggacccgtcctgggccgattatgggagatggtgtggagtgggggccgcaggcgagggtccctcttcctttggctggaggaggcctggccctgggactgtcccgtgaggggagacagtggttggacccattgcagaattgatttgttatcactgggttccaggcacacggcttagagggcatcacggaggcctccccgtcacctcagagggcatcacggaggcctccccatcatcttatggggtgggtgttattaggcttagtttagaggagacagaggatcagagaggcccactgacccgccttggggcccccagcaggcagaggaactgtgtccaggtgctggactgtgagaccctgctcttcccgggactctaccacctcagagggtggcagcacagggcccagcagggcgtgtgctcctgtggggcaggcgagtcctggctctgcccttgtaggctgtgtgaccccaggcggtagctcaggctctctggtctggactgggcgcggagctgcttgagatctggaatctggctttctggtgaaggggcagcaggagaggggctgagacccagccttcctggttgcagagctgcggtaggccagaccctcctgcctgctgggtggggcctggcattccaggaacctgtggtcaagcctggcctgggctgtggcgtctgccccgggttcgtcagcaggggaggggccctggagaccagtccgttatggatgaggaagcgggtgcccagagagggtgaggagctgggctgggccacacagccaagtggccacagagctgggggtggtcaggagccatgctttctggtaaggcggaagtgtctggggcccgggtgggatgaaggactcgggtcccagagaccagcctttggtgctgttcttgggctaggaatggcagtaacaggaagggcatggccaccgagacgcactgagttatgggcacctgccgtctgccaggaactgtggtccacgcccgactgtctttaacagctctgtgcctgctgctgtgtgccgggccctgcgctcagcccttctcgtgtgtggtctccaaccctgtgtgttcccaggccgttggcccattttccagatgagaatactgcggcccagagaagcagcattgtgtgctgcggtccttggccacgaggtggtgtgggtttttttgacccagatcttcctgtctatcaccctccctgggcctaccttccttatggtagacacatgtgcaggtctgtcccatcccccagctatccacagagaggccagggtttggcatggggaggtgtcggagcctactgggttgtagctggagggaggtgagtggcacctcccacaggaagccccccttgatgtctcctccaccttgccacattaccagccgatagccaggttcctggaaaaggctgtctttctgactctggactgggtgcccctgggcagggcccacctttgttttctaatttattttaattaaaaatttaaaaattagagacagagtcttgctttgttgcccaggctagacgtgaactcctgggctcaagtgatcctcccgccccggcctctcgggtagtggggacttcaggagtgcgccacctcacctggcctcccagcctggtttttctctgcctgtttgtagccctgggttcgacgggggaagcagtcgcctgatgggcaagtgctctctgagtggtgcatgaaggtggctgtccacgtggctgtctgtggtgtcggttaatcgtcacggcttccgggagttaaaggtgagggtgccatcccctttctggggacaaggacgtttagaaccagcgaggttgagtcagatgcccaaggccctacccagccgagagcgatgcagccaggactcaaacccagatccgcaggcggcggccgctgtgccccagtggagcttgagcctgggtggtggttggcactcaccacctgtgggatggatgaggaaaggccaacctggtggtcactgccacttccgcagtgtgggctgctcccggcctgagggtggctctggtccccagctgtcctgaggggtgagggggtgaatcgcaggccaccctcctggtgtgggctgcgctggtcactggtcgctggtcacagggatcctggctctcggcccagggccactgtttcaatgggttctggcttgagggaggcccccggggcaccccccgcctccggtcttcctcccagaccaaacccccacaacctccacatgttgagccccgagcaaatgccgttccctctgtctacccagagaatggccaggccagcggctgcctggggaggcacagcaagtgggtggtaaaatttagaccttttgcctcctggcgacttccttcttcagtttcattcctacagaagaggagatagaggctcagcgagattgtctaacctatttggggaagcacagcttggcagtgcctcgtgttactgcttgggtctccttggaactcggcgcctgcctggctagttcttaaggactcctgcagctggcgccgacctggtcccgctatcctgtaggtctgtacttggcacctgctatgtgccaggcactggccagggcccagggtgtcacaatggagtggccatggctctatcctcggtagccctcagccttggcacccagggtgaggggctgactgtgccctgcactgcagggagtgctcttgagggggtgtgtaggagatgagacccctaccccaactgagagactctgggaaggcttcctggaggaggtgttatataaaacggagccaggctggagtgagccaggaaacaggtggaggagtttcaggcccagggaacagcatgttcaaggctagaggcgagagagcctgacatgttcctggaatgacccaaggctgggggtggagagcaggccgggccagagcgcgtgtcactgtggggaggtgggagctgcctgctgtcttcctggcctggttccgatggctgtggctggctgggcacccaggaaaccttcctgcctccagaattgcagtggcttttggggtctgaggggggatgctcttcatggagggcagccgagggctcccgggtgggctgtggacactgtgaacagttgctccaggcagtgggcaggggattccaggcaggtcctggcccggaataaaccctggttcatctgagggtcagcccggagactgtgtgtggatgatcggcctggcgggagagctgggagtgacgctgggttggccgtctagttttacagctgggaacacgggccagggccagcgggcagcctggggtggccagcaggtgggcccggggccggcagctctgggccctgtgtgggttgtcagggctggaggagaagcctgagggctggggtgagggcgatttggaagcagccactccctggtgcggagtaggagggctggcttctggcaggagagcattctcggtgtgagagtttgtgttagtggctgggggatgctgagattctgtaaaacactcccccaaacaaacaacaaacaccacgtgccctgcgactcgatggcagaggccacgtagagaaaacaagctgccggccgccctccctccctccctccctctctctctctgcttcccccccaccccaccccgccaggctcgcagcctgctggcctcccttctccgcatgcgggcagatcatgacaagccttgctatttattaattttttaaaacaaaaatggaattcagatttgtgtttcctatcaaagttgggatcttccttaggaaggaaggcaccctcccaccggccctgctggttggggcggaagaaggcggcccctctgcaggcgcagccaggccttctcgtggaggcccagaggggcgccctcagccgcggggcctgcccatgccagctgtcgcacctcgcggtgcccagggttgtgggggtctaggagcttcggtgcctggcagggtgcgtgtttatgcatgtgtgtgtgactcgtgctctgatctgtgcgtgtgcctgtgtgccccatccacactgctcccgtctatgctgtctccattccttcgcgggggcagaggtccctccagtggcccaaccacagcccccactgctgccctgtcctaccgtttcttctctctcctcccctgccgccagccacactctgctcaggcagccctgggctcatgacttgacagcctggccagctgcgtggcctcggccagggcgacctttgtgtgttggagccttgccgcgtcctctgtctatagaaggtgatgcttagggagctctcagagaaccagtgagacctgtgccgcgtcctctgtctatagaaggtgatgcttagggagcactcagagaaccagtgagacctgtgctggctggtgcatctcgggtgctcagcgcgtgggcagtaccctccctggctgtgctcctgggggaagctgggcactgggcatggaaatgaaagcgtggtagagagggacctcctggctccttgcagctgagaccagccaggggcgcagccctagggatctggctgggcctgcaggctgcagggtttcaggagggagggaaggggcatggtgagggcaccttgggcgtcgagtctctgagggggtgcaggaagcatttccttacctgtggcgggcagtcggtgggctgacctctgggccacgtgttcactggctgagtgtgcgattgtgtgccctggccctgtgccacgcccactgtccttgacccgtcagccgggttttcctggcagccctgtgactgctggcctaggggccgaccccgtgaggggctggcactgggaatggggacctggccagtcttgctcagcctttggggacggagccccaagctcgctgcatccgtgctgggcactgacagtacccattctcaccctgtctgtgctccgctttcatttctgggggcctctggcagtgttggggttactgatctccgccagccccaggggtgttgggtccttgatggcgagctggctgccctccctgggccacatgctgtcccacatggaaggcgatggcgttgtccccatcactgcctgaccaagggcaggtggcccagagcatgggaggcctggagcatgggaggcccagagcatgggaggggtccccagtgtccagcacagttgtggggctgggccctccttagaactcagccctgcgtgtgctggcatcaccgctcgggaaggcacgcgtgtccttcctgcacagctgggtgaagtctccgtgtgtgtgtgccctgcagccagcacacccacacccccagctcccgcgacccctcggagatatccgttttcccaacttccctctccgggaccacttctgtctcttgttggcctttatgaaaacagaggtcagtttggatgtgggggtcagggaggagcactctactcttgcagagatgtaacatttttattctgacttccagctgctgcccgatttccaccgtctgtgtgtgtgttttgatctgtcataccctcgtgctctgcagaccagcttctgtccccaggaagccatctcgctgcccccctccacacccacctccatcagaaccagtatgggggacgttgcgtgagctgatggggtgctgagtggggaccctcctgctctgccacccttggaggggctgtgagaatccaggtgtgtgcggaagggccgagctggggcaggttatgtgcagctcagcatcggccacacccaggcctggcccctgtgctgtcctcctggagtggtggccatgggggcacagtggtgccctgggtggcgagcaggtttcacgatgactgtggctggcgacgaggagctagctcggcaggaagctggcagccacccagggttctgggcagggccggggcagagggcacaggcaaggcacagagctctggaagtgccaggccaccccggctgcttcctgggagatgagtccctggctggatgctgtcatcctaggcagagaggcgagttctctgtctgctgggtcagcgctggggagccaggccggtgctggtgttgctgccttgctgccgccacctgaaggcgtgtgtgccggccagcgcctgtgtgccagcgcctgtgtgcgggttccttaccactgtgtggtttaacccttgccacccaagagggctgtggccatctgcctccagaacgcagctggtgaacagagctggcctggtcccgaagggtcctgtggcctggaggcaaatgtggatgcttgttggtttatttgcttagaggcaggctcctgggtgccgagggaataggctgtggcccctgtcacctgtccccaaggagcagtacctggggaaggtaccgaagtggtggccctccctgcccctgccagcctcaggactgtggccattaggctgggtcggccgctcagagtcacaggaggggtgggtagggagctctgaccctgggcagcgcgtgccgtccggttgctcccaaaggcagcctggagttggggtttgccgagggaggctgcccccgcagaccccaggctgtgaagcaccccagccttgtaggggtgcctgcaggagtcccggcagcttcaggagcggcctctggagcctggagggcaggagccagaccatccttggctgtgactttgttttgtttcctcaagtcagattgtcctgcttcatcctgtgcccggaagagaggtcctgctgctgtcctcgggtgggaacacacgtctcttgccttccctccttgagggtgggggtggacctcagccgccacccatttgtcagtcagcaaatgcagctcctgctgggtcacttgcctgccagctgagctcctgggatgcagcccagcctgtggggccacccggctcctccagccttatagctcctccccaccacacctcctctgcacagcaggacccggaattatgctgttctcggttggacctgcttgtccgtgcttaactgggcctttcctgatccctgtgggctccctgagggcggggctcgggcctgccccatcagcaacagctgttgccgagggcacagatgccctgtgcatggggtggggatgaaggagggctgggggctccgtgacagacagtgggaggggaggctggctgtcctgtggtgagctgcttctggggcaccctgagatggggcctcccttcacttcctggccatccaggcatctgtgtctgtgtccgggaagtggaggagggaccccaggaccgagtcgctgcccatcactgaccgtctgtggcaggcactgccagtggccgtggcccagggtcttggtggctcggcctcatcgggggcttgctccaggccttgggtgatgctcctgtgctccctgacggccgcagggtctcaccctcctgctccagcccctctctgaccccaccctgcggtcctgggaggtagcaggacagccccagtatgcggatgagaaaacctgaggcccagcctgggcgggttcgtgggtccagctcagcccctctgtgcctgtggtctgtagggacctgggcccacctgcccctaaggatggagctcagtcttccccagctccaaccctggggccttgtgtgggaggggcagtggccctgggatctggccttggcagctccagccccctctccagtatggcagagcctggaggcatgctggtctctgggtctgagactctggcctcccagcctgctcccctgggggttggtggaggccttggggctgtcggagcttcaggattagggactgaagcccagcaggggctcccttttctgtgccccctgcctgagcacaatcttcctgccctctcccctgcagcccctctgttgtcgtggtcagtcgtgccgcctgagggccaagtgtggccttggcactgccaccgtccaccagcggcaagtcagggcaggtgcgtgtgttgggggtggccccccgcggtgtaggccggaggtggcgtgccggccccgtgagtcacgccgatcccaggatgggagtgggggtggccggggcactgtgagctggcgtgctgaggctggcctgcccgtggcttggcctgggggcaggggtagggtggggtcctgcccgggttctcctggagaacctgggtcaggagccaggggtcagatcagggctggggacttcgcttggggtcggataggggctggggtggccatgagaagtgaggagcctcccatgacccagtggttgcaaggagcagatgccgcctgtcaggtgggcggcccccctgggaggaggctgcaggctgggaggtagacaggacgggcccctcggtgtgatggttggggtgtccagggactggacttgggaagggttggtgacctagtgccatggggtccctgctctctgtggctgcctctgtggccaggccttggccctcctgttgctgccccacgacacctggctgtggcttgtcccagctcctgggccaggtggggagtgcagctggccaccgagcctcatgaagcacctttgcagttccccggcacctgggtctggccgaggtctgaggccagaggaaagacctcctccagaatccagggctgcccgtcctgaggtaaggggctttgagctgcaggcagacggcaccttctacccatggccggatccccccctgtcaatctgcagtagagacagcagagcccccgggaacccctcccagcagctgagggttcagggggtgcccctcactgtactggggaaatgtggccccagcgggctggaggtgcagggcccagtcagagactgagtctgaacccggtggggcctcaggccagctctgtgacccggacaaggggttttccttctctgagccccagttgctgctgtcagagcctgcggtgggcactgatttgaggaaggacagacatgggctgggagggttgagggaggccctggagagggggaccctggggagggagatcttggagctgcagaggctttgaagaggcaggcgtatgggagtgcgtggccaggttgcccggcctgggctgggggctgggtccagggatgcggctggcctcacctgctggtagagccctgtctggaggagttgagctcagaccttagctagtgctgaccgcgctggggcagagtgctgagaggggctctctcagggccgtctctcagggctgggccctgttggatcttctaactgtctgagcgggagagggaaggcttcctggaggaggtgtccctggtaggaagacgcagagggaatgattgtgtgtgctgtaagggccaggcccagggctgagaggggctggtggagatggtgggggctgggtggggcaggacaccatggtctatgtggcgcccgcccttctccctcctccatggccacaaggcccctctggtacagagggtggtgctggccttgagggatctggccggcaggtaggcaagtgaatgacagagcccctcaggtggatttgggggtggggcctcctggttctgcctattttcttcagcggccctggttagggctttgaaggggcttcactgcaaattagccccgacctccccggggtgcccagcaggggcgcactgcaccttaggtgctccgtcgtgaagtggccacaaggtgcctttggtgtgtggggcccacaggatgagttggatgcagcctcccggtgggggctgctcaggtggtgatgaaaactgtacctgtgggcaggtgaagccaccgctccctcggtgtagcagtcagtgtgccctccccacgtctcctcctctccttctgtccctggacccaggagtttgggagaggccagcgggccagctgggcactttggtctctgtaatgaggaccctcccaccccaccaagatgcacacatgccctgccaggatgtggggggggcgcagggcagtgggctgagccaaggtgtagatgctgggaggtaaggttaccctccccctgggctggcgtctgcctccccgcctgctgctgcccctgtggccggccgcatgtggggaggaaggaagaggtttgggtggtgtgtgtgtgtgtgtgtgtgtgtgcgcttttgactgggctcggagggctctggctgggacccaagctcaggcctttagcaccttggctgggaggagtgaggcctggggagacagtgggggccaggagctgggtgctgaggagaccagagctgggggctggggcggggccagggcagctggtaggaagtcctgcccttgcagccggtcctgcgagaaagcccctggctgctgtcttggctttgctggactggcaaggtggaccagaggctggggactggacaccatgggcctctgtgcactgatggagcagtaggtgtgtgggattcatggggtgctggggtgtggattcacgagggaggggccttttgggttacgaatcagcccctccagttatccagggtggggtgctgaggcctgagtgggcagtatgagggtgggcagctaactatgtaacagccgggtctctgggaggccctggtctgtggcgttgccgtctctgagctgggaagacatgtgcctgagagctggtccggggtggcctctggctttggctggggaggccctgcccacctgagagcagcgttcggcgagtgtggactctgccccggtgctgggcgcagcacctgtcgagttcttggagcgtgccgaatgcaggcgtagcttcgggctgtctggacaggacctggttagcgagaccctggctgaagggcccagaaggggctgcagtgggactggagccacctggctatgcccctgggctgctgggatcacatgctgtgggtgattgggcagatgtggctgtgtgtgtgcacactgtggggacagacagggtgggcccatctaagccatgtcctgccagaggcttccccagtgtcagcacacacaggggggccatgaggggccgagagcccaggccgcttcaccccagagggctgagcagctggtcagctggacttgctctgggggtctttgtctcactgatgagccatgtcagggtgaggcaggatggaggtggggctgtcttgtgtggcctgagtgggtgtggcgggctgggagcctgttgcaggtcaggatgtgtccaggggccagcaccagacctgctgaggtgggaggtcagtctgtgctggctctgtgaggggccctgcagtcttggaccttgcctgtcccctctggggctgaggtcaaccctggggcaggggtaggatggggacacggaccctcattccgagtctcatgagaccgcaccacttagctgtcagtgaggcttgttgggcataaatgaagcgcattgatggggtgagggccggaagaacccacagaggcttcgcacctcccactccccgccccactctgggaaccaggccctcaggcagctggcgaggatctgggggtcacagctgaccaccagccacagctgagttggcagttagcatggtggcatggtgtgcctcttgggaataaagcttcgacctgggctgcatgaggacgggtaggtgggctgtgatcctcactccaggcagaaccgtcccatgcccttgtccataggatgagcttatccaggtgtggttccaggccctgaacccgatgtgcagggagctggaaagttcagaggagggaacaagggatcctggctaacacccaggaggccaagggaccgtctggcctgagtcttgatgaaaccaggcctcgggggttgtttgtgttgttattatgagactagcatgtgcctgtggtacagaccccagctcaacaaaagcctatcttctcctcactagagctgggagtcccagaccctccacactgtcactcaggtggggagtcctggactctccacactgtcaccctgtggggggagtcccagaccctccacactgtcacccccggggggagtcctggaccctcctcagtgtcaccccggttgagggggagtcctggaccctccatactgtcaccccggcggggagtcctcaaccctcttcagtgtcacccctcgggaggagtcctggaccctcctcgctgtcaccccagggacctccctcatcatctttgaaccccaaactgggcagacattgatggttacctgctccacatggctgggccggtggtgcagaggaaagcgaaccgtgctggggtcgccagcgactgaggatggagtcaggggatatggcagcagtggagacaccagcaagctagggacagcccgaagctgggggagacttgggaatttagtgggttctgcagagcatgggcttttgtggtgggtgagacccaggagggaagggacctgccctgggcccctcagccggtggagctgtgggtgcagggtgagcagcgtgtggacccatgcagggcgtgctggggggcaggggccagagctggaggaagaggctgcggtggggctgtactgggccgtcacccggtcggcctgggggcgagggttctctggcccttttctgtcttccaggaggaaaggagccctctgtgtcccacctgctgccttgacgctggtgccctgggcttttgtgggcagtgggtttccctgtgctcaggcggggcagtgccctcctgtggttcagggccagcctggcctccagtcctgagcaccgcctgcagaagggttttcagacgggtgtgagcatgtgggggtgccatcacaggagacttctggttcccctccagccctgtgtgacatcttggcggcctgtccccagcactggttgggcaggcaggaagctcctggcctgggatgggcacagacagggtgtgggccgtgagtcgctgctgctcagagctacccctgcgcagccttccttgaggcctggttcccgggccatggcttctgcagcctgggcagggcagcctgttgtggacagagctggttggctctcaggcctcctgggtggatggggacttaggacccccactagcatgccaggggctggcagggctgaaagctgcacgtccacacccccacactcactaccggcccggggcttgtccattggctgatgggccacaaaaggcattctgtgccttggaagaaagccctcgttgtgtggctggagggaggctgggagccatgaaggccccttcccccgcgtgcttcctcaagcctctcgaggcgggttccatccagagctgctcaggccctgcctcaccagtatccgaggctctgctccattccggcccctgccttgccaggcccggtgactccctgcttgtttcctccactcgggcctctgcgtcccccacgcccccacaggacgccccccaggatccgtaatgctggcctctctagggctccctgctcagtgtggcccttgctgggagcaggtggggatggcacggtggggatgtgagggcctgcgcgagcggtggtggcccccgaacaatgcctgggcttcttccaggccaccactccaggccaggacaaggacaggcaccctgcatccggttttccagcactcctgcatgccggctggcaccatgttggggcggctgttgccatcgccccccagcacgcagatggggaatgggcccagccaggtcacctgatttgcctacagtgggcagccagctgtggtggagctggatttgaacttggggctgcccaacgtccgggccttgcccttgtcctctgcccaggcccctgctgggtggcagaccatctgcggcaccagctgcgggtgtgacggtcgtgtctcggattgaggaaatgaggccggggtccttgtcctcttccaagaagctcttggctttggccaatggcagccgccttgtggtcacaggtgtctggttgagggtgggggaccgggcggctctgggaaaggggaactgggccgccgggccagcatgagcaccacttgcttgcgaccagctccaggctgcctggaagagactccagctctgctcaggcacctccctcaggccccttcctgcccgctcagccgccgcgctgcatcacccgaggctgtgggaccctgagcccgccggccagcggccgatggggccgcccctgtggtgggacctctcgcctgccctcgccatgaggctgcacctccttgcctctctgtcgggcggtggactggcctggcgggcgggggaccgcaggtggctggcaggtgagggccaggtttggtggccactccgtgtggcctgggtgggtgcctgtgtcttgcctatggagtgtgggactcatggcatgtctgctggggctgtgggggagaggatctggggaccccaggtcgggagaggctggggaggtatgggggccaggtctgggacaccccgctccgtggagcatgcctgtggtctggtcacggctgctccgtacgtggccgtgctgagggtgtcatgggagcgttctgattctcccaggctgccactgtcagcaacagcaaactgaggctggccctgggtctgccagaccctgcagcccgaggccaggaccactggggtctctggtgtcccccgggtgtctgggcctgagggctcctttcaggccactttgttccagaagaaagacctgggctctgggctctgggcaagggtgggagcgtgggtggttctcctccctctccttaccttgaggctctatggaggaccccttggggtctgccccactcccattttaaagatgaggaaactgaggctgggttgtggcagggacttgtgtagccggaggggtgcagtggacctgaccccgtcttcctgggcccagcgttgggacactgtgccagagagcagcagggggcttaagcggccagactgctcagcctctgcctgccctgggccgctgctgtggctgcggtgtcgggtgggtgagaggggagacataggggcagcccttctctgcagggagtgagggggctgagtcggagggtccccacacccatcctgctggtggaggccagagccggctcccggccgctccgccctgcccggccctggctcatgtcccgtttctttttcctggcaaggacgtctgttaattggcatgcacagagtgccagggcccatgtggagagtgctcaggtgccttcacagatgtccctagaaggatgcgctctcggcgcccacggtacaggaagacaggctcagtgccgtggagtaactttcccaagaccacggggagcctcggggagggactcaaaccagatcggtctggccagggtgcaagcctggaccatctcgattttccaaggccttttaaaagtcctttcgcaatttgtaaatatttagcccagccttcctcagcactgcgtgggcattgatggatgccaggcgaggctgtgccgggcagtctctgggagccacttggttttggagctgacacctgaaatagaacagtgcacctggggaccacgcagtccttgaccaggaccacctgcctcacagagccgtccatgagcgttccccgcattttgtgctgtcagtaagcagcaggcgtgcggcgtgcctgcctcgcacacttgtcccggcgccagccctgactagctggtgaccatgagcctgtcctgggcatctctgggctcagcttctccccttttccccaagcccgtgcctcgcttgggctgtctggagtgatcgtgaaggcccgttcccagcctgactctgtgagcccaaggttttttgaaagccccagcctcttgcagcaaagaactctgatttctgttttggaggtgacattggggggtttgaattcagatcccttcggcagctcttcctggagggcaggaagcgcttatagggcacttatcgctgcaccccatggtgaccacagagaggcctcttcagctcttggctttggtttactcatctgtaaagtgggcgcagaagttttccaggtcagctttcttgatgtgacaggaggtttgagtttgtattaagttacttttatgcagaaaatatcctaggctgttagactgtgcacttccgtcaggggtcctaggctgttagactgtgctcttcgtcagggttgggggatgtctttggtgttctcagctagaagcagtgtgtgtgtgagtgtgtatgtgcatttgcgtgcacaggcacacgtgttggggtcactacgggcatctggtgctgggtcaggcactctgagcgtctcctgaagcgcacttactgtctcttctgggaatgacttgggatgttgttctgctctcacgcaggagtggggcccagggtctgttgtatttttggctgctggactttgatttgtgcacctttccccatggcctcctggtgacggtcctttctcccacgattacctctgtctgactgcttgtcctctggggagtcatctgaggcatcaggttagtgttgtgtgtgaagctgagtcaaagaccctgagcaggagcctctcctgtgagtcaggcgcatggaagttttagcttgtggagttggtggccgccattctgggcgcatcgggctctcccggcccctttccctggtcttcctgcacctggatggggaggggagtcatccttcgatgtccttcctctgcctcctcctccttgtgagccaggtgacagccgggtgccctggggcagatgctgagggtctccaggtgtctggaggctgtgagttctctggagggacagagccccctccctgcttggtgggggctgctgcttgacggactgggtgtgggtcagaagccctggaagacacatttctggctcctctccttcgtgctggatgccccagagggctgagacccggtgacctgcctcctccagggtggcctcaggcctgtgtccactcacctccctgccaagctctggtcctccaaggaggggtttggtctcctgggtcctcctcggagagtcacatccgccacctggccggtcctgtcgtggacgccctcagctcgctcccgtcccctgcccctctggatggcacagactgcacgttgttgccatttcacggaacccgttttcccggatttgtcaggaggggagagaatggtggaaatgcagttttgctgggttccctgcacacgtgggcgctggctttggtcacccccggggggttgctcgtgggatccagagaagtggacgttggtgaggccaagcaggctgggaagggtgctggacagggacagcagaggcctggccccagggggttagggggccagggcttgggcgcctctgtcccgggctgggggctttggactttgggggtataatggggagccctgggacagcagagggctagccccagagggctagcggggccagggcttgggcatctctatcctaggcctggggctttggattttgggggtgtaatagggagccctgggaagttctgatggtgacagagtggacattctgccaagtgaccagtggaggggacagtggtggagagggtgtgctgagctggccttagcctggcctgggcaaggtctggacttggccatgtctggctctgcctgtacagagggggctggcagacgttcctgcgggaggcactctgtggatggggtcacccagagtctggacagagactccatagctgcagctggcctctccatccctccccttccttccgaggcccctgggggctgccggctaggctgggagttaccgtgcgtgctagctgcagccccgtctcaggttcttggggctgggcaccgaggagcagagaagctgcctgccacctgttcaccctcgcatctgcaggccagcggctcgtcccctcctgctgccacagtaccctgatatgtgccgattggtgggattgggaggggacacagcgaggccttgggtcagagccttgatgaggatgggggtggccgtcctgggggcagcaggccggagcctgcgcttgcctgcattccccggcaggatttttctctcggcctcctgggtcggcatctccttggtgcagggtggagtccgctccccaatccctgggcttaagggaaggggagggggagtctgacacacagtgggtaggggcccgggtgcccctagaagtggccaagttcagacctagcccaggccaggctaaagccagctcagcacaccctcctctccattgccgtcccttccacgggtcacttggcgggaggtccactctgtcgctgccagaagttcccagggctccccattacactcccaaagtccaaagcccccagtctgggacagtgggtggggggccaggccctacacagcaggcatggcagccaggagggaggtttctgaggctcagcctgtggggcctgtggcgcctgtggccacggggtggtttgtctcgctcagagtggtgatgagcctgacccgggccctcagcaagtttctgcggggcaggagggacgtgctgaggctgagctcggaagaggcaactctgggtgcagttgagcctctgggctggtgtcgttgagctccgccgcagccctgggagtggcagaggcagggagggcgcccatgttggggttgtgatgggggaagtcctgctcagcgggctgacgtcccgttcttggtctgtctcatgggtgaggccctgtcccccgtctgcagatgccccgccagtcaggcccctgcacatgacaggcatccggctcaggtgcgtgggtggtaagcctcttctgtgggaaggatgctgcgtgctagggtgggcctgggcttatggcacgggtgtggaggggattcttggaaagccggcaccagctggagagggtccccactgccagccttgggtgctgagcaggtgctctgtccttcaggggttccctgcctggactctgtccaccgcgtggccccggtggccatgccctgcctattctaagcaccggtgcccccatctgcaaatggtgctgctcagcgggccgtgggaagactggggatgtcccccagagaggccggccccatgccaggccccaggacatgcctgggggagcatcctctgccctgatcatttcagagtccccgactgaaccatcgtgttggcctctggcatggagctggccacgctccaccacaggtgggacctgaggaactgcaggggtgttcctgagccaggtggccgtgcacatgaaggtggagacgagagccgccctgagggtggaaagcctggccgttccacgacagagctgctggcagcggtggcagggcctctgagccaccgagagcaacatggctcaaaatgaaacaagaatcatttcttttcctgttgaagggaaactacccccaggagcccacaggctgggggccccctcgccacacaggcgggctgtggggcaggcggggtttctccaggaattcccctgcttcccactcaccctcctcgaaggtctggccctgtggtggtgctagacacagttcaggggtacggcctggaagggaggctgcgctgcccaggagcccctgcctggccctggagaggtgagcattctgccaagtccccgagctggtacccgtcctccaaggtgggcgtcattgctggaactctcagggctcatgggtgtctgctgtgtctggccaccctggtggtcgaggggtggccaaggggtggaccgaggcttcagaaagccaggcctccaggcgttgacccggcagctcttgttccgggcttggaaacatctcgcctccttgagccctggttcctcccctgcaggacgggggcaggaggagcggctcccccttgtcaccacacttctgtgagctcatgtaatgaaatgttggcctggcgtgcacctgcagttaggtgtttgagctgtggtagctgcggcctacggcagctcttctaccacatgatggagtctgtgtgtttgcagggggccgtgacagtcacctggcttggtgcagtgtgcagggcaagccccggtgtcagagcctccattttgcagagggggagggtgggaaggacgtcacatgcaggcgattggggctcccagcttcctggtggccccacgcctttggtcacgccctttccgtgactccgcttctttccacggggactctgccaggactggggcttgactcccgccctcccaccctcctagcctctgccccaggcagcagatgggtggtctgctcacgatgccccggggggaatggccgtacaggggcacaggtcagcttaccgagtgtctccggccttgtggctggaaagcagctctcaggactctccggggccccttggcatctttctaggtgggtggccctgagcccacctcctccctgtacccccatggcaggagctcctttttgggaaccagtggagcgagcgtggctggacaggcctggccccagagctgtgcgatttccatcacggctctcctctggcttcctccttggcgctggctgggccaagccctcctgacttctgggtccctgggatgggtgggtgactccgtccatgaggctacctgaattctcgcttaccctagccatctttaggctgggggatgtgggtgcttcctggtaaaatcagatgccctgtagctctcctaaaagggccagcctcagatttgcggtacctggtcctggcccctgggttcaggacttcattttggccgtgcgggttgcaccttggggatgggcgtcccttgaggtttgtgccagtcgtgggagtggaggagtagcggctgcgttgggaacccgtccctgggcaggcactctgggatggggctccgagtcccacagtcactggccggtcattgccagcccctcagccctctagggacagaccctgcctgctcgtccctgttaggggccagttctgcaggtggttacttggcttcttcttaaaaaaaaaaaaacccatcctgccctgggaaacccgggaatcatggggaagcgggaaatgacagtagggaattgacatttcctgagccagcgtctggggcatcggaccaagtgcagggcgagctgggcagggaggggtgcagccggctctgccgtcagcctaaagccatgagcgacctgggcgctcttctccctgtagcactggggcacacacagggtggtgaagggggcatgacacaaccaggaggctgggtcacagaggaccaggggtctgtcaagagtttggcctgcacctcccagctgcctggcccaggtgtgcccctcctgtccacatctgcctctaagctgtgaagaatttgggagtggatgctgctctggggctgtttcctcttctgaaccatggtggttcaggcagcctggtcccaggttaagtgtgccccttagcgcctggggcatccctggacaatggccgccatgggcatctggcagccctgccagcgtggtgggtgatcatagcaacggctgcaagactcggggaaggtggtgcgtgcatatctggttgaatgtagctgggcctggtgtgaggcctgtggccgcagctcccatggtgggcttctcaggggagtaggcatggcagggtggggttcctgcaaaaaccctagccctcatgccccagttagtgagtgtcttcacctctcagctctgtcttgaatgctttcctgggtgcaggcactgactgctcatggggagccccctcctgagcaccctcttcctcctgtgtgtgcttcccacttccctcactgtggctgggctgcagctgtacctgccaccactgggtctaaccccagcgcccctgggctgtatgagtgggctgtgcaagggtggccatcagcctcggcaccacttcctattcttccttctgccgctggccagtcctcaacttgctcagtatggccaagaggacccaaaacaccatccccttgctatttatgacaaaacttgtcaacctctctgtctaggcttcagcctgccatctgcacagtggagcagggcaaggggttgctcagctggtagtgatggtgacggtggtggtggtggtgatgatgatgtaatgatggtgttgatgatgttggtgatggtggtggtgatggtggtggtgatggtgatggtggtggtgatgatgttgatggtagtcgtggcagtgatgatggtgatggtggtggtgatggtgatgttaatgttgatgtgatcatggtattgatggtagtggtgatggtggtgatgtacatggtggtggtgacggtnnnnnnnnnnnnnnnnnnnnnnnnnnnnnnnnnnnnnnnnnnnnnnnnnnnnnnnnnnnnnnnnnnnnnnnnnnnnnnnnnnnnnnnnnnnnnnnnnnnnnnnnnnnnnnnnnnnnnnnnnnnnnnnnnnnnnnnnnnnnnnnnnnnnnnnnnnnnnnnnnnnnnnnnnnnnnnnnnnnnnnnnnnnnntgctttaagctgagttttataatcaagtagtggttttcctgccgaggccctttgggtgttgatggagcctgtctccatgaagggccactgcctgtgccctgggagtttgaggtcagtcaagactgaagggtgtttggttggtgtctcctgactgaggcttggagaaggtcaaggtgtgtgggtcactcttcctcattctcatgccctggcagctcgcggaggtctctgggggaggcccgggcagggtctcataggtctgggttgcagatctacccctgcctttggatcccctgcggactgagctgcctggccagctgcacttgcacgctacgtgcctcaggggccagaggcctcaggcagcacccctggtcccctcatcttgacatcacgccccctcactaccctgcgtctcccagtctccccttgtgccagcccctgatcttgcactggggaaactggacaaggtccccaccatgggggcctcttgggctgggagggcagaggtgtgagaggcaatgtcagggggccccatggagctcaaggagggagaggccagtgtttggctcctcctgggtgagcggatagggagtcaagaccctgctttctctgcatttgtgcaggggtggtgataataaaagtgggtttggcattcagagtccttgagggtctcttggtcacgtggaacctgggggaccaaactcacagaggcagaggccggacaggagtccagagcctgaccgacctggcctggctgggctctgtcctgaggctgggacaccgtgggctctcagggaagcatcagtcccctctcagtcctggcaggagcctgtctgtgctggctctgcaaccccggtcactccgaactcccacatgtccatggggctggcaggactgtggcgttgtgtctggtgcagacccagatttctgtccctcccttggcggagtcccgcctggcctcaccgtggcttcctgtgtccaccgctgcttccttctcaccctttccctcctggcccactggccggccatggggggctgatcatggaagggcccgtctcactgggcccttggggcatctctgcatgtgtcacggaaggttgggtagggcagggctagggagcaggctggtcagggctctgtgtggggccggcagtccttagggccacttcctgggggttttgtgagcagttgcgggctgcagtgaaggagatggacaccttggtgtgccaggccccatcctcctttctcctccagagtctgggtggttctggggcacccctggctcagagcaggggcctgagtgtccatgttcccgcaggtgggtgacttcataggcctggccgaggtggggggctggacctccccatggggccccttggcattgccttcagggagctccatcatccgaccctgctttggggccctcaggctcctgtggaggcaggcctgggtctctccaaactattcaggagggccaatctggcctgtcctcagatggggctgagatttagggccagggtgttggttggggaaagggcagggtaacctcagaagagctgaaattccagcctgggccacctgagctgtaagctgacacttggcctggaggccgctagcgggccatgctcctggggctggaggtgacaggcccgagtctttgcctgcccctgcggggaggcgggaaacagatgtgcagcaggtacagagagcccaccccgccgagggcccgtagggcccatctttaacaacctctgctgttggcatgcccattttacagaaggggagactaaggctcatctaggctaaggggttgcctagggtctctccgtcagggagtggtgggtcttgtgggcccaagggtgagcagaagcccattctcaccatggccggcatctcctgggttgggcatggctgcccgccccaccctagttcctcagggcccctcaccctctggggcttgtggccacttccttcctcttcctcctacactaaccaccttcagcttcccccaaaccttgacgcgccgtggtccctgccacgtcctcatccctgtccccgccagcgctgcccttctccctcccctgggaggccaggggaagcagtacttccggaggtgggggctggaggtgggtgatccaggaagctctgagggcctgctagctgcttgcaacggggtttcagttccgggcgggggggtccccaggcaggtggcatagggttgcagggacgttgcagggaccgggagcaggcaggctcaggaccagctctcatctgggtgctggtttacccagtgggcttcctcatcgcaggccgagctcctccctcctcctgggcaccctgcctttcctttgcaccatcctggattccccaccgtggagcccacgggaccctaccccaagctcccccatttagaacgccgtccttccctccgctgggcttcctggggcgccagattggatggtccgggtgtcctctgtttttcatctagacaggtgacctgatcactcggccccagcctgtggcctgctcagaccctgccgcgattggccctgcagattccaaagggatgtggggactttgagttcccctctccaagggccggaggttccctagctgcccaggagggggctggagtcctgagggctcacccccgcccccaccacagtcagactggcatttcctgccaccttctctgcctcccccgcctgccaggcagaggccggaagggagttggtgggggttccccaggcttcctgctctggggtccagggagcagaagcatcctggcactggtgagcgttctggagggaactgtgcagctcaggaactttggtcaacagggtgtcccttccctcttccagcagaccctctggggtgtgagtgtccctggggtcctgagtggtgcctgcatacacctggggtggcaattcaccgtctcgcggagcagcctgtgccgtcactgggcagcagtcaggacaagaacattccttacttcaatgttactaaacctgccgcttagcccccgacactcaggatctgccatctgggggcccagggagctgctctgtgcctgccctgggtgctggcattccggggcattcatctctggtacaaggcttttgctcccggcctccaggtatctgcactttagagtcagttttgtgccaagggagtgatcactccaccacttcttctgtgcagtcttcctggatagaaatctagtagctgtgagaggcgccttggggctactgggcactgcccctgccgggatcagggcctgctttctgctcttccgtttagccctggaggtccctgagttcttcctgagctcctcctcgcctggggttcggagtcacactgattgcctgtggtccctaagtgggcacggtgggtgtaaggggtgtgagggtctgggattgtggggccctgtatggctcaggttctgaggttcccagatcccgccattcagttttgccactcaggcccctctgccgctcccttgtgtggggagggctgtgtgtctgctggctcccgggttgggtctgagtgtctgaggctgtccctgtggtttgggggtgaacctggagggccacggaagtcagtgaagaccagctggtaacaagtgcccctgcaagtccaaagtaggatttttttattttttattttttttttgaggcagagtttcgcttttgtcacccaggctggagtgcgatggcgcgatctctgcttactgcaacctccgcctcccaggttcaagcgattctcctgtctcagcctcccaagtagctggaattacaggcgtgcaccaccatgcccagctaatttttgtatttttggtagagatggggttttgccatgttggccaggctggtcttgaattcctgacctcaggtgatccacccacctcagcctcccaaagttgtgggattacaggtgtgagccaccccgcccggccccaaagtaggatgttttaagaataacgcctatggtagccaccacttaatcaggggtggggacggataaatgacctggaagagacagagcccacacgcacgtggacggggccctttgctgtgagtagaggatgtcgaggcattttttgcctcttcttttttaatgtcctcttcctggccaaaaagcatctctctctagaggattccagaaaacacacccagcctattgtcacccaggctctgggaaggtgtctgctatggacggagtctgtgtaaacaggaagggctgggagcggggcccaggggcagctggcttaaataattcagctcctgaggtgccctggaaggctgtcccagaaaccctccagtcccctcctccaactcagtgtccccctgactccccagtcttcccagattacatctggagcagggggtgggtggagaagctgaaagaatccaggagtgtcttctcccatggccttaaaattcccatcttcttcccagaggccaggaagaaaggtgggcggccttcccaggggtgcctagggcctcagatcaggccattccaaggcccggcttctgaatgcagtgctgaggtttgggctccctgcatggcccggcctcctcccaggtgctcccagggctacctggtggagatggctgcaaagccaatttgtgcacagtcatgctttcttgtcccttctgccttgaagtcagcacagtgtttccctggattggcttggataaggagggcccagccctggtccaggctcagtctgtgtggatttggggctgagcagaacttgctgctgagtacgcgtgcctgtctgcatttcacagatgaggaaactgaggcttggtaaaggaagaagctggctcaggtttcctccggcaggggtcagctgaaggtgggtgaggtggggctgtgatgaggcagccatgtggcattcccagggtccccgcagtgccctggtgggcatggttgcctggcctaggggcagctgcaggtttctgggagtgtgcctttggggcagttctcatcacacaccttctctatgcctcagtttccctgtctgtcacaggctggtggtggtagcttctccaagagttgcaggaatcagtaacatcaggttatgcaggtatttcatagactcgtgagcagcctgattttgtgtttgtctgtcttggacacactcttttgcctgctttgtcttgtcagctcctagctgttctctccctggccttctgcacctggggattctggatgtggagacctctgggctgcatgtgtttgatatctacatgtgggtcctgcctgtcctcctcccaggagttgaatgaccaatagggctggtttgcagtacctgtcttagccagtaggtgccaccaacatctggttctggaattccttaagtctgcatttttagttcaatgaaatggcttattcccaatattgtgaatgatgaaggtttccagtgggtcagacaaggctcatttgctggtggggtctgtaccccgactgcgatggggcactagtggcagccaggcccctgcagtgctggctgaatctgagcagtgctggctgaatcagggcagtgctggcttccaggcctcctttctgcaccttcctccctgggagaggaagcaagagggggtgtgtggagcaggcctgaggctgctggacaagaatgggcaaatgctcctgagcagaggtgggcacagggtggcagaacctctgtgttcctgctgcctctgagctggccttggccaggtgctgggggcagcagagctgtgtgaggtaagaagagtgctggctttggatggggtcaggagtggcccgagtttccacgctgccgagtggtggtggcatcctaaagctcatgccatgtcttcctgagatgcagggtgcacaggaggcagatgcccatgagaggcctggcccagggcttcctcccgctctagcctggcacccagcgagtgagccagtgccctggacacagctgctctgaggcttggggaggtgaagtcttcctggggctggggaggggtggagccaggggtgtcccctgacctggggcatgtgggctcagtcatagccactctatgtgttcatggtcctgctcgactccccagaagtgcctgtgattgccacaggtcaaggcacggagggcctgagagccattctgcagatgggaaggctgaggcccagagagggagagtggcttgccccgtgtgcccagcccgtcggagatagggtgggggcaggcaggcagtgcctccagctcccggcacttgctgccgtctgtgctgccttgggtgggctccgacatttcccagtggtctgctcaggcccatgggcagtggattcgccacctgggagcctcccttctgcagtgccagcctccagggtgcggggcaggggggcacctcctgaagtgtggttggggctttgaaatctctgatttcaaaggcgggagtgtgggaggtcccagcctctcctgcggccctatgggctgccctcttgttcctggcacacaccaaggccttgcacaaagccacccagcagcgtccagcccaccgcccacgtgagaggtgccccattccacccatctggtcccctcaaacagacctcagagcatggagctaggggcctgagcgtccggtgcccgggcgaccactgctgtggcacctgagcaggtccaggcagtgtggcctgctggttagggccacagacatgggagtgggtcagcaggcgccgccagtcctggcttggccacaggtggctctgagtactcagggcctggcttcccgcatctgtaaaatgggagaatcatggtgctcactgctgacctcccaaatccacgaatttacccacgctcagaactgaccaggtcctggtacacggcaggtgctcggcgacatcagcctttctgcctttcatgattattcccagaccttcaccttgagtccctgtggagatgggcagaggggctgactagtcccggccaccagccactcctcccactgctttcccaggtggacgggcctggagtgctgagggttggagcgacccaggcgggcatcctggggctcattcacagcgggttcttcctgcgtctgccgcaggcccagcctaaagccggggtcaggcgcagaacagtaccttggaggggagctctgggcacacctggcccgtagtgagtgtgaatttgcgtcagagagctgtcgagacccacggggccaccttgagggtgccggggtcttcccgcaggtgcgtgcatctgtagctggggggagcaggcatttggtggggcctggagtcacctgcactgaccactctcctgcggcttcttgtcttgcagatttctccacccaggtgaactcctccctcacctccccgacggggcgaggctccatggctgccccctcgctgcacccgtccctggggcctggcatcggctccccgggacagctgcattctcccatcagcaccctgagctcccccatcaacggcatgggcccgcctttctcggtcatcagctcccccatgggcccccactccatgtcggtgcccaccacacccaccctgggcttcagcactggcagcccccaggtgagtgcggggctggggcaaggggagggggtagggcctggggtggggctgtggcttcaactgcaggacgaccgcctcatcttgaggcctctgggaggtaggtgctgtggtctccccgcttgacgcagagtatacagagcctcggggagcagagtgccgtgggggtttgagcccaggtggggctgactgctgagcctgggcctttggatcatcagccgaggtgacttgcagctggttatctgcccacgtggccccttcccatgccggagggctcgggactccctgttcccatgactggggggctcagcagagagaggctgtggcctccctcaggcctaagcctgcttccccaaaagcttgtgcccacacagcctgggtcctcccctgaagtctctgcttacacccaggccaaagggcccccagggaaggcgtgttcgggctcagggcagctgcgtcccctctcagggatgccggccctgggacctgcagtggccaggtgtggcagcggtgctctgtggtctcggctcccccacggctctgtgggcgcctggccgtctgtggggcgtggggaccttttccacagttgaggtttgctcagtcgcttctccagctcagcctggccctttgggctgtttctggatcaggaagggctggtgcctggcagagcctggcgcagtccaggtcttgtcatggagaacttggggacctggtccgtgctccccttcttccttggagaagacaccccgagtagtgtctcttgtggagttgttcccagccctggggtgtccggtctgtgagggtggagggcgaggctgggcctcgtcccctggctcccggtggttgcttgtggatttccacctggccggccggaacctcccagactcccactaggccctccctctccaggggctcctcacatgagcaggggtgctccttccgctctgaatttctgtgtttgggtttcaccctgtgttcctagtagctgaaggctccatggcagagttttggtccatctcaggacagcccacccgggtgggactcgccctaggagctcctctgcccacacacagctgacagcaccagatgtgtcctgtggactcccaaaccccctgctgccctgcctcagtttacctagggcaggcactaggcccaagggattgcatgtgagggggccaggaggcagcaggtggacacctagtcccaagcccccatgccatctcccgggtagtccaggactgctcctgacctaggactgggctgtagttggggtctggagccggcctgctgcccatccacctggccctgtttagagctggccttgacctcccgagctccttttccctggagaatcttgctggctttctgggccaaccccatcaaagcccctctgctttgggggatgtgtgcagaagaactggggcctctgctccgtgtccccctcatatcacctggccttccgaaagcaggcagcaggcccaaggtgctggcacgagggaggcctggtcatgttatttttagcacaccagccctgcccctgctcttgttggcagcatggtgccctgtggcgagagggcaatgaagactcggcttccgcctgtcccttggctgactggctggcacctgctgggtcccagggccccaggatgccccttgctgggtcctcccaggtctgccgcctgtcctggacacccaggggtctagtgcacagtaggttaccccctgcgggtggcagtggtgctcccagaatcctcaggggtgcctggtgtcctccgcactgttgagctcttctcggggaggggatgggcagcactaggggaggaggcttttcagggctgcttctgggccattctctgttgcttcctgtgcagccaggctcctggcacaaagtagggacttgttgaagccaagttgcttgggagtgagtggtgcaggtccccttgacattggcgaggtccccggggtgggtgtgggtgaggagcagacgcgggttgccccagacgttccctgcccggccgctgttggcgtcggtctgccgttgggctgtgggtctcacccgcagttagtttgccgtggtctgaggcccatgcttgacttggccctggttccccagaacccatagctccttccctgggggttgagtccagctttgaggcctcagcagtttgtcttggaaccctggggttcctcacattcatgggagtgtgagcagggtttcaggagggatgtgcccccactcctagccccaaaaccacaaccgcaaagtcagagtcgctggagccagagagattctctgacttctgctgctgttggggagggccaggcactctgccaaatgctgccttctgccttctcaagtccatggccaggaagggccttccatgtggcggcgtccaggccactcgcccctcctggtgggggaataggagtctgggggggcttgggtagacccaggccagaccgcagctgcctggcccctgagctgtcccaaatctcttccctggtctgcaggctgtactcccagagcaggcccgggggacattccccacagtgtcccagagccttcctggctgcagccggctcacctgggcgcgttgcaggtattggtggagtgagttggtgccagcttccacacagcacttctgagtgcccggcatggagctggacttggtgtcaaggcctctgagctctagcaaagcctcctggtgggagggcctgcccagggcctgtggggctgtgatgtgtgcacagggagtgtggacgcgaggctgagcgggcttcacggggtcggaagcagggcagcacaggcgcctacccgccagggactgaggtcggaggggagtgtgcagaggagctggtttgctcctgcctcgatggacagatgaggtccagcaaggtccaggggcctgctcctggcgcagagtgggcctttcccaagtcggggctggtggagagacccttcaggggctcaggaaggaagggtgtggtgggtgtgaggagagagccaagagacgggcaggagacctgggtggggcatcgaggcggcgggaactgaaataagtgccaaggatctgaaaggggaaatgcgatggcccccaccctggccacgcgtggagtcctgaggctccagcgaagcaacaatggcagcctggctctcctgggagcgggagcagggagtgtgggaggagaccctggatagctggggggctgtggagcccactgggggagggacagaccaaggcagacccccggggcggccctgtgctgtgctccgggggctgtgagccaacccgaggcccagcagcctggggctggaagggcggaagaacgcccgcctggcctccccatcctggcacagccttgcttctgtagcctggaccgtcctccaggtgagcccaaagaagcaaggtgggtggccccagggcctgcagcctggatgggcacctcagcccgggctccactcttctcagatgtgcagaggctcaccgggccctgggctcactgggctagccagaccctctgatatcactgaggtctgggggagccagggatgcaggctaagttcagcgcgggagctggcttggccctgacactgagagggagggggaccgtctgccattctgtcctgcctggagtccctttcccggccagggctgctctggtgctccctcagtttacccagggcaggtgctaggcccaagggactgcacatggagggccgggaggcagcaggtggatccctacccacccgaggtggtttgggacagcctagaaagaggaagtgcgtgagttcctttcctttgtgcttccgagcaacctggacctgcagagtcatggcctgtgctcctccagcctctggcccaaggggctcctgctcacacgcctcggtgcctccccagtgctagggcacaaagcgagggtgcccgacacttcctgcttgtggatgcctttgctgcccctgctctgacctgatccccgccctggctgtacctacttctttccttttttcaaacaagccctttgcttccccacctctgaacactggcttgggggcccctgtgcctgggacacccctttcttcctcccaggccctggcccatctcctccaggaagcttgagtgctcactgcagccaccggcctccctgtaagacagtgagttgtctgcgagctctgctctgagccctggcacatggagcgactcagttacacttaatcagctcttagaggcactggctgggcatggtggctcaacgcctgtaatcccagcactttgggaggccgaggcgggaggattgcttgagcctaggagttggagacaagcctgggcaacatagttgagaccccaccactagaaaaaaaaaaaatagcggagtgcagtggcatggacttgtaatcccagctactcaggaggctgaagcaggaggatcaattgggcctggaagtttgaggctgcagtgactgtgattgtgccactgtcctccagcctgggcaacagagtgagaccctgtttcggaaaaaaaaaaaaaaaaaaaagagaaaagaagtaggcactaacatggttccagttttgccgacgaggaaactcaggctcacagtgattaaatcattttccgaatgtcacacgagaacgtaggaggcaggcagaatccggagccagggatccgcctctggggcctccagtgcctccaagcgagacagccactagaccagcgagccctggagggctgggcagggccttgtcccctggtgcctcccggagcccagcacggggcagggccagctgggcacttagtttggacgagctctgtccctccaggggcttcactttcgccttctgcagcgtgggggatcatgtgtgaccttggccagcccctgacctccctgagccgcagcctctgcatctgggacacccagggtttcccatgcagggagtgtcaagtgtgggtgcaaagcccaggcaccgcacccctctgcagacgtctggggctttctcttgccccttcagttccctcccttctctgagaagcgcacctgctgcctgtggacatgaacactgggcatttggtgagtcacacagtggccacccggttctccagtgggagcttcatggcacccccactgtgctgagttgtcacgggggacctcctggcctctcgcagcccacctgagtcctgcagggaccaagcatccttgtaaagcctcacagcccacctgggcagatcgaggaagaacctagaagccagaacaagctggggctggaagactcattccaggcaccgaggtccatgtgaaaggaggctttgcggtggtttctgctttgcttgcattgagcctcaaactcttcctgtcccgtgagaaggggggatgggatttggaggcctgaggaaggaaggaggggagcttcctgcgcacaagcggcggcaggggtttgcagaagtggaggctgggggctgcctggccaagcgcttaccgccctgcgcagccgggctggctggcaggctgcagcgggaagcgcctgtgggtcctcggcgctgactgcagagctgggtggaggcagcggaaccaaaactgctgtgtcactgcacgctgcagctgttgccagggtgaccgggtgagtttcccacgcttgcccgggcggcagcgtgcgggccggcgggtggggcggaggggtgtgcagagaggccagtggtgtcgtgccacccgatgcccgggggtgtccactcccctctcctgggtcacgtgaccagggcccctgccctgcggtgttgtggggtgtatgtgtggttcttgggggggtccccagccctcctccgtcctgggaactgggcttcggcgtcctcatgtgtgggttgggaccccccagagtgcctgcctcatggagtgtccgggggcacccagcggggctgggcactgccaggggctcagtaatgagaggcagctctcatttaggtgggcagcgggcagggggttgcaagcagggaccgcccatgtgttggggggggtgttgaaggtccttttccacagaggcctggggtctgctgcgggcgagtcctgaggttgccacagcctctgctggccttgctgagcaagcacagtggccccgctgctccggagcagcgtggcgggtggggggcacggccctctctagcctcggtgtctgtgtgtgaagttgggggtacagctgcgccatccttgctgcagggccgtgggggacatagggaaaaacctggtgtacaccccgctgactgctgtggttgccccccccagctcagctcacctatgaaccccgtcagcagcagcgaggacatcaagccccccctgggcctcaatggcgtcctcaaggtccccgcccacccctcaggaaacatggcttccttcaccaagcacatctgcgccatctgcggggaccgctcctcaggtaccgctgctgtgggggccaggggctggtgggacagggttgtcaggccattgcagggtctggaggcctccccaaatcaccctcctgtgggccaagcaggacccaaggccagggtgcagggaggcaggtgcctgggccatgccccactcccagggctccgcgaggccattccagggttctcacgtctgtgggacagtgagtgttgggtggggtggggcacagggcagcctgaggcttccggagaggaggtggctgctgatggcaaggtcagcatgggggcagccagtgctgcgcctcctcccttggctgggtctgggcaaggggcccgtgttgtgccactgacccccaacggcctgagagggaagaacgggctgcacagtgcagacacagagcaggtgacttgcctggggccctggtccctggtgggctgggatttgtccctgccccactcctaagctgtcctcggaggagcagagagagtgaggctggggcccagtctgagcccaggcaggggtctggagaccagcaggtccctttctgaggcctggcccgccagctggtagtggcggcgttggatggggggtgggctccctgccggggcggtgggtgctccccagccctgctctgccctgtcccgcaggcaagcactatggagtgtacagctgcgaggggtgcaagggcttcttcaagcggacggtgcgcaaggacctgacctacacctgccgcgacaacaaggactgcctgattgacaagcggcagcggaaccggtgccagtactgccgctaccagaagtgcctggccatgggcatgaagcgggaaggtaggccacggcgtcgggtgggggcgcgggcaggtgttggacaaacagtggggcccgggcttgtgcgtggacacccgagatggacaacagggagtgagtggcctggacagaagcatggcaaggccaaggcaggagtgggggcggggcccagcgcgtgggcacacgtgcggcccagagcgtgggcacacatgggtcctgggcggcatgttctggctggcgttggctgtccggtgaggggatggtcaaggagaccctcaggtggcactgcttaggttggagaggtggagcgggggcatcttctgagctgttggatgccaggggtggtcccgggccagcttcctcccgaggccaactctgtggcaccccgcagggccgccggatggcccccaggctcttggagcagttcctcctttccttttgtttttgtgctcgtcttattaacaaatctgtgtcggggcggtttgcagggaagtccctcccccgatgtcaccaaaattgtcaagtcatccagccagacctgggtcggagtcccgggccccacaggcactgtgacttcccagtcctggctggctgtagtcctcagtttccccatctgtcacatcccctttccctctcaggtttggcgattcctggcctcttagtgggtccctgggtcatggtttgcacacacgtttgggggtgtgcctcagttcctcccatcgggtcccgtgccctgggccttgtggaggtgggaggtgctgtctggggtgaagatctgttggtctgtccctgtccccccgctctgcaggacacccttcctctgtcctctgctgtgctgctcctgaggcccaacacctgtgtggctggtgtgtcttacttcctccccgccagcccctggtggggtccccaaacaggacccacgccactgtctcaccgtcagggatgtcctgagtggccaccttggtgctgcagtttcatttcatcatctctcttgtgtatgtcttctcagccttaacggtcctgttgagaaatcagagcctctgccaggcgccgtgctcctggagggtgtcctccttgggctgcgaggctgagtgtggtgtatgggctggtgtgaggtccttgtgcctgcatagcagagctgccttccagagctggtgtggccatgcccagtgctgccagtcaggcctttctgatggggattcgtgtttcatggagtgctgacgtttgctcaggcccaccctgtgctgtgcaggttgggaaaccgagggcagacggttcaagccttgcgcagggtcacatgctgggccctggcccccatccagaccttgttgctttcaccagagggcagaggagcatgtgcccagcctggagaggtgtgtgcccagcctggagaggtgtgtacccagcctggagaggtgtggacccagtctggttcttccgggtgcctggtgtgggcagggaggcttgctgtggtggcaggtgcagccttgtccctggaagatggaaactgggacaggggcaggcatagtaggcagtggccggggcccctgtgcccaggcgtggagactggcctgttctggggtggaggcccgaggcgtggctggagctggggggggaaggcctcgtgtgcagccttagcctggcagtctctgtgaggatgccacagcacagagagcttggtttagctgagaccactctcagatcctgggggcttcagggagacccctgcgagcttgggggcagatgagagcgctgtgcatggctgatgcctggcctgggcctgcagcagtaagctcgctgtcctttgaaagtgatcatcagataaccagggggggcccagggggcagccagtgcaggcttaggggaagctcaggcactgtgggagcccagaggaggcacctgaccctgcctcgggcacccggtgagacgcaggcaggcaggagggctgttgacgcctgaggaatgaaaaggtgtcggcaccacaggcctggctgcagggagcagtgtccgtgaagtctgaggctgtcatcacacctggccctcggaagtcggtgatggcctttctgagccccgtcccggaccctccaggctgcactgactccttcctaaggccctgcagcccagtcatccatgtgcctgggatcatcagactccagctgcctgggccccccaaagcctggggacgacaccccatcccatcccagtggaaccgtgcagtgttggggctggggggcctggaatcacctggtcagaccgctcccctggtgcccatcggtgactgggtcctgttaggagcagctcatgtgggggaccaccctggacacccccttcctgatccccacacatggtctcactcgccccatacctgtgagacagagaaatggggtatagagaggtgagccgtggggaggtctaagggccagcaccaggcgtggcccccatttcttgccggtccttcctgcttccagtccttcctcttggcagcgcataagccctggagaccagacttagggccgtgagagaaactgctgctgctgtcaagggacctcctcccctttgcctccagcaggattctgaggcgtgaacttgcagtcagaatgctgccgagcgctctcgccccaaacacagctgcagaactcagcctcggtgtggagggcacctctgcgtgggcggtgaggaggcagtgaggcccccgtgccaaacgtgccctgctgccagtgcctctccttgtgcacagggggagtctcttgcctcccccagcctggctgtgtgggctgcacagccaggcctgtggagctccttactcttgggcagtaacggggcccctggtgcagcccaggcactcgccctgcagggaccccacgtggaaacggtggctgggagggcttggcaggcaccctcctccccggcctgcgtctgggtgctgggcaagaccccttggctccagatgggtcctgaagtgcagagcactcccctctctcctcttgggcaaaccactgcaaggcaggctccccgacagcggagggcagggctgttggctgcatgggtgaggcattgcagcagccctggagaaagctatggggccaagttggccaacactaggtgcctgtggcccagagcatgcaggatgggagctgtcggctctggggactgagccctcctaagtgtcaggccccctggcgggcagctccgcccactggccttggtgtcaagtggtccctcggcccggtttgtgatcagacccctagaaacaggctggagctgaggcgtcgcatcccagtgcagtgctgcgagggagtcgcctggggttggtcccagggctggctgaaggcaggatggcccaggtgcccccatgcggtgactctgcccccggcaaaggcccactctggctctggggcagatgggttcccacccctatgcggtaggataccacaggctgatagcatctcaggttgggcaatggggcctgcacgcgcaggcagccaccaggagggactcgttccgcagcattcccgggaccaggggtgggcagaggtggggggacgtgcagtggtgggtgttggccctctgccaagctgagcctgggcctgtttgctgaagccggggagggggcaggggttgggggtcccgcagggacacgtgctctgatggggaagacaggcctcacccttgggggttcccagtccgatggaaaagacctagcttccacccagggtcgtcgggggagacattggtctagagggggcagtggctgtcccccattctgcttcctcctcctccctcaggaaggctgcttcccatttccttcctgcctgcctttgcttcctgtgcccaccctccagctctgaaggactgggtgtggaaacagcagggtctggcgtgtgtgcacctatgtgtgcacgtgtgtgcatgtgcgtgcactgcagggatgtggctgacccacaggtctctgctgtgggaagggagccctggctgggctcgagtgtggccctcttgccttctggcctgtgaactgggcaagtgaccttgcctcgcccagtcctcaggttcctcatctgtgatgggctgggggcatcaggaagacccctgcgagcttgggggtggatgagagtgctgtgcgtggctggtggtggggttggagagcagtggtcacgtgtgggtgtgggtgtggtatgtctgtgtggtgtatgggtgtgcgtgtggtgtgtgtgtgatatgtctgtggtgtggtatgtgtggtgtggtatgtctctgtgtgtctgtgtgtgtatgtctgcatggtttgtgtgcacgtgtgtgtgcatggttctcgtgttctgatgccttgctctaggttgaagccctggagggaaggtaagtcactccctttagagactctagcttgctgtgtggcctctggcgctgctctctgggtctctgtctccccacccttaagaggaggccagaatggtttggtggagttcggtcctgcctgtcttgggcccagccctgggctgcacaagggacggaggaaggactcagccattgccactacccaagccagaggagccagtgggcctggggatgcccctcggctccgacatgcctgcctcggagctgtctgcccttccccagaccccctccctcctgcttgaccctgaggggctgtggcaggtcagagatgtcctttgcttctgaggggctgctgcaccctgagtcctaggccagcttgtctctgggggcctgggaccccagtgatgctggggagggtccgcctgggcaggagtctcaggtcttcctgggaggactgggctgcggtgtgtgagtctcctctgcctccgagcagcctcccccgtgcctccactctgcctcctccagccgccacgctctggtctggagggtaaagaggctctgtgtttacagacacctcccgcccggcctccggcgccagcggaacatgagtcaagcatgacttcgtctagaaggtgattgtgctggcaaagcataaatcccggcccctcctgccccccagcctataaataaagcgatcatatttataatgatgctgggcagagctgccaggcccttcacagcttcaaagtgcttcacaaaacactcgctaattaattctcggctgccctggcggaggaggcaggtgccaaggagcccagctccaggcacctggggagaactggcagcaaggcccctcgctcagggccacccttgtctggggctccccatgccctggggctacctctgagcaggagaaaatccctggcaccgggccgggctggcgcgtggggtgggaggctccggtgacagctctgagcacctccaggccccccgtgtgctggcgcttcctcttggagccatcctgggggtgggcgctgtcattttcatcttacggatgagggagccgaggcacagagaggtcaggggacttggccggggccacacggctgcttgggctgtggcaggctagcaggctctgtggggctggggttgtcggatcccagggcctgcagctttaggctgctcactgtcttgagcgctcagccctgcccctttggctctcagagcctcagcttccccactgggaagacagcagtgccagctatgtcttggcactgagactttagaattctgcccttgctgcccatccttagggtctcagggacctgggccagtggaggtgccgtacccctcagctcagatgctggctgagatctgcgtgtgcgggggcttcctgccccgggggctgctcagcgtgggtggggtcggctctataggctcaggaccctgtatggagggtcgtgtcagtagtgaccccgccccggatgagcaccgccctctggagggctcatggaagtcccatgtgggggctgaccggagccttctgcagcctctgccagacccttgccatttgcccaccagccctgctccccatcctgcccccacccaccatcaggtttccagtagggccaggcctgtgcatgccgactgcggggtccctggctggctcctctgcctggttggtgtatcctgaagctggggatgggcctccccgcctgagtctccctgtgtgggcggaagtccctcgctcaagccagtgggccatgcaggaaactgttggcacagggtggctgagaggcatccacgtggggctgttacagagctgtggtggcatgaagggaatcagggcaggactggggaccctgggcctgggggtgtgaagggaggggcttgcagagccccgagacggctgctcagtgggagctgtagcttcaggagaaagtggcggctgacaccgtggcgggtaggggcagggagggtgccacaggcacagatatgttctcccaccgtttgccaaacccatctggaagccagagggtgggagggtgggatgggacatggtcagtccatgggtggctggtgcctgtgagtaccccaggtgttctgcccaccatcgagacatcctagaggggctgggatgagccccgccacaggcccagagaggtggcagcttcaggaacccctctgccaggccatacccttgggcccttaggagggcaccatcctaggcctcagaccaggaggagaaggggcctgggtcagggactacccagcccagcacactggcaggagggcacaagggagggaggaactggccccaggtccatgtctgagctcggaggagatacggtgggaagggcatttccagggcgagagtggagaggccttgactggagtaggggcgtggagctgtgctggacagaggtggccgcaggaccccatggtcgctgttgcttttctggctctgcggtttactcacttagaccagtcattttctctctcagccatagttttctcaccggtacaatggggtaatgtgagtgcccgccctgtggggcggtgttggggttgttgggtggtggatggaacagaaggaggtggtggggttggggaccagagccccagctcaggactttcagggaaggggacgtgtctcgggggaaccgcccataagccaagtggactcttctatccaaattccatctgggtcctagcctgtcccccggcacttgggatccccagataggctgacagaggggctgaggtggcttcctcagtgttcaaagtggacagtcgaggaaggcaaatccaggtggaggtaagctgggggcgggaggagcctcatgcgcctgggcagccagggctcatgcctcaggcccctttgctgagcgcccacccccagggctgatgagagtcagctgaccggagcccatgcctggtgcagatcctgctgcctgcaagcattgctctattttgtcataatgctcggcttctggttccccccgagtggctgcttcctgggacagattgaaaggcatctcggtgccctgcatggggcatggtcggtggagctgggtgggccgtctctgtgtggccagggtggggccgggcgcctgccctccatttctggcagggcccagtgtccttgggaggggcgtggggtctgcaggtgcacggtttcctgcttgcccaggtgtctctgagcctgtccctcccccgccccccgccgcaggttccccttgcccaggccctcagccagcacgggtgcccctgtgctgcctcatgagcgtgctctgctctgcttctgggcctttgcagggatcgtgtctccagcctgagccatgattcctctgcaacctcctcttccagtcacattgacacctcttccaggaaggcttcctggttctccctgagtccatagaccgtcaggacctttctcgccccatgttggggtccctgctgcactgtctccttccaggccccaggcaggctcctggtgtgaacattgattggaattaatgagagttggcctctgttctcagagcacacaaccacacggaggccaggcctggggcagagatggggtctccatcacccagtgctggtggggatgctggtgttgtgggtgagttggctgggagctggcaccacccggccaggacagccttccctgggagccactggccgggctgagcgtggggctcacctgcgcctcccgggttgtagccgtgcaggaggagcggcagcgtggcaaggaccggaacgagaatgaggtggagtcgaccagcagcgccaacgaggacatgccggtggagaggatcctggaggctgagctggccgtggagcccaagaccgagacctacgtggaggcaaacatggggctgaaccccagctcggtgagttgcagcctgtgcaggggtgggcagcctcacatgcctcagtttccctcactcactcaccctcccacctgagcagctgatgagccagagaggtcctgggggctgccctgggccctgtggctgcctcagctcggcctcttacctgaggtgaccccgtgggcccctcgccccagctgggcggcactctcctctcctggcccatgcacgagtagcccatggggcaggggccaggggccaggggcccggggcctggggccctgcggccacatcatcatcctcggccacctctgctggggcctcagccgccgtgtcccctcggagtttggcctgtctcggtgcagaggctgtccctgctccccggtgccacttggaaaaggtatgggaggaggccgagcccccagcaagaggctctgcaggttggttccagggctggctctgccagcagccgtgtggccctgggcaggtgcctggcagtcgcggtggctgctgttgatacaggaagcagctctgcagccccccagctggtcacccccatgctgaccctcctgccccctcccaccccaacagcctcaaggggaggaggattgggtgggccgcagccctggtcccgggctcttctcctgggctggctccagctggtcctggaggtgttggattcaagaccccctggcctcgccctcctctccttggaccctccctgttactggctcgctccctgtggcatctttgcttctggctgtggccttgccagggagggcagcacaggggcgttctgagcccctcctaccctaccctaaggcctaggaacctgtgctgctcgggaaccattgctccctggtgagcttgtctggctgggagaccccacctgtcccaggccccactgagggggtggctccagctgtgcccggggttgggcaggtgagctcctggccacccgtgtgaaggttcaggactgtgcagtaagcttcctgctgctggggacctgggtccagctggccctcagggcccatgtgtcttttgccatggtcaccatggtgtccagtcttcatctgtgtctccgtgtgggtttggggctgggaccagagccctgtggccaccgaagaccttatacaggccgaccatgaggttgccccaacctctgtccctctgtgggcccaggcacaccagcctgccctccgtgctgggtgcgccctgcaggtcactgtctccccaacccccagggccttcgtgcttgcagctcacgtggcctggaactgggccctctggctcttccccaggctttggtctcagctgaggtacctccggccttcatctgtgcccctgccagggtggggactgcccctgtgatgtgggctgagagcacctgatcttttctctgtggcccctggcactggccaccacagggtgaggtgtgttcacagggtaaggtgtgtggtgggttaatttctgcccccacgaggctgctggtgatggctgtgctgctcctcaccaccagcttcggtcaaggacagcgaccccaccctgctcgttggcactcacacaaggccggcatccccactgcctctgcctgtctgagggtgggggtctgctcttgtctgaggccccgtggctgggtcagggccaccctgcttccctgccctttctggataggacaacctggtgcccccacgtccccggctctgctcagacctctactctggctgggggctggggctgcccagcttgggggaagatgaatgggaccccgacagcaggcaccgttctttccggagaaaccctccccttgagtgacaggcacagacccacccccagccctggctggtctgcacgcatgccctgccctgctcccgcctcaccagcctcgcggagggcaggggagggagggtggctgtgagggtttcatgatccagcagaaaatccaaaagcaagtttggcagatgcacaaagggctgccaagtttttatttcgtgaaggacattatttgggggggaatctgccatctgctgtctccgccactgcctgaaagttcagggagtttagaaccacagaggcaggcagggctcgctggggataaaggacacgtcttccacggggagggggtctctctgtgcccgctcactccctgctctgtctcatctcacactgaacgctcctctgtggactggcctgggtccaacttccagaaccgctcactgggccccttctctcagatgggcaaactgaagtccagagagggggcgacctgcccagcgtcacggtcctggtgcctggtttctccccagcgcggggcagggcctgggcgggtcctgtggacacttctaggcaggagtagagcccatcacacgcctactgttacatgaggcacgttggatctccaggcgagaatgggaggctcacagaggttaatcctttccccaggccacacagggaggtggagccaggatcctgcactatccctccctacctaggggaccccctccaggcctagccctgctggtactggagcgagagcctcacacctgccgggagtgtgcctcctcctccgctccggcctcctggctctccagcctgccacattctgctccctgtggccggctgtgcacactgcaggcacatgacagatggtgacccgtgtgcccactcctgcagaggtcccagccagcccaggagggcttgaggctctccttcctacccatggcaccagcctgtcacctgggcctgctctgggccccgtcttggcttccgagagtggccggctagtggctgggaagttcctgggtacaaggatccccagcagagccactgctgcagacacggtgctcggggctggttcccatatccccccgcccctgccaggcctgcttcatcctttctcagggataccctgcagccgatgggcaggcgagaaggatgggcccctttcagcccccagcgtgacagaaggagaggctgaggctaagaagccagcctggctgtggcaggcctggggggcgctgtgcacagatccgggagccctgtgagtgctgggggctgtggctgctgctgatggaaggtttgtggaggaatgagtgagtctgtgtagactgtggtcaaccccactcagccgagggatcccacccctgtgtataccccttctggctcgggcccccaagggctgccctgccctcttccgagggtcctggcgagtctctgtgccattcctcgggggccttctcactccgccctcagaggcctttcccgccgggcgctgcgtttaggctgcacgtctctgatgagcagatggttgctgttggtggaagctcttcaaagggaggcatttttctccttggcagatgccctgaagtgagggatccccgaatcctattcacagtcgttattcctgcagcggcaccactgagggggccgtcatctgagttcccattgctcaggacacagaaggtccgtgacccaagccccacctgccaggagctgaggaggggcctcccctcctgccctgttcaaggctgcctgggtcccctcatctgtgagactgaatggcccccttccggctaggactttccaaaggagccgtgaatgctgctctctctgtgcctggggcctggtatctcagccgaggctcctgccctcctgagctcccacatccatgcctgatggaacgtgagaggccagccctgtccccagcgtgggccaccttggccatcagagatgaaggtggttggtcccaccctgctccagtgctgcccatatccagtttcgtcagctcgccgcacctgccttccagagctgtgggagagactcgtgcgtcctgctgtaacccagtggctggaaacaacacacattttattatatgactgttctgtggccagagagccaaaagcagtcttgccgggctgacatcaaggtgcctgccggctggctcctggaggctctgctggggagtctgccctggcctctgcttctggcacattccttggcttgtggcctcttcctccaccttcaaacccagcagtgtctctctccccttgggccccagcgtctgtgatctcatctcttcctctgaccctcctgcctccctctcatagaccccttgcaatgaccctgggtccccccagtggtgcaggcttacctcccaatatcaggccacacctaatcacctctgccaagccccatgtgccatgcaaggtcgcatagtcccaggttctggggattggggcctgggcatctttgggggccgtattcagcgtcctgcatgggcccagcgtgtggcagggcctggtctgggctgtgtttggtcagtacactggcttctgggactgaatgtcctgctcttcttcctccactgcagccgaacgaccctgtcaccaacatttgccaagcagccgacaaacagcttttcaccctggtggagtgggccaagcggatcccacacttctcagagctgcccctggacgaccaggtcatcctgctgcgggcaggtgagtggcgaggcctaggtggggatggggatgccatgcagatgggacacgtaccaggacactcccccctcccgggatactccgcactcccgggacactcccctgtcctgggacactcccccctcccaggacccactcctacctcccgggacactcccctctcctgggacacactcctacctcccgggacactcccccttcccggaacacactcccccctccctggatgctcccatctcccaggacgctcccctctcccaggacgctcccctctcccaggacactcccgactcctgggacacacttctacctcccgggacactccccactcctgggacacacttccccctcctgggacacacttccccctcctgggacacacttccccctccagggacacacttccccctcctgggacatactccccactcctgggatgctcccatctcccaggacgctccccgctcccaggacacactcctacttcctgggacgctcccctttcccgggacactccccactcctgggacactaccccctcccgggacacactccccgctaccgggacactcccccctcccgggacactcccccgtcccgtgacattccactctccctggacgctcccctctccctagacactccctactcccgggacacactccctgctaccgggacactcccccctcccaggacactcccctctcccgggacactccccccttccgggacactcccccctcctgggacagtccccactcccgggacactcccctctcccgggacactccccgctcccaggacgctccccactcccgggacactcccctctccccggacactccccactccccggacactccccactcccgggacactcccccgtcctgggacctcctatgtactctatgggactgttgggggaagggcctggggcctcagtttccctccatccctcataaggaggtgtaccatgcggggtctctcagtggccttcagagaggtaatgggctgtcggtggaggtttgggggctctggagagggaggctggctgtgttccaggggctgcccaggagagccacgtgctctctgcccttctcctcccactccaaggccgcagctctctttccatgcggtaatggtggtgcacagagccactgcacagaaatgcctgctccacgcgcatcacactccccgtgatgccatgcggcggccaggacggtggctgggagctcagctttggggttttggggtcaggttggcagtggaagcctggatggggcaggccccccgcaaagctggtcccccacctggaaagggggtgtgaggggcgtgctgactggggctggttcttgccgagtcagccggggtagctgtgaggccaggctgttagtggagtttcctgctggtgaagcaacacgttgggtgcccaggtctgccctcactgcccgacgatggtgctggtcactgtcccatgtccccctgggcccaagaagccaagctcccttagggccgggtgtcccagctgcctagaggcccgctaccgcactgtgggctccgccgcctcagcccgactggggagcctcagcccatacaaggcggctcctaagtggcaagtggagaagacacagccagagacgggctccctgtgaagcagggaatgttctggaagttgcttgggtcagggctgtgaccacacaggctgtgtgtatagggcctggcgccgtcgccaccctcctggaaggactcttctggccatactgggccccgccggaggagccaggataatctcccatctcaaagtccttgacttaatcccgctggcctcgtgtctggtgggtccttgcccctctgggcctgaggcatgtggctgtctgccgttgcgggctcagacttctttcagggtatggtgagtattccgcctgccaagggaaccctgcccttgtttgcaggggctcccccagaaccctcggttcagagcccctggctttgccagctgcaggcctgcctgaccccagtggtccttggagagatagccaaggcttttgctgagagagggcggtgctcccaccccaccccaacccaccagaccgatccagagaacagctggccgcacgcagctcttttcctggggatcccagatggttgtgcgctgggggcctggcggaggtccgagtcgggttggatggctgtgtccgtcgccatgtttgtgtggtgcctggccctgtggtcccatgttctggcagcttctggctccagcctcagcctgtgtggggtgttcgtggtggagtgcggtgctgagggcctgcgtggggtggtcgtggtggagtgcagtgctgaggttagagggtttctgtggctgtccctcttaggtgggcacctgcctgtggtctccctgcagctgtcaggtgggggctccccgcaaggcccttcccttagcccagagccctggtgccatgagtccccaggcccttctaggatgcctggaaagccatcccgtggcatctctgcgagggtggcctctgctcctgcccagcggctctttccgggagatctctgcggctgcatgtctctgagtgggactcccagcctgacctccccctgggcgcccactgaggtccttgctgacctgtctccagtgggccctgctcatgcatgcttctggcttcgagggccgcatggtgaggtctgaagctgcatttccggcatgagtcccagccccactacccacgagcagctgaccttggctgagtcacttactctctgtgcctcagtgtccttgtgtgttctgtctgccggggccagcagctcacccatcaggtggtctccccaagccccagtaaggtccactgaagcacacgtccaattcagatgtggaacactggagtttgaagcctgcactggccaggtggctggagaggacctgggttaactccaaggatacactgtgcctggctggtgttggctgaaggactctgtccccctccagggggctcaggtcaggatccatggctgtagcctgactggggaccaggggtgatcctgctgggttttcttctggcaggaggcagtggcagaggtgaggccccgcccagctccggcaggtgccagggccactgagtgctcccccattatgtccctgtgctaggccctcccactgtgttcccagtgctggtgggggaggtcacttccgctgggcgacagcaacgatgggaatgggtgcccagacctgcaattcccaccatcgtgagagccattggccatgcaggttcaaggcccaaggtctctgctcactccggggagtgtccacctgtggctcgcggtgacactgagtgggggtgcagtggccacagccctgcaggggcccagaaactggtggaggattccagccaggctgtgggaggttgatgtcacacgtgtctgctcctgtggggtagggccccttccttggggtgggctgctgccctacccgtccaggaggccttcagaaataaagcattaaaatgaagagttttggcttgttccatggaagctctgggtcacaccctgacccttgtgtttgtcagatgagtaaactgagacagggccgggtcgctcacagctttcaggtttctccgtccaacctccttcccacctgcccccttcatcccaggctgttgctttccaaggccgtgttagctgctccagcggggtcgtctgagggcctgggttgcacaggcacctcctgcgtggcggcagggtggnnnnnnnnnnnnnnnnnnnnnnnnnnnnnnnnnnnnnnnnnnnnngagggagggagggaggggccaggcttaggtagcaggcccaaggtccccctgtggggacagcacaccactttactcccctggtcttgttaatcctgcccacatctctggccccagaacacagggtaagccaggctgggctcttgtcactgccgccctgggacgggatccccatcacaagccccatggggacagcagccgtgactctgggggggccctgccctgccttgtgagtgtggactcatttaactctccagaccaccaggagtcggtgttattactgtcccttgtgctgcggaagtggtggctcagaggtgagacaggaacgtggctgagccaggttggagcccgaggccccagcttccccacctgacccttgactctgtgctgttccttccggaagcgctgtccaggggtcctgcaaccccagcagaggccctgagcgtttgggcagggccacgagggatctgcaggagtaagttccttgggaagggccagcctcttgagttggaggacatagtgaccaagggagcagccccaggcaagactctttgtcctgcgcttggagcctggagtaagacctggtatcctctgcatcactgaggtcctccttctgaaaggccagcgcaccctgagccgtttaaagctgtgtccgtgccgggcccccacatcacagggccaggagccctccttcctgcagcgatggagcacttaggaaggtgaagataccccaaaggttactgtaaagtgggttcctctcctatttttctcttacatccgagaaggaggagggcagcttacaaaggtgtgtggggcaggagaggagaaataaccgagtgaggacatcggggtggagggacaggggacaggggagctgagatgcagccggcgtgccggagggtgcagagagagactccgcactgttctgtccgtgtgtctgggctcctgacctgtatcccgtgctgagggccgcacctcggctcagcagcgccttctgaccccagccgtgcactaggcccctctgctgggcacaccagagtttcagaggcgagtctaccctggtgcctgctgggtggcctcaggggctctcggggcagtgggaggggaggtggccactgctcaggtaaacccccaggcctgcaggatgtgagggagagaggcaggcccgagaggccaggactggccagggatggtgggtttggggccagttgtgccccagcccagatcttgtcctcggccccctgggtccctgcccttggccacaggaagtctgtccacactgggcctggtgtgggaagggagggagagccctttcctaggagagcatttgctctcactggatgtcagacccagtgcctctcagcctgggaaaacctgacgggctgagccgtaggaggggcaggagtgggagtgggcccggggctcctgtccaagtctctgtgtgatttggggcaaacccttcccctccctgggccacagattacccacatgtcagattgagggggcctcttctagattagacttctcccaaatgtgatgctacagatgtttcattgggcaaaaacaaaaaaaaaaaaaagagggttctgtggtcaaagaaaatctggctgggcagtgtggaagctgttttcgcggctggctcggctgagccctgggatgccactgcatgctgcggccttggttgtgtttcctaaacccccgccccgggggaccccactcttcttactccccatcgcaacgggctgcctgctgccacctggcagggagaggggatgcatgacaggcggggaggtgccagtcccgagtctgtgacggtatttccagccctggcttttccatcagaccgcccgtggtgccgtctgcatgctcccacggtgatggggcacagaccccaccgttcctccctcattttggttgcacagcctggggccagttgggtgccatccctgcctggtctgtcagcacacctgggcggggcggcctcgggggtgggaactccctcctggggccctgggattactcagttgtgaaatggggagaatggggacggtgacacctgcccccgggttccccatgacagggtgggtatgtgctgggagggtgtggagggccgagccggagctggcacggtggtccccaccaacttcttgctgatcacttaccccctcatgcctcagtttccccctctgtaaaacaaagttaatgccagttttccaggattacagttgggattaagtgggaaattaatgacagtgtcggccatagaggctggagcctctagagcgctcagggagtgtggaaggtgctgaaggtgactgtgtgactgcaggtgactccatgtcaccctgtctataagagctgttaaaacagcagtgcgtgtgtgcgcgagggtccctgactgtgtgactgcaggtgattccacgtcacccggtctccaggagcccttaaaacagcagtgcgtgtgcacgcgagggtccctgtttcttcctccccgatgcctgctctgcttcatctgcactggaacctcatgttgaggggctgctgttacctaactgtctgccccccaggaacccccactatgttgagaggctgctgttacctaaccacccgccccagggaacccccactgtgttgaggggctgctgttacctaaccacctgacccccagggaacccccactatgttgaggggctgctgttacctaactgtcccccagggaaccccctgatgttgaggggctgctgttacctaactgtctgccccccagggaacccccactatgttgagaggctgctgttacctaaccacccgccccagggaacccccactatgttgaggggctgctgttacctaaccacccaccccccagggaaccccccgatgttgaggggctgctgttacctaaccacccgccccagggaacccccactatgttgaggggctgctgttacctaaccacccgccccagggaacccccactatgttgaggggctgctgttacctaaccttcccccctgggaatccccccgaaagaggctgcggctctcacgcacctgccttcagttggataacctgctgtttggtggcattccacgaagggcacacagatccccgagagtcctgggaccctgctggcagcagtggttctggggccatcctgggaacatccctgggtgctctcccacgtgctccgtggcaggagtgtcctgcacacgcgggaggaagcttctggggcacatgagtttgtgagctcccgggttccacaaagctcaagggactttgtgtgggacttctcagggcctttcgtgtgccggtgtgtactgtagaacgggcattctcaggaacctcttttctgtggaacacttcatgggattggggttccagagcctgtcaggatgggtctgtgacatgctgcctctgtagggtcccaccaggggctggggaaggggcgagccccgtggggcctggagacagctgagtgactgtgtgcctcctccccaggctggaatgagctgctcatcgcctccttctcccaccgctccatcgccgtgaaggacgggatcctcctggccaccgggctgcacgtccaccggaacagcgcccacagcgcaggggtgggcgccatctttgacaggtgggggtggtcccgggaggggcgagggcgcttcggtcacctccgccaccaggccagctgagttcagccgccttggccccggtgcacatcctgcctagtattatttcagtgcatgaagggtgcacacatggaaaaagagaaaagcatgaggaggaggctcagagccctgtgccagccctgcctctggggcatctgtaaccacagggagcacttggcctatctccctccatctcttcttttttcacgatcccatgtatttatccgtgggaaggaaagcttcgtttctttttaaagtgattataccgtagatgcagttttgtaaaagtgtcaattccagttggcatgtcgcaggctgcttgaggctggcacggtaatgccgtggcagcccggggcgtggtgcggcctaacgcctgtccccgtgcaggcaggggtgtcgggaccgcagtgcttcacacctcccagtggagcaaagggctgcacctcagccacttctcaggggacacactggaggagcagcactggctggagggcccaccctcgtccgggcctgggtggtccgtgtccgttcatgttgccctcctggagtgctggccaactccgctctgccaggcgaggcggacagtagcttccttgtccctgtctctgcacagcctttttttttttgagatggagtctcgctctgtcgcccaggctagattgcagtggtgcaatcttggctcactgcaagctccgcctcccgggttcacaccattctcctgcctcagcctcccgagtagctggaactacaggcgcccgccaccacgcccggctattttttttgtatttttagtagagacggggtttcaccgtgttagccaggatggtctcgatctcctgacctcgtgatccgcccacctcggcctcccaaagtgctgggattacaggcgtgagccgccgcgcccggcctctctgcacagtctttctccacgagtctagagagccacacacaccagactgggccttctggggaccggatgtcagcttcagctggagcgggaaggctggggaggggcactgcggggtcccttgggcaggggtctgcaacacaggagccgtgggtggggaggagcaggccacctggagaacgtggcccctgaacacgagagccccaacgttagaggtgagtagaggccatgcaccggcacttacagggggattaatgccccagcagcaatgccccagggggtggttcaggtcccagagtcccaagggtgatcctggaacttgacctccatgggatgtgccaagtgcaaaagggtttgtggccgcagacggtgggcaaacggtagttcaaacagtgtccttgagggtctttgccgcaggacttgtcagggcctttaagaagttagtgtacaggagggtcccacgggggctgcagggtgcagtgtgcagtgtgtattgcccacagaagcttctttagaggggtactggggatatggctttgggaagcgaagccccagccacttgcccagctgacagatcctttgtctggctggtagagagatggcgatgacagaggtttcagggttacattctctggggtcccacagcagtgactacagaggccccggcatttcctcgccttttttgcgagtggaatgcaaagtctgccctcagtggcccaggtcttttccatgcccgctgccccatccctctgcagctgtgtgctcctgcctcagagcagacatcgggggtccctcccagctcctgttctgtcccaccctgttctccagcctccttcagatcttcttccaggaatcaaccagggcactccccattctgcagaccctcagggccgcccttggcccacaggggagagcccaggctccttaggcaaccatccccacctggtcacctcctttcccccgctgtggcccacccttacttcctggacacagcagttgagctttggggttggtgggcaggctgctgaggctagggggcccagtacactgcagaggctggtgtgattcagaatccagctgcagggctggggcagctgagtctgaatccaagaacgcccccagcgtctccatggagggagctggcgggctttccccgtgttgaggctggtggattttttttctctggtgacaagaagtagacatgcctccctctggcagcccccacccagggacaccaggccctggggaaaggtatcttcctggactgaagggagcggctggggctgtggcatgggaaggggctttgcctcaggtggtgctgggtccacagctgaggagggacagtggtgtgtctcactgggttcgggaggggtggactctgtgccctctgtgcagctgcggctcacctcagtttagctgtcacgaggcccctccttagcacctcggttcccagaataaagccccgcaggcagaccctagagggagaggagaggagcccaccctccgggcagggccaggcaggcctggcaggggcggcacctgggcctgggttccagcccactccctctcggggtgtctgggagtccttgccttggcttggcccatctcagcggccctcgggccacgccgggctctccagaggccttgggtatctggggtgtggccctggtgagggctgcgacctaactgggatggggtgtctgccctcctcctctgcagggtgctgacggagcttgtgtccaagatgcgggacatgcagatggacaagacggagctgggctgcctgcgcgccatcgtcctctttaaccctggtatggccttcctgccttgaggcttctggccccgttctctggtggggcagaggtgcctgggcctcctcctggctgtacttcttgcctctggctacatgtggggccaactcccaccctccttgagctcagtgtgcccccctcccagtgaaagtgtggccatgctgccttctgctcaccttgagggccagccaagggggcatggtccctgggcacagggggacccagcaaggcagttgtcatgaggggcttggtggtgccgtctgggctccgcggttcacagtgttcatcactgtgcgtcggaatccagactccgaaagtggccagctgtggttgtgaacttccggtgctgaagttcaggagtcccaagccctgcaggctggggatgggtcaggcctgccgggtgttccagaggggaccaacctcatccccaagcctcgggtccagggtgtttctggggctgggcccctgtggttgaggagagcagggcttggggctgtggggctggggctgggcacaggcctcctggccgacagtgcggcccttctccagcctctgggttctcggcttgaaaagcctcctaggtgctactccttcgcccaacaagtgctgacacgtgcctgtttgctcggtgccctgctggcatgggagggccccttcaagctgctggatagggcttgcctgcctagagcttggggtttagagggtcacgcccaccagcaggcacccccggcacgtgagggcaggagcacggttggtcgagggtgcgggccacttcctccgggagctgcaagttaggggccaggggagtgggaggcacggaggtggggtgggctggtggaggcagcccaggcagggccttgaaagtcttgctaagtttgggttttttcttggggccacagggagccaagtcctgaggggttccagccgggagggagctatgggtttctgtgtttggaaactcagctcattgcgtgataggggcaggtggctggggtgtggagggagaggtttggggctgctgtggggagctcacttgggctatggtggagggagtggagccctctcggctcctggccctgaccttctgaccttgccctttgtcagacctggctctgagggaccgggccgggatggagatgggcatcttcttgtggggagagcttgtttccagggtcattttatcacccaggctgtgcatccgggccgtaatcctgccagctcggaggctgagtcatgccacggcccggcccggcccgaggaatccccattcaggtcctgtgtggtctggttgctagagctggggcaccagcaggacctgggcaccggcttgcagggagggtgagattgtctggcacaagcagggtccaggcacaggcttgcagggaaagcgaagagaccagggcacaggcatgcagggagggcgaggagactggctggagcggaggcagctgggggagccaggtacgttgccaaggagcccaggacacaggccaaggtggcattcacagggggtccctgggccttgggggccaaggtggcattcacagggggtccctgggccttggaggttttggtggctgcaatcttagcctctctgtccactctaggctcttgagcccgggtcctgagctcaggactccgcaagcacaccgaggatgggtttccgcagggtctgggtactcctgggggcagcagcgctatctcccatccatgttatggggctgggacccaagggcagcagcagcatccattgtctctcccagttcccaaggcggctggaaggaaggcagcagatccctgacactttatcgatggggaaaccgagtctctggaggtcaaatagttgacccaaggtcacgtggctggcaagtggcagagctgagcctggacccagagcagcctggcctggccgtgggttccacagtcgtccccctgccaccaggctctgggggagcgggcggaggcatgtccagcggcatccctccaccacctgctctgcccatggtggggcagcctgggagaccccacacaagcctgggtcctgggggcaggtgcccgagacacgccccagctgagggttctgacctgtggcttcttcctttcagactccaaggggctctcgaacccggccgaggtggaggcgctgagggagaaggtctatgcgtccttggaggcctactgcaagcacaagtacccagagcagccgggaaggtgggtcccgccccgtcccacacacaccccagacccaggctcttgtctccagagcccccaccccctgcaaggccattttatgtgaatgagaaggtggcaccctccccaggcccagcccatgccagcaggtcctgagcaggcagcaggaggtcctccaggccagtgggctgtggcgggcacaccccacaggcccacgtcgtatccccactggaaggattaccttgcacctggcgcatagtaggtgcttctctttgttcagtagatagatgaaggctgtgcttcaccccccactgcgctcccctaccaagcagaaccaccagaggccaggcgacaccagcacatagtaggtacttcgcaagcatgtgtagaatggatggccagatgcccacacatactaaacactctctacaagtgtgtacggaataggcggtcacggcctgagcgtagcgctcatgtttcccccctgcccggctgtgggccctggaagggctggggctccctcatttctgagtccacagtgctgggtgcacagtaggtgtccaggaagagaaacgtttgtggatccctgcctgggattcaaagtcagcgctccagattctgcctcttctctctaaaggggcatctcctggcctcttgatcctcagactgtggggcggggagggggtcgggggaggtggggcccagcagacctcataggacacccaggccttcccgccaccagcacatacacagttaaccgtgtccccgctgcctgcccagccctcatctggcttggtttaaagtgaaacttcccggaggacgaggacaggagggggtggcaggcagcttgtttttcctggctttctgccctggcccatctcgccagctcagcagaaaacagcttgttctctggcccaactccagcctctgcgctgtttttgcctttaaaacaaggcctgtgaggcagccaaccacagagcttttccctgaaagaaagacttcgttaataattaatgaggtcctgcagcccctggaggggccgtgtggagagactcaggccgtgcacaggggccctgggcagacacggccagccggaagggacacctggttccgtccccatagcaccctgtcctcagcggcagctgctgccctcatgcctggccctgctatccctattcccagagccccagacttcccccctccctcccgcccccccactggtccctgccccaggaaactccccagggatgggccaggccctgaggaccaacccgtgctccctccctccccggccagccttctctgaccatgctgtgcccaatgccagcagagctatttctgaggaaggggtggccctggtctggggcccacagccctgcacaaggtgccgtgggaggcactcatggggtgctgatgctttatggaaagggtcttgcaccgttacacagctcccaagtcaggcctggctccacctgcagtgggggtgcagcctgactccccctcccccgcctgatgctctttgacttcttggttgcccaccatgtgccgggcctgttccctgcgactcaccagtgtgctcagcagccctttcccttacaagccccgcagtctcttgctgtgatggctgctgcagccagatgcattactgatactcacacccgctcccggctgtcatggcccacagtttttcattttttgagagacagtctggctgtgtcgcccaggctggagtgcagtgctgcgatcgtagctcattgcagcctcaacctcctgggctcaagcggtcctccctgcaggcatgcaccaccacgccttgctactgtttttctctttttcttttgtagagacagggtctcactgcgttgcccaggctggtctcgaactcctggcctcaagccatcctcccacctcggcctctcaaagtgctgagattacaagtgtgagccatcatgcccaactgcctgcaatttttaacttcttcacaaagagctattcagtctgccctagccagctgctgtctggcccctggcccttcatctccgtcctcagacccagggatctcccttcactctgtcctggctctgggttgccactgcctctgtttccttctagcctcccctccttccttctggaggcttggcataggcagattcagggctacagaccagcctcagaggggttggggtatcagacacagccccatccccagggaggcctccagtgccagggcagaactgcccatgccccttgcccagccctcaccagacctgttccctgcaggttcgctaagctcttgctccgcctgccggctctgcgctccatcgggctcaaatgcctggaacatctcttcttcttcaagctcatcggggacacacccattgacaccttccttatggagatgctggaggcgccgcaccaaatgacttaggcctgcgggcccatcctttgtgcccacccgttctggccaccctgcctggacgccagctgttcttctcagcctgagccctgtccctgcccttctctgcctggcctgtttggactttggggcacagcctgtcactgctctgcctaagagatgtgttgtcaccctccttatttctgttactacttgtctgtggcccagggcagtggctttcctgaggcagcagccttcgtggcaagaactagcgtgagcccagccaggcgcctccccaccgggctctcaggacaccctgccacaccccacggggcttgggcgactacagggtcttcgggccccagccctggagctgcaggagttgggaacggggcttttgtttccgttgctgtttatcgatgctggttttcagaattcctgtgtggccctcctgtctggagtgacatcttcatctgctctgaatactggtgcccagccagcccgtgacagcttccccctaatcaggaggggacagctgggggcgcaagctggtgtgtcatcagcaaagacctcagccgcctcggggatgagaggggactcgtggggcaagcaagctgccctgtgctctgagtgagggggaaggtagcccctttttccaaagataactcacagttttgccctcgagccaatgagaacatgagctgccctctgtgcaaggtttcggggccacctccaggctgcaggggcgggtcactcacccccctgttttctctctgccttggtgttctggtttcagactcccgactccccgttcagaccagagtgccccggcccctccccagcctgagtcttctccttgctctgcggggtgggctgagacttgtccttgtttcctgcagggctggccctggctcgggcagggtggggcatcaccacctcactggccttgctggaggcacagggctctgcggacctgcagccatctgtgaggcccgcggggatgggaggggaggagggtggcctgttggtttccctcagagggggcaggtggcctggagagagaggggctcaggaactgggagcctcgtgggtggggcagatgctccgcggcctggagtggctctgccggggcattggtgggacccctgctcaggccttctctctggctgccagttgtgtctaaaagactcttggaatctgagaacccggagtcgcagcgccctcgggcctgggccacacgcaggccctggtgggaccacccagcctggtattgtccacggacagcgttgttcacccagagccttacttgggagcctcactgaacgcctgctctggttgaaggtggggtgggggcggggcttggggcctccctggctcagcccagtgcggcctggcgctcctcccgcaggctctgcccccgggctccggtggtgcggggccctctcaggttgaactcgcctcttttgcactggaaggccctccctttggcctgagtacttttcccgttcacgcctcagtcccgtggacccagcctttgtcagtggcaggtgcctgaacagagggtggatgggggggataccggagggggtcttgtcttcccagccgcagtctaggaatgatgcgggggggtggacgccttctccatagtctttccccacctggagcaggggcttcctcagtggtgaggggagctgcctacaggttggaccgggaggcagtggcttggagaggcagctttccagccttggtggggaagaaagtgtccattctttgccttcctggagctcccagccagagctgagcttaggcacccgagtggagcctgcagctgagtctgtgcccgagacaggctgtcagagattccagaagcctctcctccccgccgccctccacccctgcctttcagcgttgtggatccctagaggtggccccctgcccgatccaccgtcctgaggcagagtgttgagcctcatacctgtaccaggtccccggccagctgggcccctcccaggcactgccaggaagccccagctgcccctggcgggtgtggtggaaatggcaggagggtgcaggtactcttggggccccagcggtgggagtgcaaaagacccaacgccaacacctggtgccttttgcagccagcgcccacccatccgtgcccggacccttgggaatgcccgcggctccagaggaaaaagcccagggacggggcctccgttgcggggggtcggctgcttcttgggaactttgtcgtttccggcgctggctggctggctggctgtaaagcactgaagccccccggccgccaacccctgaaagcagaacctggcctccctggccacagcagccttacccaccgctctacgtgtcccgggcacttcccgcagccttcccgtccctttctcatcggccttgtagttgtacagtgctgttggtttgaaaaggtgatgtgtggggagtgcggctcatcactgagtagagaggtagaatttctatttaaccagacctgtagtagtattaccaatccagttcaattaaggtgattttttgtaattattattattttggtgggacaatctttaattttctaaagatagcactaacatcagctcattagccacctgtgcctgtccccgccttggcccggctggatgaagcggcttccccgcagggcccccacttcccagtggctgcttcctggggacccagggcaccccggcaccttcaggcacgctcctcagctggtcacctcccggctttgccgttcagatggggctcctgaggctcaggagtgaagatgccacagagccgggctcccctaggctgcgtcgggcatgcttggaagctggcctgccaggaccttccaccctggggcctgtgtcagccgccggccctccgcaccctggaagcacacggcctctgggaaggacagccctgaccttcggttttccgagcacggtgtttcccaagaattctgggctggcggcctggtggcagtgctggagatgaccccgagcccctccccgtggggcacccaggagggccctgccggaatgtgcagcctgtgggtagtcggctggtgtccctgtcgtggagctggggtgcgtgatctggtgctcgtccacgcaggtgtgtggtgtaaacatgtatgtgctgtacagagagacgcgtgtggagagagccgcacaccagcgccacccaggaaaggcggagcggttaccagtgttttgtgtttatttttaatcaagacgtttcccctgttttcctataaatttgcttcgtgtaagcaagtacataaggaccctcctttggtgaaatccgggttcgaatgaatatctcaaggcaggagatgcatctattttaagatgctttggagcagacagctttagccgttcccaatccttagcaatgccttagctgggacgcatagctaatactttagagaggatgacagatccataaagagagtaaagataagagaaaatgtctaaagcatctggaaaggtaaaaaaaaaaaatctatttttgtacaaatgtaattttatccctcatgtatacttggatatggcggggggagggctgggactgtttcgtttctgcttctagagattgaggtgaaagcttcgtccgagaaacgccaggacagacgatggcagaggagagggctcctgtgacggcggcgaggcttgggaggaaaccgccgcaatgggggtgtcttccctcggggcaggagggtgggcctgaggctttcaagggttttcttccctttcgagtaatttttaaagccttgctctgttgtgtcctgttgccggctctggccttcctgtgactgactgtgaagtggcttctccgtacgattgtctctgaaacatcgtggccgcaggtgccagggtttgatggacagtagcattagaattgtggaaaaggaacacgcaaagggagaagtgtgagaggagaaacaaaatatgagcgtttaaaatacatcgccattcagttcgtttgttccgtgtggggacttttttgtttggagcgggagggcccgcgatcagcccccaccagcccaccctcctgtccaccctacctgccggtcctgtgcggcgaggctggcatcctctgtgggccatactcttgagagttctctccctgtccactgggctctgctgctcctccaaggggcagggggctggggcctccgtgagggcacctctcagcagccgtgggcactgggcctgtgggcgcctgcggagcacgagtgttcccacctgtccctccccaggctgcctaagcatccacgcctctgcagccacgctggcccagatgggcaggaggtgcacccagagggccaaggaacacacgatgtcacccagctgccccaataacaacaagttaatgatgccccatctgcattgtctcctgtgataaacgccctctgtctccatgctgtctggggctgggctgctcccggcctggtttggtcttcgtgcccagagccctctcatgcacctgtgtccagccaggcaccctccccgagaggcaccagacacactgaagatggggagtggggctctgaaggtccaggtcctgccctgtggtggtgggcagaggacagtgtggcctgtgcccagagctagggtggctcccgggtgagacttaaaatggaacggcctgccacctgaaaggcagggacttcctgatggcactcccctcatgagcacacacacattcacacacgtgcatactcaaacacgggcacggacacgctcacatggaccctcgcacccattcatacgcatgcaaacaccacgtgctcacacagatgctttggcatgcacacccatgcagaactgctcccgtgcacacacccatcgctgcccttgcacacacccatgcatgctcccatgcacacacacccatacaggctcagttgcacacacccatacacgctcccgtgcacacacccatacacgctttcatatgcacatacatccatattcccatgcacacacacccatacacgctcccatgcacacacacccatacatgctcccgtgcacacacacactcatgaacatacacacttgcactcagccctggaaggatcgacagaacagtgggggtcttgggtgcggggctgagccagcctcccttggtggagtcaggaccccacaccaacattctccctcttcctgggaacggcggctgtgcggctgtgctctgaaactctgggccactccctgggcccccaaccatggctgaatggtgggtgccacaggagtctcgactcactttgccatcttaggagcccccctgggtcccagctgcacatccaaaggatcctccctgggcttcacaccctcccctgccagggcctcggctctgcccactgagaccaacctgggcttctccagaggggtccaagtgtgaatggaccccgagggagggcggagtccttgaagtggccacccgcttcctctgtgtcggcacagccctctgccgacctggcttgctgagtctggcccacccatgttctctgcatataatcttgcacacatgaagcacgtgggccccttccgtggtctggaaaaggggtcggccctggggcttcgggagctgggatgtggcctccctgctgagaggcctcccatcctgctgcacatgtgcgcacatggctgagtgctgctgtgtgagacaccagcggttggaagctggctctgtgccctggtggccccctggactctgggcacagcctccacggacacccgtccttggggtgagagtgagccctcggagttctcaggccagagcgcagggacaaaaggggaaagctgaggtctgtggttgcaggacacggacccctcggggctctgggagaagcccaggaaggggaagcttcccgtaagttcccagggccttggtgcttgttttaataatggggcagggtgttactatgggacttcctggggtgagcgtggggggagtttggtgcccctccagggacacgaacaccaccccgtgctcccaccagccaggcagaaactccaggctgctggctggcgcggcatcgcaggacaacccagctttgggcctcccttcggcatttggttgccacggtgactcctgcccagggcagtccctctggaccagagatgctgggcttgataagttcttcaccgtcactctcaggcaacgacagcaagccagtgtgggctggaggtttgtgaactgagaggcaagggagggggcaggggctcaggcacctgcggtgggggcagggacacatggctcctggatgggcaccgctgagctccctgtgcttccgtccctgccatcagccagcagacagcatgatgggaggaagggcgcacgtggggaatggggcgcatcctgagagcacatcctgagagaacggggcagcccctgcactttgtgcaggcagtgcacactcagggcggaggaggggtcatcgctgtgcccaaggacagctgcacctgggtgaccagaggaggccagggaagtctcaggggcctcaggaggaaggggctggggcgtggagacatcgggaagggccacatagagccttcagcccagtcccctggattctcagatgggcacagccgccccctggcagggactcagacagcatcggggcgggcaggccattgagtctggcattttctacctgcctttctgcagcgagccccctctgtaaagatgcccggagggagcccgcagcccctgcagagctgtgtccccacacttcgcagaggccctgcgaggaaggagtttgcccaaagggaggccaaggcaggaccaggtcccatcccaccacctcggttatggagctgattaggaacccgagtgtccccaaggacagatgccccggcgcctgctgcggcgtgaagcagccctgccccctgctggcgacgctgggacagcgcgggtcctccagtcccttcttgctcctccaggcctgtgggtgccacagtggcttccggcagtggggttgattactgtgagtcagaatcacctgggcgctccgccacccagccatacccctgctcactgcagcaagcggtccagtcaggagccagcttcatcccagtttcaccaagatgcctcagcagtcagctgttcgggaagctgggcacacagccctactgggtgccaggtgggcttggcctgcagcaggagcagggtcagggaaggtgaggacagagcgccaaggagggaggggggcgggtcctgccctctctgagcctcagtttccccatctccccacctccaaagtgaggacaaactccccactttccagggctgttgtgaccagggccttggtcacccagaaaatgctttaggaggaagcagccacttcctcctttcttttggtgtgaagaggctctaatgcagggcatgggtggaggaggccaggccgactttgctccctgagcaaagggtggtgagcaggaatccttggagatttgacccggggtccacctctggacaagcacaggactgtaggcccaggttccagggcctgggatccaggaggtggcatcatggcttttgcccattatgggggatggggaaggtcaggtaccatggtgccctccaaggtgagcaacggagcctttgaggtccaagggcagggcagagacccctgtgtgggtcagtgggggcatttgggaagcacagagaggaggctcagtggtcttccttctttctcactccttcccccctccctccctccttccccttccctcctgctttccccctccctccttccttccctctccctccttccccctccctccttccccctccctccttccttccctcttctctttcttttcctccctacctccttccttccctcctccctacctacttgctccctccttcccctccctccttccttcccccttctccttccttctttcctacctccctccttcttttctccttccctcccccctctctccttccccctccctccctccttcctccctccttccctctggtggcaggtgcctgtaattctagctactcaggaggctgaggcacgagaatctcttgaacctgggaagcagaggttgcagtgagccaagatcttgccactgcactctagcctgggagacagagtgagactccatctcaaaaaacaaaacaaaacaaaacaaaaacaaaaaccacaaacaaacaaaaatgtgagaaggacatgagatttgggaggggccagggtttggctctgtgtccccacccaaaactcatgttgaattatgatcttccatgttggaggaggggcctgatgggaggggactggatcatgggagtgacttgccccttgctgttctcgtaatagtgagtgagttctcacgagatctggctgttcactctctctctctctcctgctgccatgtaggacgtgcctgctttccattcgtcttccaccacgattctaagtttcctgaggcctccccagccatgcctcctggacagcctgcagaaccgtgagccagttaaacctcttttctttataaattacccagtctcagactgttctttgtagcggagtgagaacggactgaaacagcacctgatcagcccttaggacagtcaaggtcatcaaagacaaggaaagtctgagaaactgtgacagccaaaaggagcctcaggagacacgatgactgaatgtcctgtcgcgacatagataaaggtgtatcagtgctggctcatgattgcaacaaaggtgctagactaacgtgagatgttagtgtgagcagagctaggcgtggggcatatgggaactgtagtatctttgcaactgttcggtacatctaaaagctattctaaaatttaaaaagctaattttaaaaactgaaagcagcatttatatatatgaaaaagttggctgaggtccctgtaatccctgcactttgagaagccgaggtgggcagattgcttgagcccaggagtttgagatcagcctgggcaatgtggagaaaccccatctccacggagaaaccccgtctccaccaaaaacccccacaaaaattagctgggcacagtggtacatgcctgtagtcccagctactcaaggctgagacaggaagatcacttgagcctgggaggtcaaggcagcagtgagctatggtcgccctgatgcactccagcctgggcaacagagcaagacactgtctcaaaaataaaaaagtcacagactgttgcctaagtccttatggaaaccaacctgcttactgaagacctatcgtgagacattccagcagttagaaataaggacctagcttttccagagcgattccacgcctttgctaatccccacagtcagatgtgctagtggagacacacagaatgggggaacggggttggtgatgggaggaggccaatggggtgactttttttttttttttaaacagagttttgctctgccacccaggctggagtgcagtggcacgatcttggcttactgtaacctccacttccagggttcaagtgattctcctgcctcagtctcctgagtagctgggattacaggcgcatgccaccatgcccagctttttttttttttttttgtattgttaatatagacaggatttcaccatgttggttaggctggtcttgaactcctgacttcaaatgatctgccagacttggcctcccaaagtgctgggattacaggcgtgagccaccacgcccggcccagtgaagtgacttttgaggctgactgcccccccaactccttccccctcgccccctcctacacttctaaggttggggtgcgagtcacttgaggatcctggcccaggtgtggagggggacgctgcttcccacagtgctcgctcacggcaggtaactgtggaagaaccgtagcccaggttcttcctggggggctggggggctgctggattccacctgagcaggcccaacacccacctgcccagcagcatcttctttgcaccactgcacggctgctgaacgcggccctcacgcccttctcacatctgcctggcccttaccggcgtagcaacgtccttcatctccaggggcttcatgttgtcctcccagcagctccgtgaaggaggaggggcaggggtgacaagcccaggttcacaaaggaagcagggctggagagagacgggtctcacaacctacacaacagtgtcaggactctcaggaagattgtctttgctggtcagcggtggccttgttcccacagagtgatcagagaggggctttccttaagggcttcaaagggaagccaggtgggcctgtagcacttccctgctctcctgctgcccgtcctggaaggagggaggcgcttttgggaagcttctcgctgggctcctctcgcccggcactcactggggtgcagctgtcggaagcagcatgtccaccctccagcacacacggcacatttgccaccgcaggcctgttccctggtagctgtcacagctggggaagctgaggctggtgcatgaccagcagtggtcaggagtgctgctctcacctgggagcaggaggaacacgtagaatctggagcagcaccctgagcgagtcaggtgcggagactcagtgccctatcacccagagggaggaggatgcggctggtggggcaccagggtgcttgggcccagctgtggggcttcctccaggctgagtggggtggcggtgggcaggggtttctctggagtcctggccctggacctgctgagctggtgatcactgttgcacatgcctgtgactcggtttcccctgtttggtgtgcccactgtctgtgggatgggcatgagaccatcacagggctgcttgtggcaagtctgcctccacagttcagctcttgcatttcagtctgaaaggtcccccaggctcagcctgtttgggagcagcctgtgtgcattggggtagggggaagcagaagtggggtcccagctcccagacactgcccacctggagaagccatggcctggcttccaggcccagtgccagtgaacacgccaggagttgtggttggaccagggcctcagcttgacacccggggagtatctcacccctctctggttcagactcttgctgttgcataaaaatcccccaagttcttggtcagtaagacctgggttagtggccccagggccaggggactgaagtaggggagctttcctaacagacaggcagggtttggggaagatttttcctttgttggaggttggatggggtgggggaggggagcaggaggacatgggctctgcagaccctctgtatctcaggtagtggccaggagccaagggccctgctggtggtgctggcctggaatccagtcctcggtctcttctgctctgcccctgcgagatataagtgtgggctctggagtcactcacgtcagctccctgctcgctcacccagagcctcagtttctgcccctgtggaatggggctaatcctagcaccttgcttgtggtgctgcctgagccaagacctgcagtggctcccctctggcatcactccaacactcagtgaggggcagctgggcgagactgagagcgagagaccttccaggtgccgggctttgcagcctcattggccttttctactaaggtcctttctctgggtgcccagggacgtgggtggcttgcacagaagccatgacaagtgtgtgggtctactgaggacccagctgcagtgaagggcctgggagaaccggaggtgcatgtgctcagggagtctaacccagctgtggggcagaatgtcacagggctggtagtgagagtggaaggtggggtcacctggactgcaggtgcctggggccagccaactgcagactgtccagggaatagagagccaaggtgtcagtgtcactggagggcatgtggtggcagggggccctgggtggggacacgtcaaaagggcaggacccaggaattttccagtaagtacaaacctagtgaactttgggtgcaacaaacaagctacttgagttacaaacaatatactttagagaaaagcaaacaatttgccaaaaaaccccaagtgaactaggagcaaatggaacatggattgagggggccatacagccatttgaccattctagttggtagcaggggctgctgacagcactgtgatgagaaggactctgaggctttgtctgggtgcagcagacacaggcttgatgggactgtcactgtgcagctgtgttcttcattgggtgagttggaaagcgagggtgtgggaaggcagacagcttaaaggtccaaggccagcagactttgttccactgtcctcctgaatttggaatttggtggtttctttctgttggacatgtcacccctcttggggctctagaaactccaccagtccctgaacacccaccctaccccaccccacccccgacacataggcagagaccttggttttgtttggagagttacaacagctgataaagctgggttgcaattttctgagtccccactgggtggcaacctctaattattccaagttttagggtttagaaaacgaaaataccttactgaagaaattcagtaaaacctatctttgccgctgaattatgtggatgacagcactgaattttgtcatgttcaaggaaggaggcatctcatggaccctttgtcttccctgcaaggggctctgtttccttggcatgcagggcaacacttgatgggaactgtggcaaaagcaacttccccagaggtcaggatgcttatgaaacctcatcacaacggaatatcctcagcttgctcccccagagaggccatgggagctgtatgcagggtcagccctacttgggtatctttagtatacacagagcgaggggaaaacatcctaaggtgcctccatcggctcaggacatagcggtccctggtgccgtggctgtcagcatccctatccaccacctgagggcagtgtcaccctgcagagtgcacccggcaaccaaactggtggcccctgctgactggctaagctctgatgtttccctggcaaccacctcccggctcctccctctcccatttgcccagccctggaacatgctgcttagtttgatttgcagatgctgcctttttgctctctgtccccatgcttaggggccaagatgctgccccagaatggaccgtggcgggctgtagaagcagggacggacccgcatatgaacatccctgattccgtcttagctgaagggtcctccttttcctccagtgcttgtgtttcccacatcctgctctggaaatgaagagcaaaatacagagaaggggctttcagggccaggagtgaaggcagagaactgtgtgatgcttctgcgattccccaggcagagcccctgcacccctccttgcctgctgcccatctcatgggctggggagagtgcccttcccctgcttgctgctgaggggagggaggggatgcagaacactgtggttcagaagcatggaagtgtggtgcctgggacatctgccctgattagtcccaggggagatttgtggtggtccttctggagcagaccttgtcaactacaaagcgactatgaattctaatgagttgaaccccactgggacacaactaagttgtccccagagactgcaggaagcctcaggagggtgccttctgaggtcaaaggaagacagaggggagaaagtggcatgcctggggcctgcttgtggtgcctggccttgaggctggtggatgcctgcatctggagctggagcccttggtcccagataagcatgtgaggaatcaagtcatggggaaggcagtgagtgtgggaggtggtggtggggttgccgatttggacagcatggcaggtggggcctccacgggaagccgacctgtcctagtccacttgggctgggtggctcacagacagcagcttattgctcatggtcctggaggctggaagtccaagatcaaggcacctgcggatttggtatctggcaagggcccattgctggttcagagctggctgcttctgtctgcatc

SEQ ID NO: 633 - DNA, 4916 bp, Homo sapiens
cttttgcaacaactcgccgcgccgcggcctccgcgcgccgccgccgccaccgcagccgccggctccccgccgcccgggcccgggccggccgcgccgggggccgccgcgcccgccgcccgctgcctgcgccgccggccgggcatgagttagtcgcagacatggacaccaaacatttcctgccgctcgatttctccacccaggtgaactcctccctcacctccccgacggggcgaggctccatggctgccccctcgctgcacccgtccctggggcctggcatcggctccccgggacagctgcattctcccatcagcaccctgagctcccccatcaacggcatgggcccgcctttctcggtcatcagctcccccatgggcccccactccatgtcggtgcccaccacacccaccctgggcttcagcactggcagcccccagctcagctcacctatgaaccccgtcagcagcagcgaggacatcaagccccccctgggcctcaatggcgtcctcaaggtccccgcccacccctcaggaaacatggcttccttcaccaagcacatctgcgccatctgcggggaccgctcctcaggcaagcactatggagtgtacagctgcgaggggtgcaagggcttcttcaagcggacggtgcgcaaggacctgacctacacctgccgcgacaacaaggactgcctgattgacaagcggcagcggaaccggtgccagtactgccgctaccagaagtgcctggccatgggcatgaagcgggaagccgtgcaggaggagcggcagcgtggcaaggaccggaacgagaatgaggtggagtcgaccagcagcgccaacgaggacatgccggtggagaggatcctggaggctgagctggccgtggagcccaagaccgagacctacgtggaggcaaacatggggctgaaccccagctcgccgaacgaccctgtcaccaacatttgccaagcagccgacaaacagcttttcaccctggtggagtgggccaagcggatcccacacttctcagagctgcccctggacgaccaggtcatcctgctgcgggcaggctggaatgagctgctcatcgcctccttctcccaccgctccatcgccgtgaaggacgggatcctcctggccaccgggctgcacgtccaccggaacagcgcccacagcgcaggggtgggcgccatctttgacagggtgctgacggagcttgtgtccaagatgcgggacatgcagatggacaagacggagctgggctgcctgcgcgccatcgtcctctttaaccctgactccaaggggctctcgaacccggccgaggtggaggcgctgagggagaaggtctatgcgtccttggaggcctactgcaagcacaagtacccagagcagccgggaaggttcgctaagctcttgctccgcctgccggctctgcgctccatcgggctcaaatgcctggaacatctcttcttcttcaagctcatcggggacacacccattgacaccttccttatggagatgctggaggcgccgcaccaaatgacttaggcctgcgggcccatcctttgtgcccacccgttctggccaccctgcctggacgccagctgttcttctcagcctgagccctgtccctgcccttctctgcctggcctgtttggactttggggcacagcctgtcactgctctgcctaagagatgtgttgtcaccctccttatttctgttactacttgtctgtggcccagggcagtggctttcctgaggcagcagccttcgtggcaagaactagcgtgagcccagccaggcgcctccccaccgggctctcaggacaccctgccacaccccacggggcttgggcgactacagggtcttcgggccccagccctggagctgcaggagttgggaacggggcttttgtttccgttgctgtttatcgatgctggttttcagaattcctgtgtggccctcctgtctggagtgacatcttcatctgctctgaatactggtgcccagccagcccgtgacagcttccccctaatcaggaggggacagctgggggcgcaagctggtgtgtcatcagcaaagacctcagccgcctcggggatgagaggggactcgtggggcaagcaagctgccctgtgctctgagtgagggggaaggtagcccctttttccaaagataactcacagttttgccctcgagccaatgagaacatgagctgccctctgtgcaaggtttcggggccacctccaggctgcaggggcgggtcactcacccccctgttttctctctgccttggtgttctggtttcagactcccgactccccgttcagaccagagtgccccggcccctccccagcctgagtcttctccttgctctgcggggtgggctgagacttgtccttgtttcctgcagggctggccctggctcgggcagggtggggcatcaccacctcactggccttgctggaggcacagggctctgcggacctgcagccatctgtgaggcccgcggggatgggaggggaggagggtggcctgttggtttccctcagagggggcaggtggcctggagagagaggggctcaggaactgggagcctcgtgggtggggcagatgctccgcggcctggagtggctctgccggggcattggtgggacccctgctcaggccttctctctggctgccagttgtgtctaaaagactcttggaatctgagaacccggagtcgcagcgccctcgggcctgggccacacgcaggccctggtgggaccacccagcctttgtcagtggcaggtgcctgaacagagggtggatgggggggataccggagggggtcttgtcttcccagccgcagtctaggaatgatgcgggggggtggacgccttctccatagtctttccccacctggagcaggggcttcctcagtggtgaggggagctgcctacaggttggaccgggaggcagtggcttggagaggcagctttccagccttggtggggaagaaagtgtccattctttgccttcctggagctcccagccagagctgagcttaggcacccgagtggagcctgcagctgagtctgtgcccgagacaggctgtcagagattccagaagcctctcctccccgccgccctccacccctgcctttcagcgttgtggatccctagaggtggccccctgcccgatccaccgtcctgaggcagagtgttgagcctcatacctgtaccaggtccccggccagctgggcccctcccaggcactgccaggaagccccagctgcccctggcgggtgtggtggaaatggcaggagggtgcaggtactcttggggccccagcggtgggagtgcaaaagacccaacgccaacacctggtgccttttgcagccagcgcccacccatccgtgcccggacccttgggaatgcccgcggctccagaggaaaaagcccagggacggggcctccgttgcggggggtcggctgcttcttgggaactttgtcgtttccggcgctggctggctggctggctgtaaagcactgaagccccccggccgccaacccctgaaagcagaacctggcctccctggccacagcagccttacccaccgctctacgtgtcccgggcacttcccgcagccttcccgtccctttctcatcggccttgtagttgtacagtgctgttggtttgaaaaggtgatgtgtggggagtgcggctcatcactgagtagagaggtagaatttctatttaaccagacctgtagtagtattaccaatccagttcaattaaggtgattttttgtaattattattattttggtgggacaatctttaattttctaaagatagcactaacatcagctcattagccacctgtgcctgtccccgccttggcccggctggatgaagcggcttccccgcagggcccccacttcccagtggctgcttcctggggacccagggcaccccggcaccttcaggcacgctcctcagctggtcacctcccggctttgccgttcagatggggctcctgaggctcaggagtgaagatgccacagagccgggctcccctaggctgcgtcgggcatgcttggaagctggcctgccaggaccttccaccctggggcctgtgtcagccgccggccctccgcaccctggaagcacacggcctctgggaaggacagccctgaccttcggttttccgagcacggtgtttcccaagaattctgggctggcggcctggtggcagtgctggagatgaccccgagcccctccccgtggggcacccaggagggccctgccggaatgtgcagcctgtgggtagtcggctggtgtccctgtcgtggagctggggtgcgtgatctggtgctcgtccacgcaggtgtgtggtgtaaacatgtatgtgctgtacagagagacgcgtgtggagagagccgcacaccagcgccacccaggaaaggcggagcggttaccagtgttttgtgtttatttttaatcaagacgtttcccctgttttcctataaatttgcttcgtgtaagcaagtacataaggaccctcctttggtgaaatccgggttcgaatgaatatctcaaggcaggagatgcatctattttaagatgctttggagcagacagctttagccgttcccaatccttagcaatgccttagctgggacgcatagctaatactttagagaggatgacagatccataaagagagtaaagataagagaaaatgtctaaagcatctggaaaggtaaaaaaaaaaaatctatttttgtacaaatgtaattttatccctcatgtatacttggaagaaacgccaggacagacgatggcagaggagagggctcctgtgacggcggcgaggcttgggaggaaaccgccgcaatgggggtgtcttccctcggggcaggagggtg

SEQ ID NO: 634 - protein, 456 aa, Homo sapiens
MDTKHFLPLDFSTQVNSSLTSPTGRGSMAAPSLHPSLGPGIGSPGQLHSPISTLSSPINGMGPPFSVISSPMGPHSMSVPTTPTLGFSTGSPQLSSPMNPVSSSEDIKPPLQGVLKVPAHPSGNMASFTKHICAICGDRSSGKHYGVYSCEGCKGFFKRTVRKDLTYTCRDNKDCLIDKRQRNRCQYCRYQKCLAMGMKREAVQEERQRGKDRNENEVESTSSANEDMPVERIAELAVEPKTETYVEANMQPSSPNDPVTNICQAADKQLFTLVEWAKRIPHFSELPLDDQVILLRAGWNELLIASFSHRSIAVKDGILLATGLHVHRNSAHSAGVGAIFDRVLTELVSKMRDMQMDKTELGCLRAIVLFNPDSKGLSNPAEVEALREKVYASLEAYCKHKYPEQPGRFAKLLLRLPALRSIGLKCLEHLFFFKLIGDTPIDTFLMEMLEAPHQMT

SEQ ID NO: 635 - DNA, 5336 bp, Homo sapiens
agctgggctgggccacacagccaagtggccacagagctgggggtggtcaggagccatgctttctgatttctccacccaggtgaactcctccctcacctccccgacggggcgaggctccatggctgccccctcgctgcacccgtccctggggcctggcatcggctccccgggacagctgcattctcccatcagcaccctgagctcccccatcaacggcatgggcccgcctttctcggtcatcagctcccccatgggcccccactccatgtcggtgcccaccacacccaccctgggcttcagcactggcagcccccagctcagctcacctatgaaccccgtcagcagcagcgaggacatcaagccccccctgggcctcaatggcgtcctcaaggtccccgcccacccctcaggcaagcactatggagtgtacagctgcgaggggtgcaagggcttcttcaagcggacggtgcgcaaggacctgacctacacctgccgcgacaacaaggactgcctgattgacaagcggcagcggaaccggtgccagtactgccgctaccagaagtgcctggccatgggcatgaagcgggaagccgtgcaggaggagcggcagcgtggcaaggaccggaacgagaatgaggtggagtcgaccagcagcgccaacgaggacatgccggtggagaggatcctggaggctgagctggccgtggagcccaagaccgagacctacgtggaggcaaacatggggctgaaccccagctcgccgaacgaccctgtcaccaacatttgccaagcagccgacaaacagcttttcaccctggtggagtgggccaagcggatcccacacttctcagagctgcccctggacgaccaggtcatcctgctgcgggcaggctggaatgagctgctcatcgcctccttctcccaccgctccatcgccgtgaaggacgggatcctcctggccaccgggctgcacgtccaccggaacagcgcccacagcgcaggggtgggcgccatctttgacagggtgctgacggagcttgtgtccaagatgcgggacatgcagatggacaagacggagctgggctgcctgcgcgccatcgtcctctttaaccctgactccaaggggctctcgaacccggccgaggtggaggcgctgagggagaaggtctatgcgtccttggaggcctactgcaagcacaagtacccagagcagccgggaaggttcgctaagctcttgctccgcctgccggctctgcgctccatcgggctcaaatgcctggaacatctcttcttcttcaagctcatcggggacacacccattgacaccttccttatggagatgctggaggcgccgcaccaaatgacttaggcctgcgggcccatcctttgtgcccacccgttctggccaccctgcctggacgccagctgttcttctcagcctgagccctgtccctgcccttctctgcctggcctgtttggactttggggcacagcctgtcactgctctgcctaagagatgtgttgtcaccctccttatttctgttactacttgtctgtggcccagggcagtggctttcctgaggcagcagccttcgtggcaagaactagcgtgagcccagccaggcgcctccccaccgggctctcaggacaccctgccacaccccacggggcttgggcgactacagggtcttcgggccccagccctggagctgcaggagttgggaacggggcttttgtttccgttgctgtttatcgatgctggttttcagaattcctgtgtggccctcctgtctggagtgacatcttcatctgctctgaatactggtgcccagccagcccgtgacagcttccccctaatcaggaggggacagctgggggcgcaagctggtgtgtcatcagcaaagacctcagccgcctcggggatgagaggggactcgtggggcaagcaagctgccctgtgctctgagtgagggggaaggtagcccctttttccaaagataactcacagttttgccctcgagccaatgagaacatgagctgccctctgtgcaaggtttcggggccacctccaggctgcaggggcgggtcactcacccccctgttttctctctgccttggtgttctggtttcagactcccgactccccgttcagaccagagtgccccggcccctccccagcctgagtcttctccttgctctgcggggtgggctgagacttgtccttgtttcctgcagggctggccctggctcgggcagggtggggcatcaccacctcactggccttgctggaggcacagggctctgcggacctgcagccatctgtgaggcccgcggggatgggaggggaggagggtggcctgttggtttccctcagagggggcaggtggcctggagagagaggggctcaggaactgggagcctcgtgggtggggcagatgctccgcggcctggagtggctctgccggggcattggtgggacccctgctcaggccttctctctggctgccagttgtgtctaaaagactcttggaatctgagaacccggagtcgcagcgccctcgggcctgggccacacgcaggccctggtgggaccacccagcctggtattgtccacggacagcgttgttcacccagagccttacttgggagcctcactgaacgcctgctctggttgaaggtggggtgggggcggggcttggggcctccctggctcagcccagtgcggcctggcgctcctcccgcaggctctgcccccgggctccggtggtgcggggccctctcaggttgaactcgcctcttttgcactggaaggccctccctttggcctgagtacttttcccgttcacgcctcagtcccgtggacccagcctttgtcagtggcaggtgcctgaacagagggtggatgggggggataccggagggggtcttgtcttcccagccgcagtctaggaatgatgcgggggggtggacgccttctccatagtctttccccacctggagcaggggcttcctcagtggtgaggggagctgcctacaggttggaccgggaggcagtggcttggagaggcagctttccagccttggtggggaagaaagtgtccattctttgccttcctggagctcccagccagagctgagcttaggcacccgagtggagcctgcagctgagtctgtgcccgagacaggctgtcagagattccagaagcctctcctccccgccgccctccacccctgcctttcagcgttgtggatccctagaggtggccccctgcccgatccaccgtcctgaggcagagtgttgagcctcatacctgtaccaggtccccggccagctgggcccctcccaggcactgccaggaagccccagctgcccctggcgggtgtggtggaaatggcaggagggtgcaggtactcttggggccccagcggtgggagtgcaaaagacccaacgccaacacctggtgccttttgcagccagcgcccacccatccgtgcccggacccttgggaatgcccgcggctccagaggaaaaagcccagggacggggcctccgttgcggggggtcggctgcttcttgggaactttgtcgtttccggcgctggctggctggctggctgtaaagcactgaagccccccggccgccaacccctgaaagcagaacctggcctccctggccacagcagccttacccaccgctctacgtgtcccgggcacttcccgcagccttcccgtccctttctcatcggccttgtagttgtacagtgctgttggtttgaaaaggtgatgtgtggggagtgcggctcatcactgagtagagaggtagaatttctatttaaccagacctgtagtagtattaccaatccagttcaattaaggtgattttttgtaattattattattttggtgggacaatctttaattttctaaagatagcactaacatcagctcattagccacctgtgcctgtccccgccttggcccggctggatgaagcggcttccccgcagggcccccacttcccagtggctgcttcctggggacccagggcaccccggcaccttcaggcacgctcctcagctggtcacctcccggctttgccgttcagatggggctcctgaggctcaggagtgaagatgccacagagccgggctcccctaggctgcgtcgggcatgcttggaagctggcctgccaggaccttccaccctggggcctgtgtcagccgccggccctccgcaccctggaagcacacggcctctgggaaggacagccctgaccttcggttttccgagcacggtgtttcccaagaattctgggctggcggcctggtggcagtgctggagatgaccccgagcccctccccgtggggcacccaggagggccctgccggaatgtgcagcctgtgggtagtcggctggtgtccctgtcgtggagctggggtgcgtgatctggtgctcgtccacgcaggtgtgtggtgtaaacatgtatgtgctgtacagagagacgcgtgtggagagagccgcacaccagcgccacccaggaaaggcggagcggttaccagtgttttgtgtttatttttaatcaagacgtttcccctgttttcctataaatttgcttcgtgtaagcaagtacataaggaccctcctttggtgaaatccgggttcgaatgaatatctcaaggcaggagatgcatctattttaagatgctttggagcagacagctttagccgttcccaatccttagcaatgccttagctgggacgcatagctaatactttagagaggatgacagatccataaagagagtaaagataagagaaaatgtctaaagcatctggaaaggtaaaaaaaaaaaatctatttttgtacaaatgtaattttatccctcatgtatacttggatatggcggggggagggctgggactgtttcgtttctgcttctagagattgaggtgaaagcttcgtccgagaaacgccaggacagacgatggcagaggagagggctcctgtgacggcggcgaggcttgggaggaaaccgccgcaatgggggtgtcttccctcggggcaggagggtgggcctgaggctttcaagggttttcttccctttcgagtaatttttaaagccttgctctgttgtgtcctgttgccggctctggccttcctgtgactgactgtgaagtggcttctccgtacgattgtctctgaaacatcgtggccgcaggtgccagggtttgatggacagtagcattagaattgtggaaaaggaacacgcaaagggagaagtgtgagaggagaaacaaaatatgagcgtttaaaatacatcgccattcagttcgtt

SEQ ID NO: 636 - protein, 247 aa, Homo sapiens
MSCPLCKVSGPPPGCRGGSLTPLFSLCLGVLVSDSRLPVQTRVPRPLPSLSLLLALRGGLRLVLVSCRAGPGSGRVGHHHLTGLAGGTGLCGPAAICERDGRGGGWPVGFPQRGQVAWRERGSGTGSLVGGADAPRPGVPGHWWDPCSGLLSGCQLCLKDSWNLRTRSRSALGPGPHAGPGGTTQPGIVHGQRCSPRALLGSLTERLLWLKVGWGRGLGPPWLSPVRPGAPPAGSAPGLRWCGALSG

SEQ ID NO: 637 - DNA, 4746 bp, Homo sapiens
cttttgcaacaactcgccgcgccgcggcctccgcgcgccgccgccgccaccgcagccgccggctccccgccgcccgggcccgggccggccgcgccgggggccgccgcgcccgccgcccgctgcctgcgccgccggccgggcatgagttagtcgcagacatggacaccaaacatttcctgccgctcgatttctccacccaggtgaactcctccctcacctccccgacggggcgaggctccatggctgccccctcgctgcacccgtccctggggcctggcatcggctccccgggacagctgcattctcccatcagcaccctgagctcccccatcaacggcatgggcccgcctttctcggtcatcagctcccccatgggcccccactccatgtcggtgcccaccacacccaccctgggcttcagcactggcagcccccagctcagctcacctatgaaccccgtcagcagcagcgaggacatcaagccccccctgggcctcaatggcgtcctcaaggtccccgcccacccctcaggaaacatggcttccttcaccaagcacatctgcgccatctgcggggaccgctcctcaggcaagcactatggagtgtacagctgcgaggggtgcaagggcttcttcaagcggacggtgcgcaaggacctgacctacacctgccgcgacaacaaggactgcctgattgacaagcggcagcggaaccggtgccagtactgccgctaccagaagtgcctggccatgggcatgaagcgggaagccgaacgaccctgtcaccaacatttgccaagcagccgacaaacagcttttcaccctggtggagtgggccaagcggatcccacacttctcagagctgcccctggacgaccaggtcatcctgctgcgggcaggctggaatgagctgctcatcgcctccttctcccaccgctccatcgccgtgaaggacgggatcctcctggccaccgggctgcacgtccaccggaacagcgcccacagcgcaggggtgggcgccatctttgacagggtgctgacggagcttgtgtccaagatgcgggacatgcagatggacaagacggagctgggctgcctgcgcgccatcgtcctctttaaccctgactccaaggggctctcgaacccggccgaggtggaggcgctgagggagaaggtctatgcgtccttggaggcctactgcaagcacaagtacccagagcagccgggaaggttcgctaagctcttgctccgcctgccggctctgcgctccatcgggctcaaatgcctggaacatctcttcttcttcaagctcatcggggacacacccattgacaccttccttatggagatgctggaggcgccgcaccaaatgacttaggcctgcgggcccatcctttgtgcccacccgttctggccaccctgcctggacgccagctgttcttctcagcctgagccctgtccctgcccttctctgcctggcctgtttggactttggggcacagcctgtcactgctctgcctaagagatgtgttgtcaccctccttatttctgttactacttgtctgtggcccagggcagtggctttcctgaggcagcagccttcgtggcaagaactagcgtgagcccagccaggcgcctccccaccgggctctcaggacaccctgccacaccccacggggcttgggcgactacagggtcttcgggccccagccctggagctgcaggagttgggaacggggcttttgtttccgttgctgtttatcgatgctggttttcagaattcctgtgtggccctcctgtctggagtgacatcttcatctgctctgaatactggtgcccagccagcccgtgacagcttccccctaatcaggaggggacagctgggggcgcaagctggtgtgtcatcagcaaagacctcagccgcctcggggatgagaggggactcgtggggcaagcaagctgccctgtgctctgagtgagggggaaggtagcccctttttccaaagataactcacagttttgccctcgagccaatgagaacatgagctgccctctgtgcaaggtttcggggccacctccaggctgcaggggcgggtcactcacccccctgttttctctctgccttggtgttctggtttcagactcccgactccccgttcagaccagagtgccccggcccctccccagcctgagtcttctccttgctctgcggggtgggctgagacttgtccttgtttcctgcagggctggccctggctcgggcagggtggggcatcaccacctcactggccttgctggaggcacagggctctgcggacctgcagccatctgtgaggcccgcggggatgggaggggaggagggtggcctgttggtttccctcagagggggcaggtggcctggagagagaggggctcaggaactgggagcctcgtgggtggggcagatgctccgcggcctggagtggctctgccggggcattggtgggacccctgctcaggccttctctctggctgccagttgtgtctaaaagactcttggaatctgagaacccggagtcgcagcgccctcgggcctgggccacacgcaggccctggtgggaccacccagcctttgtcagtggcaggtgcctgaacagagggtggatgggggggataccggagggggtcttgtcttcccagccgcagtctaggaatgatgcgggggggtggacgccttctccatagtctttccccacctggagcaggggcttcctcagtggtgaggggagctgcctacaggttggaccgggaggcagtggcttggagaggcagctttccagccttggtggggaagaaagtgtccattctttgccttcctggagctcccagccagagctgagcttaggcacccgagtggagcctgcagctgagtctgtgcccgagacaggctgtcagagattccagaagcctctcctccccgccgccctccacccctgcctttcagcgttgtggatccctagaggtggccccctgcccgatccaccgtcctgaggcagagtgttgagcctcatacctgtaccaggtccccggccagctgggcccctcccaggcactgccaggaagccccagctgcccctggcgggtgtggtggaaatggcaggagggtgcaggtactcttggggccccagcggtgggagtgcaaaagacccaacgccaacacctggtgccttttgcagccagcgcccacccatccgtgcccggacccttgggaatgcccgcggctccagaggaaaaagcccagggacggggcctccgttgcggggggtcggctgcttcttgggaactttgtcgtttccggcgctggctggctggctggctgtaaagcactgaagccccccggccgccaacccctgaaagcagaacctggcctccctggccacagcagccttacccaccgctctacgtgtcccgggcacttcccgcagccttcccgtccctttctcatcggccttgtagttgtacagtgctgttggtttgaaaaggtgatgtgtggggagtgcggctcatcactgagtagagaggtagaatttctatttaaccagacctgtagtagtattaccaatccagttcaattaaggtgattttttgtaattattattattttggtgggacaatctttaattttctaaagatagcactaacatcagctcattagccacctgtgcctgtccccgccttggcccggctggatgaagcggcttccccgcagggcccccacttcccagtggctgcttcctggggacccagggcaccccggcaccttcaggcacgctcctcagctggtcacctcccggctttgccgttcagatggggctcctgaggctcaggagtgaagatgccacagagccgggctcccctaggctgcgtcgggcatgcttggaagctggcctgccaggaccttccaccctggggcctgtgtcagccgccggccctccgcaccctggaagcacacggcctctgggaaggacagccctgaccttcggttttccgagcacggtgtttcccaagaattctgggctggcggcctggtggcagtgctggagatgaccccgagcccctccccgtggggcacccaggagggccctgccggaatgtgcagcctgtgggtagtcggctggtgtccctgtcgtggagctggggtgcgtgatctggtgctcgtccacgcaggtgtgtggtgtaaacatgtatgtgctgtacagagagacgcgtgtggagagagccgcacaccagcgccacccaggaaaggcggagcggttaccagtgttttgtgtttatttttaatcaagacgtttcccctgttttcctataaatttgcttcgtgtaagcaagtacataaggaccctcctttggtgaaatccgggttcgaatgaatatctcaaggcaggagatgcatctattttaagatgctttggagcagacagctttagccgttcccaatccttagcaatgccttagctgggacgcatagctaatactttagagaggatgacagatccataaagagagtaaagataagagaaaatgtctaaagcatctggaaaggtaaaaaaaaaaaatctatttttgtacaaatgtaattttatccctcatgtatacttggaagaaacgccaggacagacgatggcagaggagagggctcctgtgacggcggcgaggcttgggaggaaaccgccgcaatgggggtgtcttccctcggggcaggagggtg

SEQ ID NO: 638 - protein, 247 aa, Homo sapiens
MDTKHFLPLDFSTQVNSSLTSPTGRGSMAAPSLHPSLGPGIGSPGQLHSPISTLSSPINGMGPPFSVISSPMGPHSMSVPTTPTLGFSTGSPQLSSPMNPVSSSEDIKPPLQGVLKVPAHPSGNMASFTKHICAICGDRSSGKHYGVYSCEGCKGFFKRTVRKDLTYTCRDNKDCLIDKRQRNRCQYCRYQKCLAMGMKREAERPCHQHLPSSRQTAFHPGGVGQADPTLLRAAPGRPGHPAAGRLE

SEQ ID NO: 639 - DNA, 5514 bp, Homo sapiens
cttttgcaacaactcgccgcgccgcggcctccgcgcgccgccgccgccaccgcagccgccggctccccgccgcccgggcccgggccggccgcgccgggggccgccgcgcccgccgcccgctgcctgcgccgccggccgggcatgagttagtcgcagacatggacaccaaacatttcctgccgctcgatttctccacccaggtgaactcctccctcacctccccgacggggcgaggctccatggctgccccctcgctgcacccgtccctggggcctggcatcggctccccgggacagctgcattctcccatcagcaccctgagctcccccatcaacggcatgggcccgcctttctcggtcatcagctcccccatgggcccccactccatgtcggtgcccaccacacccaccctgggcttcagcactggcagcccccagctcagctcacctatgaaccccgtcagcagcagcgaggacatcaagccccccctgggcctcaatggcgtcctcaaggtccccgcccacccctcaggaaacatggcttccttcaccaagcacatctgcgccatctgcggggaccgctcctcaggcaagcactatggagtgtacagctgcgaggggtgcaagggcttcttcaagcggacggtgcgcaaggacctgacctacacctgccgcgacaacaaggactgcctgattgacaagcggcagcggaaccggtgccagtactgccgctaccagaagtgcctggccatgggcatgaagcgggaagccgtgcaggaggagcggcagcgtggcaaggaccggaacgagaatgaggtggagtcgaccagcagcgccaacgaggacatgccggtggagaggatcctggaggctgagctggccgtggagcccaagaccgagacctacgtggaggcaaacatggggctgaaccccagctcgccgaacgaccctgtcaccaacatttgccaagcagccgacaaacagcttttcaccctggtggagtgggccaagcggatcccacacttctcagagctgcccctggacgaccaggtcatcctgctgcgggcaggctggaatgagctgctcatcgcctccttctcccaccgctccatcgccgtgaaggacgggatcctcctggccaccgggctgcacgtccaccggaacagcgcccacagcgcaggggtgggcgccatctttgacagggtgctgacggagcttgtgtccaagatgcgggacatgcagatggacaagacggagctgggctgcctgcgcgccatcgtcctctttaaccctgactccaaggggctctcgaacccggccgaggtggaggcgctgagggagaaggtctatgcgtccttggaggcctactgcaagcacaagtacccagagcagccgggaaggttcgctaagctcttgctccgcctgccggctctgcgctccatcgggctcaaatgcctggaacatctcttcttcttcaagctcatcggggacacacccattgacaccttccttatggagatgctggaggcgccgcaccaaatgacttaggcctgcgggcccatcctttgtgcccacccgttctggccaccctgcctggacgccagctgttcttctcagcctgagccctgtccctgcccttctctgcctggcctgtttggactttggggcacagcctgtcactgctctgcctaagagatgtgttgtcaccctccttatttctgttactacttgtctgtggcccagggcagtggctttcctgaggcagcagccttcgtggcaagaactagcgtgagcccagccaggcgcctccccaccgggctctcaggacaccctgccacaccccacggggcttgggcgactacagggtcttcgggccccagccctggagctgcaggagttgggaacggggcttttgtttccgttgctgtttatcgatgctggttttcagaattcctgtgtggccctcctgtctggagtgacatcttcatctgctctgaatactggtgcccagccagcccgtgacagcttccccctaatcaggaggggacagctgggggcgcaagctggtgtgtcatcagcaaagacctcagccgcctcggggatgagaggggactcgtggggcaagcaagctgccctgtgctctgagtgagggggaaggtagcccctttttccaaagataactcacagttttgccctcgagccaatgagaacatgagctgccctctgtgcaaggtttcggggccacctccaggctgcaggggcgggtcactcacccccctgttttctctctgccttggtgttctggtttcagactcccgactccccgttcagaccagagtgccccggcccctccccagcctgagtcttctccttgctctgcggggtgggctgagacttgtccttgtttcctgcagggctggccctggctcgggcagggtggggcatcaccacctcactggccttgctggaggcacagggctctgcggacctgcagccatctgtgaggcccgcggggatgggaggggaggagggtggcctgttggtttccctcagagggggcaggtggcctggagagagaggggctcaggaactgggagcctcgtgggtggggcagatgctccgcggcctggagtggctctgccggggcattggtgggacccctgctcaggccttctctctggctgccagttgtgtctaaaagactcttggaatctgagaacccggagtcgcagcgccctcgggcctgggccacacgcaggccctggtgggaccacccagcctggtattgtccacggacagcgttgttcacccagagccttacttgggagcctcactgaacgcctgctctggttgaaggtggggtgggggcggggcttggggcctccctggctcagcccagtgcggcctggcgctcctcccgcaggctctgcccccgggctccggtggtgcggggccctctcaggttgaactcgcctcttttgcactggaaggccctccctttggcctgagtacttttcccgttcacgcctcagtcccgtggacccagcctttgtcagtggcaggtgcctgaacagagggtggatgggggggataccggagggggtcttgtcttcccagccgcagtctaggaatgatgcgggggggtggacgccttctccatagtctttccccacctggagcaggggcttcctcagtggtgaggggagctgcctacaggttggaccgggaggcagtggcttggagaggcagctttccagccttggtggggaagaaagtgtccattctttgccttcctggagctcccagccagagctgagcttaggcacccgagtggagcctgcagctgagtctgtgcccgagacaggctgtcagagattccagaagcctctcctccccgccgccctccacccctgcctttcagcgttgtggatccctagaggtggccccctgcccgatccaccgtcctgaggcagagtgttgagcctcatacctgtaccaggtccccggccagctgggcccctcccaggcactgccaggaagccccagctgcccctggcgggtgtggtggaaatggcaggagggtgcaggtactcttggggccccagcggtgggagtgcaaaagacccaacgccaacacctggtgccttttgcagccagcgcccacccatccgtgcccggacccttgggaatgcccgcggctccagaggaaaaagcccagggacggggcctccgttgcggggggtcggctgcttcttgggaactttgtcgtttccggcgctggctggctggctggctgtaaagcactgaagccccccggccgccaacccctgaaagcagaacctggcctccctggccacagcagccttacccaccgctctacgtgtcccgggcacttcccgcagccttcccgtccctttctcatcggccttgtagttgtacagtgctgttggtttgaaaaggtgatgtgtggggagtgcggctcatcactgagtagagaggtagaatttctatttaaccagacctgtagtagtattaccaatccagttcaattaaggtgattttttgtaattattattattttggtgggacaatctttaattttctaaagatagcactaacatcagctcattagccacctgtgcctgtccccgccttggcccggctggatgaagcggcttccccgcagggcccccacttcccagtggctgcttcctggggacccagggcaccccggcaccttcaggcacgctcctcagctggtcacctcccggctttgccgttcagatggggctcctgaggctcaggagtgaagatgccacagagccgggctcccctaggctgcgtcgggcatgcttggaagctggcctgccaggaccttccaccctggggcctgtgtcagccgccggccctccgcaccctggaagcacacggcctctgggaaggacagccctgaccttcggttttccgagcacggtgtttcccaagaattctgggctggcggcctggtggcagtgctggagatgaccccgagcccctccccgtggggcacccaggagggccctgccggaatgtgcagcctgtgggtagtcggctggtgtccctgtcgtggagctggggtgcgtgatctggtgctcgtccacgcaggtgtgtggtgtaaacatgtatgtgctgtacagagagacgcgtgtggagagagccgcacaccagcgccacccaggaaaggcggagcggttaccagtgttttgtgtttatttttaatcaagacgtttcccctgttttcctataaatttgcttcgtgtaagcaagtacataaggaccctcctttggtgaaatccgggttcgaatgaatatctcaaggcaggagatgcatctattttaagatgctttggagcagacagctttagccgttcccaatccttagcaatgccttagctgggacgcatagctaatactttagagaggatgacagatccataaagagagtaaagataagagaaaatgtctaaagcatctggaaaggtaaaaaaaaaaaatctatttttgtacaaatgtaattttatccctcatgtatacttggatatggcggggggagggctgggactgtttcgtttctgcttctagagattgaggtgaaagcttcgtccgagaaacgccaggacagacgatggcagaggagagggctcctgtgacggcggcgaggcttgggaggaaaccgccgcaatgggggtgtcttccctcggggcaggagggtgggcctgaggctttcaagggttttcttccctttcgagtaatttttaaagccttgctctgttgtgtcctgttgccggctctggccttcctgtgactgactgtgaagtggcttctccgtacgattgtctctgaaacatcgtggccgcaggtgccagggtttgatggacagtagcattagaattgtggaaaaggaacacgcaaagggagaagtgtgagaggagaaacaaaatatgagcgtttaaaatacatcgccattcagttcgtt

SEQ ID NO: 640 - protein, 456 aa, Homo sapiens; identical to SEQ ID NO: 634

SEQ ID NO: 641 - DNA, 45315 bp, Mus musculus
  misc_feature (1)...(45315): n = A,T,C or G
aatctggctgcctggagatccctggcatgcttaccatgctattttatgacaggatattaagttagtatgtgaacagtgcttcagtccccacaataaacactgaaagtgttcatttattcttttgctttggtttttatatagtggtctaacatttccaaagctaccttaaatttgtacatgtaattttgttttagtggtgtagaggattggacctagcaccttatgcatgctaatcacacgctgaaccactggtacttacccagcccaacattttatatagttatatatagtatacagtaatgtgctgtataactgtttcaagattgaaacaatctatagtttcagggctggtcatggtgacatacgtcatatatatatatgtgtgtgtgtgtgtatgcatatatatataacactaatgcatataagtgtgtttatttatatgtcaagtgtatttagcaatctcttagtatacttttataaatcttgaacagaaatgagcaatttaaagtagttgagaaaagatgaaggaaacaatatacattaattttaattgttatttaaatgtaccaaccattttaggagggttatttaagtagagaaactttcgtttcagtttttgtttttgtttttgttttttgtgtgtttgtgtgtgggttttgttttgtggagacaaggtctgatagagcccagactagccacaaactcactgtgcagccaaagactcctggagctcctgagcctcttgccttcatttcccgagtggagaggccagagcaggagtgtcccccgacccccacgcccctatgttctctgccttattcacttgagactgggtctcaaagagccagaaacctactgtttctgctaggctgctgccagggctctcggggcctgccttctgacctcttagtactactcagtactgggcttgacagaagcacgctccaccatatgcagtttctaacatgtgaatgctatagatctggactcagggccccgtagggcctcgggctcatgaatcgaatactcgtaccagctgagctatctcccagtggtttttagtttccctccctttctttttccttttgatcttcctcctcctcctcctctttttttcccttctccaccttttactgtctcaaattcactactccttgcatcagccttttccaaatattagaattatagatagaaaagtaactttttcatctagatttttctaacttttgtgataaaataatgtaaagtctacccgagtctaagaagaacatatacatatatttttaagatttacttattttatgtacatgagtacactgtagctgtcctcagacacaccagaagagggcatcggatcccacgacagatggttgtgagccaccatgtggttgctgggaattgaactcagaacctccagaagagagacagtgctcttaaccgctgagccatctctccagccctagatattcttaatatatatgggtttttggtttttggtttttttttttttgtttttgtttttttgagacagtgtttctttgtgtagccttggctgtcctggaattcactctgtagaccaggctggcctcaaactcacagaaatctccctgcttttgtctcatgagtgctggaattaaaggcctgcaccatcacatttcacttatagtgttcttttcttccttcctttcatccctccctctccctctccctctccctccctctctctctctccccctnnnnnnnnnnnnnnnnnnnnnnnnnnnnnnnnnnnnnnnnnnnnnnnnnnnnnnnnnnnnnnnnnnnnnnnnnnnnnnnnnnnnnnnnnnnnnnnnnnnnnnnnnnnnnnnnnnnnnnnnnnnnnnnnnnnnnnnnnnnnnnnnnnnnnnnnnnnnnnnnnnnnnnnnnnnnnnnnnnnnnnnnnnnnnnnnnnnnnnnnnnnnnnnnnnnnnnnnnnnnnnnnnnnnnnnnnnnnnnntttttaatgttgcttggtctggagataaggcttatcagttaaaagcacttgtgacccttccagaggtctatttcctccacaggcagatggtctcttctgacctgtaaaggcaccagacatgcatgtggcacacatacacatatgcaggtaaaatcctaaacgtatcaaataaataaatttttaaaaattgtgtgtacaggggctggtgaaatggctcagtgggtaagagcacccgactgctcttccaaaagtccggagttcaaatcccagcagccacatggtggctcacaaccatctgtaaggagatctgactccctcttctggagtgtctgaagacagctacagtgaacttacatataataaataaataataataataataataaatttttaaaaatcgtgggtacacatgtgtgtgtacagtgacctcagttgtcattgctcaggggctgttcacatttgtttagagacagtgagtctatcattcggatctgcagtttactagttaggtgaggctggctggccagggagctttctgtctctgcttccccaacactgggactacagtgagtgccaatatacctagcatttcatgcaggtgttgaaggtctgaagcaggcccaggccttcacagttagtccttcactgactgagctatctgtctagccccagttaaaaatattctcaatagtcagatggtggaggtgaataccttttgtctcaccccttaggagatagaggcaggcagatctctgaattcaaggccagcctggtctacagggtgagttccaggctagccagggctacacagagaaaccctgcttggaaaaaaaaatcaataaggctggacatattatactagtacatgctttaattccagcattttggaagcagaggcaggtgagtgcaaggctagcctgtctatgtagcaaatcccaagtcaaagctatatagtaaaagcaagtctcaaaaaataaaatatttcaacaacaaattattcaaagtaatttttagtaagatggctagcagatttttttgactttaatatttgaattcccccccccaaaaaaaaactatagtgcttaatctaattttcaatattcccagggggtgggatccaggatctcatttaaatattgctattaatttgttcctatttggacatttaaacatgaatcggagatgccaaacaagaactctggatacttgagttctactttatctgtttccaattctttaggaagaatttgagttctctgcaagctttgcggattccccaagcctgtcattgacaaaccactgactgcagtcagtgtgtgtgggaagcctacaccagcatctgtgtggatcccagaaggtttgcagattcagcagggcttggattcatagacagcccgagcagagctggagtcatgtatcagcctgcaccacaacaatgcttcctgctagctgaaggcttcccacaggcactctgaaagcttgctgtttgctgcctgtagagcaactcacaggatcacagatgctaaacctggcagggacccaacagttctcctccttatcctcctactaactcctgactaaagcatagacaatggaaccccaacagtgttagcgcaaacctttaagcccagcacctgggaggcagtggcaggcagatctctgagtttgagtatggtctacagagagagttccaaaacagccagagatattcagaaataccctgtctcaaaaacaaaaacagaaacaaacaaagaagagaaagtatgagttccaggtcagagtctaagtgcagctttcctcccactgtgctctattatctgttctagaaaacactccaaagaagccacgtattgttctgcagatcaaagaaactggtattatttagggtcatgcccatggtctgccccagtttccagtgtgaacaaacacgagaccatgatttactacaaccagcagttttttgatagagctgctttgtgctaccctttagtaaaagtagcatttctctctctttctctttctctctctctctctctctctctctcacacacacacacacacacacacacacacaacccaaacaaaacaaaacaaaacaaaacaaaacaaaacaaaacccaagcatgtataagtgagatttcatggccacagtctgaaactggagcagtaatataccacgcaccccttgatcagattagcatcttgaaaatacccatatgaaatacccttgtccatcctgcacctggtggctcatcagctgggaatgaatgacatcaggctaccaggcagaggctttcttgtgaaatcaggaaacaaagagaactctgggttaaaggtgcctcaaaaccacgacctgaaaccacgtgtttggttggtgtgtgcaaggcgggtcactactgctcacagtcagttctacccatcatggaaaactttccaggtgtaagaagcagagtctggggaaacctggcacctagcagaatggtccttttgctcgtgagtctggcacacctctctattcccttctggtctctgcatttcttgctccctttgcctgaagcactctcccctttcctctacacagtcgagtcaacttttacagatttttattatgtgtatgggtcttttttgtacatgtatgtctgtgtaccaggggtgcagagtgcctgaggaggccagaactagtattacagatgctgtgttagtgtaggtgccagaaattgaacccagattctgtggaagaacagtcagtggctcttaaccaggctgcctacaacttgctgtgcagtagagggtggccttgaactcacggtcttcctgcctctacattccaaatgccaagattacaagatagacagtaagttaaaggccaggctgggtgacaaaagaacctgtctcaaaaaagggtggtatcgatggtggcaagcaagatagcttagtgggtaaagtacccaagtttaagccccagaattcacgtaaacagagacccagctccacagccacagtcttctgacctctgcacatgctctgtggagcacagtcactcacatacatgcacaattataattaaaaattatagttaaaaaaattgtattaaaacattttttcgttatgtgtaccagtgttgcctgcatgtgtgtttatgcagcatttgtgtgcctggtgaccttgaaggccagaagagagtatcagatgccctagaaccagagcctcagaaagctgtgagctctcatgtcagtactgggaaccaaacctctggtaaagcagccagttctcttaattgctgaggagtcatcatcatccccccccccccccccgcttccccaaatacatttttagaaatatcctttttgtactttcttggcctatgtttctaccctcggcctgtcacatatcatagtccctggaatttgggctcactgctcttcacaattgagagtgcatattacaggaaaggtgttagagcagggtctggaccagccaataaaagaaagcagacacttccagcagcagaactgttcctgtaaccagaacagctgaaggaaatgagactatgtgcatgtgtgcgtgtgccactggctcttggcacttcataggacagaaaagaagggactttggggtggatgagtccatctgcaggtcagttctccctcaggctggaaggggtagacaccagtgggtttggtatgtgagtttccacgagtgttacctgtcaagtcaactttcctcagaccacctgaggcttttaggcaatcagctcttcagaagacaagacatggctctcagagggtattagatttatagggtttggcagctctgggggaagagttcaaggaacggaagtgtcctagtagggtttttattgctgtgaaaagacgccattgaaagatcctgacagaatgtaaaaggtcacagaagccctgaaattggcaagatagatgtcactgttagcagaactagcttcactgatttagaaaaatagaggcgcacaatgctctggccactccttgaacccttgtgtctgccaatgttttgaccgttccttgaacccatgtgtgtgcccactgatgaagcccattgccaggtgtttgtgatattggttgctgagaaagagtcagaaaatctccccagcaaccacagcccggccaatcctgagttgctacacctgcaccagactctttccttgtacccctcccatacccatttcttgagaatagacattgtttagatctggaaatcccctactccccaccttctccttttcccgctgagggcctataaaaactgggacctctttcccctcgaggtcgacccctctacccctgcgtgggatatgagtcgtccccagagctctggctttccccaataacgcctcatgtggtttacatcaagcttggtctatcgtgagttcttgggtgtctgctattgtcctgaggcctgagcgaggggctcctttcagagtctttcaccatgacttcagcaactcttttttgttgttgttcttttgttttttgtttttttcgagtcagggtttctctgtgtagccctggctgtcctggaactcactctgtagatcaggctggcctcgaactcagaaattcacctgcctctgcctcccaagtgctgggattaaaggtgtgcgccaccacacccggctgactacaactcttgtaaaggaaaacatttaattgaggctagtttacagtttcagaggtttagtctgttaccatcacggagaaaagcatggtggcatgcaggcagacatggtgctagagaaggagctgagagttctacatcttgatccaaaggcagccaggaggagactgtgtaccacactgggtgtagcttgagcatatatcacctcacagcccacctccacagtgatatacttcctcctacaccaaaaaggctacacctgctaatggtaccacctgctaatggtaccacctcctacggccatgcattcaaacacacgagcctatgggggccattcaaactcaaagcaccacaggaggctttgctatgaactggagactttcaggaaataggtataatcctatgaaacatactactctcaaatatactactttggtatgattgttaatttggggctgagggtactttaaaaaacagtaagaaagcttctaatcacacacacacacacacacacacacacacacacacaccacacacaccacacacacacacaccacacacaccacacacacacacacaccacacacaccacacactcactcatctaaaaccaaacgacaatatttcttacgaaaaatatcgctccttgaaccaaaagctggcattctctttggtttgcttgttgttatgtttgcttttgggttttactattatttacttgtttgcttggtttgagacagggacgcactgtgtagcttaaactggtctggaactcacagtgctgcccaggctagactcagactcaaaacatttttctgttttaacttgggtgggattgcaagtataagccaccacgtctgattaagagaataccagtatagacagtggtgtctcacacctttgatcccagcactcaggaggcagaggcaggtggatctctgtggaggccagcctgactacagactgagttctagaccacccagggctattggtgatatgctctctcaagcaacaacaaaaaagacacatgaagcacaccaaaacaaagtgtaaaaataaaatagatgaccattctgatcattacaggctaacaaaaccccgaagtggacctatacaaactcaagtgatttattttccctcataatcttcctagttaatatcttacaacttttttaggattcttttttgttgttgttgttgttttgtttgtttgtttttcgagacagggtttctctgtgtagccctggctgtcctggaactcactttgtagaccaggctggcctcgaactcagaaattaggattcatttttatttttatatttattttgtttttttttccaagacacggtttctttgtgtagtcttggctgtcctggaactcactttgtagaccagactggccttgaactcagaaatcctcctgcctctgcctcccaagtgctgagattaaaggcatgcgccaccactgctgggtttacttatttatttgttttgttttcccagggtttctctgcagccttggctatttatttacttatttaggttttccagacagtgtttctctgtagcctttgctgtcctggaactagcgctgcagactagacctacttctgcctcctaagtgctggaattaaaggcatattccaccactgaccagcttgtaatttttttttttttacttatgtgtatacatgtttctttatgtgcttatgtgtatatatggctgcatctgcctgcagagtccagaaaagggtgtctggtcttctggagctggagttacatataggtatttgtgagccacctgcctgggtactgggaacagaattcaggtcctctgaaaaagcagcaagctctcttagccattaaaccatctctccagccactaagctacaattcttaatttaagcacatcttaggacatccccattattggtgctgggttcagctttttattttcttctagagcatcattttaatttaaaataaaattaaactacattaaaacatataaattttacatatgtttatgtaagtatcatcttcataaggaatacattacttttgacacacacatattgtattctttaaattgggttaggcacatcttctcagatatcgtttgtggtgaaaacattcaaaacctttctacctttagaaaatatacagcaaacccattgtctgctgtcaccttgctgtgcaatagcatgccagattttctcactctttttcttttttaaagatttatttattattataaataattacactgtagctgtcttcagacactccagaagagggagtcagatctcattacagatggttgtgagccaccatgtcgttgctgagatgtgaactcaggacctttggaaaagcagtcagtgctcttaaccgctgagccatcgctccagccccagattttctcactcttatctgatccttacaagatatcagtgtagtccaggcaaactcttcatgcctcagcctcctcagtgttgggaattacacagagcctgccaccatagatacagctcttttctatagtatgaggtaaaatacattcatctgtaaagcgagaggaaagaatcaaatgctaaggctgtgattgggtaatcagaggcacttttttttttttttaagatttatttatttaatacactgtcatttcagaaacaccagaagagggcatcagatcccaatacagatggttgtgagccaccttgtggttgctgggaattgaactcaggacctctggaagagcagtcagtgctcttaaccactgagccatctctccagccctagagacacctattattaatgggggaaatgagaaatatttagccacacttgaatctttgctctttttaagacataaactacctacttttatctgtctctgtctctctctctctctctttgttgttcttcgagacagggtttctctgcgtaggtcaccggattgctggaacgtgtacaccaggctggcctgaaacgccgcctggctccgcctccagcgtgcagggtttacggccagcgctccctcctcaggttcaaataatcggctttcttcagatccagcacaagccaaggcccagctcctagggagttaaaataaaaaaccctccctgtgagctgcacacgttactccggaagaggaggagcggccgggggcgggccgtgcccgagggggtggggcagtccggggcagttccgggggcaagacagccccctactgtggcaatcccgagggggcggggcagttccaaggggcgggacagccctgaggggacggggcggggctaaaagtaaagcagcccggaggagcgtttggcgcgaaggtgtcttagctgcgctacctgcgacggcgctgcctcatacgtagtcccttcctgttttctccacggaggcttttccactccttgcttcgttattttgccacagagcttgatatctcttcaccaagtacgtcatggctcccaagaaatgcccagaaacccagaagtcccccgacgttgcggtgctcctcaggagcaaaagtcgcagaggtcctcaggagctggagcccgaagccaagaagctgcgtgtgcagggtcccggtacggcctgtgctgctgccttagctttccgggggttcagggtgctcgcgccagaggctgaagctggggtggtgggtgcttgtgcctgggcttctgaagcagttcctggcttctgtcgcctcaggctgtgattttatttgggagatcgagggttcgaacccaggcctccagttctctcagcaagtgggctgccactgagccacacgctaccgactggttttattggccagttcattgacagcagagagttttaagttgaacagcccccccacctctaccccaggtgacagagtcagatgagtgccatcaccgtaaaagccacagtccccactttccttgttccagaagttttacacatctactgtttcaaagtaatcctccctttcatagcctctcggttatgttagctctgagagtctgaaattccctccctcctttcttcagaaagcgcattctcagaggtttaccaggacttgaacctggggctataaggaatgtgataaattgatagagtggttttagccatgaaaagaaaggaaagttgtcaagagaaaaaaaggacttatagattgggtccaccagaagggcttggtaattcagagttgttttatttatttgtttgtttgtttatttatttatttatttagtttttcgagacagggtttttctgtgtagccctggctgtcctcagaactcagaaatccgcctgcctctgtctcccaagtgctgggaataaaggcgtgtgccaccattcccggcttatttttattatactctgatttacctctcttccttgaagccacctaatcaatttggaacttttctaaaccttactgcattcttctggtttccactcaagtaatggttgctcatgacattatttagtatttctttaaatacagagtcttgctctatagcccaggctggcctccaatccaagtatgctgcagcttctgagtgctaggattacagttatacaccactgtatttggatagctcttattttatttttttaagatttattttatttaatgtatgagtccactgtagctgtcttcagatacaccagaagagggcatcggatcccatttccgatggttgtgagccaccatgtagttgctggaaattgaactcaggacctctggaagagcagttagtgctcttaaccacagctgagccatctcaccagccctgatgttattttgtgatctttaagattgtccctcaaaaaaaaaaaaaaaaaaaaaaaaacaaacgggcgtggtggcacacgcctttaatcccagcactcgggaggcagaggcaggcgaatttctgagttcgaggccagcctggtctacaaagtgagttccaggacagccagggctacacagagaaaccctatcttgaaaaataaaaacaaacaaacaaccaaaaacaacaacaacaacaaaaaagattgtccctcaactcctacttatttgtgatcccacacaagaaaagtcttcagtgtccacaattgtgtatctctctggcaaagctctaaggaaccctgtgaggttatatttagtttcacttcagaatttctgtttggaggagtgttttggaaaagggttttttatttctctcttgggttgagtgagactcaactgcagagaaaggcttttaaggagatgatgagacaaagggttttcagggggaacctttcctgagatttgggagaggaaaatgtttgtattcttctttggtagtttctagcaggacatgtgagtcgtgctgccttctggcagagttgtccagcctgcagatcccttcacggagtagcagcattgtcagggatctttaccagcataagttgggcaaagccacctggtcatcactacagcaggtgagatgtttcctgtctgacgtgctcaaaggtcacatagcttttcaactattgctctttctcactagatgataaattggttcaggatcatcaggtcacccccaggtatgatgattgacctactgtacactgagtcaaagagaaaaggttttactctgtagacttctagccacaacatgcgttctccctcttgctttccaggattagttcacttacattgcagatagttgatgcacaaggccagtgaagacttattgcctgtatataaaggggccagacattgacagtttatccaggacttgcgtttaatttttatttatgttttgagacacaatctcactgtgtagccttagctggcctggtcctctgtatgtagacctggctggcttcagtctcacagaaatccacctgcctctacctcctgagtactggagttaaaggcatgcatcactgtcagctcaggacatgagttttaattcagtgaatccagattaattctattttctctgtattagggtctgcagaagtcctttttgcactctctagcttcttaccaggtattccgaaaagctgccccctttgacaggaggactacgtccttggcatggcacccgactcatcccagtaccctggctgtgggctccaaagggggagatattatgatctggaactttggcatcaaggacaaacctatcttccttaaaggggtaagtggctatatgtgccagatggttatgctataaaacttgttttttggaggaatggaaggaatgttgatatcctgtagcaaggtggttgagaacaaaagtaactgggtgttttcaagcttataaatggtaacaaaattcaaatatgttttgaatgctggcctttaaaatattagaaggtatagactgtagggtcatccatagggtctagcattcctcttcctcttcctcctcttcttcttcttttaaagatttatttattattatatctaagtacactgtagctgtcttcagacacatcagaagaggtcatcagatgtcattacggatggttgtgagccaccatgtggctgctgagatttgaactcaggaccttcagaagagaagtcagtgctcttaacctctgagccatctctccagcccccctcttcttcttcttcatcttctttttgagatagaatttcacgatgtagcttgaatgcctgcctgtagaccagacttgcttcagattcatggagacctgcctgccttggccatgcccttctgcatcccttcttacttcacctcattttgtccgtctttcctgtgtcagttagttttccattcctgtgacagtacctgagagaaatgattcagaggaagaacgacagctgtagaggtttccgtccatgcttgtttgctttgcggccatcatggtagaagaggatggtggagcagtgcttgctgctcacctcacagcagtcaggaagcagggagaatgaattgcaagggtctggagtaagtgatggccttgtcccccagagactgctgcctctaaccggaccccacgtcctattagcccattcatcttgaaactcatcgataaattaaagcagcgatgaagctatccccctcatgatgcagttacctttcaatagttccatcatctggaggagcagaccttcaatatatgagccttgggtcagggagggggcagttcatacccaaaccatagtatttcccatgcttcaggtataccagctacttcctgggactctggacttgattttccctttggctggagttctcttttctatagtttgctcatggctgcctcccacttacagttcaggtctctgtgtaatttgcctttttaaaaaagatttaaattatttttatttttgcatatgagtgtttttcatgcatgtaccatatgcataccatatgcatacctggcatcttcagaggccaggagtgagcatcagatcctttggaactggagttaaaaatggttgtgggctgccgaatgaatgctcagaaccaaacctgggtcttttgcaaaagcaacgagtgcttttagcagctgaggtatatctctccagttcctaatctgccttttactattcattcattcattcatttatttttgaaacagggtttcactatgtagctttgggtggcctagaactatttagaccaaatttgtctcaaactcataaagattcacctgcctctgccccaggagtgctgccattaaaggtatgtgccattcattgatctaccttgttaaagaggaaggagcccctgcccaacccaatcacttcctaaataattgctctgctttacaatgttccccaaatatttatcagtatttgaaatattgcatttctctgtcgtgcccattggaaaataattatggctgcagggaccttgtctttctgctttattactatatcttcagggcctagaacaatctttggcatagagtagctactttgtatttgttgaatgaatgaggggcttgaactacagctggatcaaattctctaaaacagtaaagaagagtctctgggagttagatgttgtcaaagtcttcagggatgactaaagaatactatttaaataatcaggagacaagaggaaagtcatggtgctgtcaggtgtcaggcaagattggaagatttgatgtagagtttaggtgctttgttgtcatagcctgccctgcttctgttgttagggctcaaaggcaagccttttaccacagaactacattttgatgtcctcacttaagtttctattttaggtttgatttgtagtttttttgagatagggtctcactatgtagctctaattggcctggaactttctatttagattgggctagctttgagcttacatagattttctgcctctgcctcgtgaatactggaattaaagatatgtgccgtggctgggcagtggtggtgcatgcctttaatcccagcacttgggagacagagacaggtagatttctgagttctaggctagcctggtctacaaagtgagttccaggacagccagggctacacagagaaactatgtctcaaaaaacaaaacaaaacaaacaaacaaacaaaaaacaaaacaaaaagatacatgccacaatgcctggctatttgatattctggaaaggggatctcattttagcccaggctgtccttgaacccctatataagtaagaatgaattccagatgtttctgctatttccatttctcacatatggaattatagacatgtatcaccatgcccacagtccccttaggaatggtctaaaatgctaagatttatgttcagtctctaaggtgttggctgtttaggaaacttaccttatttggttggtaacggacattggagagttgttctataaaaatgactttatagttttagaacttaagttaaaaactcaatagacctcaagaagccaaacaggttcgtggtggaaagataaactgttaatagtaaagagacaatttttatgataaaaaaatgtaagtcttaaattttttggatataattttttttctttttcaaataaagcctgaaaatatatgaatggtttctatgagtgctgtatggtttttgttgttgttttgtttgtttggttttagttttcttttttttttttaagattttatttatatgagtacatgtcttcagacacaccagaagtgggcatcagatcccattacagatggttgtgagccaccaggtggttgctgggaattgaactcaggacctctggaagagcagtcagtgctcttaaccgctgagccatctctccaacccttgttttcttatttttaagatggggtcttactttgcggcccttgattgtttggaacttacagagatctaccagtctctgtctccagagtggtagaattaaacggaggtgttacaatgtccagttattatcgtttgagatcagatctactagtaatccaggttggccttaaattccctatgtagcctactcctaactttcaaaagatccaaaattggagattgtgagatggctcagcaattaagagcactggctgctcttccagaggtcctgagttcaattcccagcaaccacatggtggctcacaaccatctgtaatgggatctgatgttctcttctggcctgcaggtgcacatgcagatagcattcatgcattaaaaaaaaaaaaaagttttaaaaaaatcaaaatggatataacatcaagtaccattttaaaaattatttttgttttaaaacacatacaaaataccatattaaccactttattttaatttttgagacaaggtcccattatgttgccctagctggcccaaaacttctaggttggagtaattcctaaatagttgagacttggaccagcttatggtatctagcctaatactggcattaggtaacagtcttcattggttttaaatgtttttgtggttaagtaaaataaagcacacatctgagcttgctcatgttctagcttaccgtttctcccactatagttttagaattgaaagaggtgaagctgtatcccagatgaggcctctaatttaaatgaaaattttgggaaagcagctcatctgaaaggccaggttagacaggcatgggagaccaggagttcaagtctgagatgggtgtcaggaaaacagggctgtgtagattccccactcccaccccaacccccacccagtgcaggctacaaaacaggtgacttccaggagaggttgtttaaatttaagccagaacaaagaattccagcaagagattttcatttccccaggaatctaggacacaggaatagagaaatacagttatgcctggaggtggtaaagagcctgaaatattctagggaacagcatcatgatgaaaaggagaaagacagctgctttgagtttgtgccagaccgagctgcttttgtttttgcacactccacccctcagttttgtagaagagggtgctgaagggctccacatagctaagcatacttctgttcctgagccatacaccatatcgccctatattacctcttcttatactgttatatatgtatattatatatgctgtgtattatattacatgcatagaactgaagtttccttacactgccatggagattggtttgagcattgagttttgtgcttcacaggaagctagcttggggcagagagcaggtatgctggtatagaggactttgtttaccccagatgttgataggaagttggcttgagaacagttacaggaaacagtagggccatggtttgtaacttttgtcatctgatcttggctttggtcttgacatctttcaaatccttggtgaggtactacacattacattttcaaagtgaaaagatatttaatgaatttttgtaaaatttatgtctgttataaaattcaagtaatagaagtttaaagatttaagtaaatatccaaaacaatccattttaaacatttctctggacacatccatttttctcttcagtattgctacacaaatattctatcatagattgttgtgcttaacttatgtcaaatatgtatgttttatacactagtacccaggttagccttgaactcactatgtaaggatgatcttgaactgtttgtttgtttgtttgtttgtttgagacagggtttctctgtgtagccctggctgtcctggaactcactctgtagaccaggctggccttgaactcacaggagatccacctgcctttgtctcttcagtgctgtgattaaaggcatacactgccactgcctggctgatcttgaacttttgatccacctgtctcacctgggattacaagtgcgtccacaattctcttttcttttttctttcttatcgtcatcattgtcaccttttgttttagtgtcagtgtaatgctggcctttttaaacgagttggaaagtactccctctgctttagttttctggaaattgtatagaattggtattatttcaacttttaattctgcgtgtgtgtgtgtatgctgcatatgagttgtacatgtacatatggatgatcatacacatgtatgtgtagaggctagaagtttgatgttggatgtcttccttagtcactctccactttaatttttgaggcagagtctctcactgaaccaggagctcaactatttggctagggtggctggcaacaagttctagggatccacctatttctatctccccagctaacagcacagacatgcagttccactgtggcaaagctttttatatggatactcagaaagaatcagaactctggttttcatacttgcacaacaagcaatttcctaattgagccacctcctctgccttccttatttcttgtatagaatttattagcaaagtcatttgtgcctggagggttttttcccttcatttaattttaatattagtttttgtccttgttttgtttgtttgtttgtttgtttgttgagatggctctctgtgtaacagtcttggctgtcctggaactcattttgtaaaatcaggcttgcctctgccttccaagtgctgggattaaaggtgtgcagcaccatgcccagcaccttctcattttagaaaactatttctttttctttttttttcttgttgctttatttttatttttaattatgtgtaaatttgannnnnnnnnnnnnnnnnnnnnnnnnnnnnnnnnnnnnnnnnnnnnnnnnnnnnnnnnnnnnnnnnnnnnnnnnnnnnnnnnnnnnnnnnnnnnnnnnnnnnnnnnnnnnnnnncctccctccctccctccctcccttccttccttccttccttccttttcgttgtttgtttctgaaattacatttgtgtagtgtatggccaggtaccatgaatgcatgtaaagggtaaaggacaactttctttcttgtttgtttgtttgtttgtttgtttgtttgtttgtttgtttttcgagacagagtttctctgtatagccctggctgtcctggaactaattttgtagaccaggctggcctcgaactcagaaatctgcctgcctctgcctccccagtgctgggattaaaggcgttgtgtgtgtgtgtgtgtgtgttcttaagaccaagtgtcactgtatagccctagttggtcgtaaaccaacagtcctgaggccagctatagtgttagaatattttagaggtgcatagggggtgttgggggattgaaccctgggctttgtacatgctaagcatgaactctaagttacaacccttggccccactttttaacaatgtagagtacatttttaaaaagatttatctgttttatttttatgtatatgagtgttttgtttacttgtatgtatgtgttaggaggtcagaagaaggggttgaattccctggaactggaatcacagatggttatggcccactgtgtgggtgctgggaatcaaatgtggatcctctgcaagaacaagtgctcttaactgcttagccatctctctagcataattcaccacccttttctttgagataggatctctatatagccctggctgtcccagaactgcttttgtagaccaagctgacctggaactctgcttcctccattctgtattcatcaccattcgtagctttaaagatttgctaaagtgtagaaaatatttatatttgtctattgttacttccactgcttcattctctctctctcttttttttagatttatttattttatgtatatgagtacactgtagctgtacagatggttgagagccttcatttggttgttggtaattgaatttttatgactactgctctatctggtcagccctgctcccttcggtcaactgtgcttgctcaggcccaaagacttatttattattatacataagtacaccgtagctgtcttcagatgcgctggaagagggcgtcagatctcattatgggtggtttctgggattagaactcaggaccttcaaaagagcagtcagtgctcttacccgttgagccatctccccaaccccactgtttcattcttttgtgtgttctagatttcttcttagaaacatcttcctttatctgaagaaattcaattactattttatataatatagattagttgatgatgaaatctttccatttctatttgcctaaaagagaattttgctgtatttttaagtaaggtgtttttattagatagagaattctatatctataatttttaggaaatcaatgaaaaattattttacatttattgcttgtgaaaatgagtacttgagtatatgagaatcagaggacaacttgtgggagttggttctcttctccaccacatgggttctggggattagactcaggttgtcagtcttggcagcaagtgcttttgcctattgagctgtctcactggccctaaaattacattttaatttacaaataaagacattgatatatttatgttgcacaatgtgttgttggttcattttttttcaatacttcaaagatgcttttttaaaattatttacttttcttattttaatttaaattatgtatgtgtgtgtgtataattgcaggtgctctcagagttcagaaggtatcagatcacttggactgatatgaactggctaagctcagttctgggaaccaaactcaggccctcttcaagaatacttaactgctaagccatctccagccccttagaaagatgctttttagtgggaggtttgccaccatccttataaaatttctatatatgaatatgttttctggttcctctaaaagattctcatgtaatttatgtacatgtaatacacagcacactcacgtagtcacagcacttaaggccactgcagtctacatgctgattcggagcccaatctgtctacatgacagcctgcctcaaaaataaataaataaataaataaataaataaataaataaataattaacaaaaataaaaagaggtggggcagtggtggtacaagccattaaccccagtgtttgggaggcagaggcaggaagagttccaggacagccagggctacacagacaaactttgtcttgaaaaaacaaaaatagtaaataaaaataaagcaagctgagccgggtgtagtggtgcacgcctttaatcccagcactcgggaggcagaggcaggcagatttctgagtttgaggccaacctggtctacaaagtgagttccaggatagccagggctatatagagaaaccctgtctcaaaaactcccccaaaataaataaataaataaataaacaaacaaagcaaaagattgtgatgtgcctcttaattttccaagtttcatcagcttgctatcattgagcttcaaccaatgggtttatagttgtcaccaaatttggcagttttcaggccactttttccccagtagtttcttcccccttgtctcctcctgtttctttttctcccctttctactcccctctttccccatctgcctgcctctgtctcctgagtgacgggattaaaggcatgtactgccatgcctggccttttattttttcttttttaagtttttatacaatatattttggtaagccaggcagtggtagcacacacctttaatcccagcatttgggaggcagaggcagaggcaggtggatctctgggtttaaggccagcttagtctacatacatagtgagttccaggacagcaggggatagacaaagaaaccctgtctcgaaaaacaaataagcaagcaagtacacaaacaaaagaaaaaatgttttttgtgttttctctcaatttctccctgattctccccacctccctgccacccagctttctgttatttctctctcaataaaaacaaaaccaaaaatccccaagaaaacacacacacacacataccccaagatggaaaaataaacaagtaaaagacaaataaggtaaaaatatgcccaaacagccagctatactggtcatgcttttaatctcagcacttaagaggcaaagacaggcagaacttggggctggagagatggctcagaggttaaatgcacagactactcttccagaggtcctgagttcaagtcccagcaaccacatggtggctcacaaccatctggaatgggatctgatgccctcttcaggtgtgtctgaagacaggaacagtgtactcatatacataaaataaataaatctttaaaaaaaaagttccaggacagtcagagctacatattttttcaggtgaaaaaaatttttttaaagagccaaacaaaaataacacaaaagtctacaaatatatcattgagtaattttgtgttggccaactactgagcatggatggggcctgccctgaagtgtggttaatatatccagtagataccctagatattaagatattggtatagtgttgcttcacagtctgtaatcttagcactcgggaagaaaagacaggacaaaaagatgtaggccaggctgggctgaatagtgaaaaaatcccattggagatgagattacagatcagtttaaagattttctccaactaatttgtggcatttttatttcctcacatacatttacacaatagtactcagtcaaagcctggaggaagtccgtgggaaaatctccagtgttctctgtccatctgcctcctcaaaaccatgttgacagtctctctgcccatctaactgacacatggtggctattgttctcccaccctagcctggatatattctccaagcaagaagcttgcacagttgcaagctaacctcattacttttccatcctttgttgtctgcctattgcatatgtattgtaaatgtgtttcatgtattttgttcatttttctagttgtttaaaacatgaggtgtgtttgatttctgatattagcatggctagaagcagaaatctacatttattaattgtcatagtttatctggagattttaaatgtttttcgtacccagtggctagtgagatggctcaatgggtaatgaggacagaattccaatctccagtagatggcatggtagtccacctgtaatctcagcatgggaaacaagtgcctgctcagctttgccttacttttcctgctgtgccatcatactgtcccactgtgttcttatgagacagagtctcttagtggcttggagttcaccagttagggtcggctggaggtaagctccaagaatctcttgtctgactccctagtgtggctttacaagtgagcatcaccatcccagcgttctatgcaggtgctaggtgttgaactcagttgcgtacttgtgcagcaaggacttcagagctaccctccctcttgttctattgataagggtcatgcagttcaggctggcttcacttatggcagacttcttcccttagcctctcaagtgctgggattacagcacacacaaccacacctggcagaactctacttaaaacatttttccctcctttgggctggtgagatggctcagaagttaagagctttgcttctgcagaagatctggtgtctattcccagctcccacatggtggctcaaaaacatccatgatttgtcccaggggagtcaagactcttttctgacttccagggtcatcaggcatgcatgtggtacacatgcatagatgcaggtaaaacactcataaaataaacccaaaaagttttgggggggttggtttgaagggtttttggttttgtttttattttgttttctctgtgaggctagagagatggctcagcagttaagaccactgactgctcttacagaggacctgggttcatttctcagcactcacatgtgggcttgctcctctcttctggtctccactggtactagtcacacatgtggtaaacaggcatacatgcaggacaaacacctatacacataataataaatatgaaaactgcagctcaagatttaactttatcctatataatcttattacctaaatgataaaagtttaatttctttgtcactcttgtactatttattcccactctctctttgacatagacctctagtatgatggtaaatatgtggctattccatatgtccttgtcatttttgtttttaaatgctcatttaagaaattttcactacagccgggcgtggtggcgcacgcctttaatcccagcactcgggaggcagaggcaggtggatctcttgagttcgaggccagcctggtctacaaagtgagttccaggacagccagggctatacagagaaaccctgtctcgaaaaaccaaaaaaaaaaaaaaaaaaaaaaaagaaattttcactagcccagagtagtattaagcgtgcattcctgccttagttcctgagtgccactatgcttggccttctttaataaggctacataatgttgtattacatactctacattcccacatttttttcttttttaaaattttattcagttttaagtatggatgtgtgtgtgacttgcagtgtccgtagaggccaggagaggatgtcagatctcctggagctggaattaatgacagttgtgagctatcatgtgggtgctggaaattgaacccaggtcctctgtaagaacagccagtgctcttaatagctgagccatctctccagcaccaaacccacattttcctatagattggcagctgaattgatttcaccactggactattgtaataaatgtaattattgtaaatgatgttgtaatgaagatgggtgtgtccacagctctttgagattgcctgcattccattctttgggatgtatagccaacaatgggattgctggatcaaatgctaatgcttctttttgaggaacccctatactgttctcaatagccagtaccatcttgaattgcattgccatcaagaatgcacaagatgaagccaggcggtggtggcgcacgcctttaatcccagcacttgggaagcagaggcaggcagatttctgagtttgaggccagcctggtctacaaagttgagttccaggacagccaggactatacagagaaaccctgtctcaaaaaacaaaacaaaacaaaacaaaacaaaacaaaacaaaacaaaaagtgcacaagatggggcaggggggaaccttaatcagaatatattatattttttaaaatatattttcaatacaaaataatttttttaaaagactgcacaagaattcccgttcgtccaaatcctcaccaacattactttctgtcctttgtaaggtgtggaggtggtattgtagcttccttgtgtttctctaagcggtgatgagtaccttttcatatatttgttggacatctgtgtgtcttttagtggatgtttggagttttgtttgttgtttagttatggttttaagttaatatgactattaacctcttctctttatgacttccaagtattttcttccattctataggttgctttttcatttttgtttcctttgatgcttaattaaattttgttttcttgtttgtttgtgttttgaaccaagttctgttttagaaataagacccaagtagccttgaacttttgcctagtgctgggattacaggcacatgctaccatttccaggccaacgttaacattgctacctgggataaacccatcctaatcataatgtacttgaccttttgaaatcatcactggacttagtttgatgatattcttcagaacttgccttttttgtgttcatgtataaaatttcccagtaattcttctaaattctttgacagatttgcatagcaaggttacacttaccttaaatttggaaattatccactctttttagccagtggattgttcaggattgacatccatactttgccacctcctctttccttacctttccgaatagtcaacccaaaaatcattaagtaggggcaagcagacacttacacagtagggaggccacaatggcctcagaccagtttctggatcccattaagttgagatggatgtcagtgcaggttgtatcagaatggtagcttagcaatacagttagggcctaaacaggataaggccagccattcagcaggtaggagagagggatggggggcagcggtgatgtcctgaaatagcgaagcctgatcaactagtggaaacagtaaattgtcttactagcagcaaaggtttaagagacaatggacaactggttagcacattcttatagctgggagtggtggcacaccttcaatcctggccctgagggggcacaggtatgcagatatctgagttccagactctccagggctacagcgctatctatctagagaccctatctaaaaacaaaacaaaaccagagcatgccagtatattaagtcagttaagtgtttgttatattgatgaccttgttcaaagttagaggcttttacagcagtataagaagtggaaaaagatctcctgaagatgccaagttcttaaaacagtgcttggtatatgaccagctcgctcgcttgcttgcttgcttgcttgcttgctttctttctttctttctttctttctttctttctctctctctctttctctctctctttctctcttttttctctctctttttctcttttttctctctttctctctctctttcttttctttcctccnnnnnnnnnnnnnnnnnnnnnnnnnnnnnnnnnnnnnnnnnnnnnnnnnnnnnnnnnnnnnnnnnnnnnnnnnnnnnnnnnnnnnnnnnnnnnnnnnnnnnnnnnnnnnnnntcttcttcttcttcttctccttctccttctccttctccttctccttctcctcctcctcctcttcctcctcctcctcctctctctctcactctctctctcctccctccctcctcccctccccttcctccctccttctctccctccctttcccctctctcctttcaaaacagggtttctctgtataacagctctggctcacctggaaccagctttgtagaacaggctggcctcaaacaaacagaaatctacctgtctctttctactcaatgctgggattaaaggcatgtacatcactgcctggctttagctcttactgtatttgttactttatttgagacagtctattagccctggaactatatatagtcctgaaactcactatgtagaccaagtaggccttgaaatcggagatctgttctgcctctcaactgctggctaatggtgtgtgctcctattcctggcttggttggttggttggttggttatttatttatttgtgtgtttgtgtgtgtatgtgtgtgtgtgtgtgtgtgtgtgtgtgtgtatgtgtgtgtatgtgtgtatacatgcatgtatgccttgtgtacaggaggccagaagagggtattggatgccctggagttggagttatatgcagtttgagccatcttatgtagatgctaggaactgaactccaaacagcagtaggtgctcttcaccatgaagccatctctctagcctcttaataaatgttaagccataggtgttactccccacttttctaatttgtagggggtggggaggatgtgtgtagttgggggtcaaacccagggccttgtgcatactaggcaagtgttcttacacttcctagacctccaggctcagttgtgtcatcactgcttaaaatgtctggaaggacaggaaagaatacagatagttccctgtccaccaaacatcgcttttttttgagctgaagctcttataacaagagcatgctgcggtttccaaggtttgaacgtgagaatgtaagccagaaatgtgataaagtagggcagcatgagggagtttttatgaagtcaatgtttgcatcttaattttgggggtggctaggctattcagatatttgtgtgtgttgaaattcgaagagccgtgtaccagaaccagtcatatttactacctcttaatcgacaatataaaagtcaaaataaagccttaaaaacagatattctaatgtgaggtatctaagctggccttggtgttgctgcctcggtgctgtctgggtgcccagacccggccccgcacttctggcccatcattactcactggctttttccttccttatgttagattggagctggaggaagcatcactgggctgaagtttaaccatctcaataccaaccagttttttgcctcctcaatggagggaacaaccaggctgcaggattttaaaggcaacattctcagagtttataccagctcaaactcttgcaagtgagtagttaacttgtaagggaaatggcttctaagctctagatgcagtttgctgagaacatacccagttctgtttctgtcactttggcccagcacagggaagacagggatcttagccactttgcaccattccttttcctccttagattctggtggctctgactttgacctgagtgggtcgttacactaggaaggcattctggatccttagctcttgtctttgatggaagggcttaattacttctgtaagttatagctgtattaaattagacctttactttcacaggataaatcaacatggtattttgcttggaaaggtatttacagagtagagcaggaatcaaggacaagtttagccacgtgtggtggtatttacctttaatggcagcacttgggaggcagaggcttgtggatcactatgagctctaagtcagctgggtccgtctagaactacatagtgagggcctatcttaagaaaagaaagaaaaaaggggggcaggaaagaaaaaaaaagaagtgcaatgttattgccctccattttccgggatgtaatggccttgctgtctccttggtggcagtgttaacaggtggaagaatcctcctaagaataagtggctggagaaattacacatgcaggccactttgatgtctagccagagacacagttttgctaaggatgatatgtgggtgtgtgcagtgagtctaagcagcttggttattattctgggctgtcccataaggttgagaacaacatcaggagaggggactagatggacttggagttctcttggcttcgaatcagcatccatgaaatacctgcttcttgagtctcttttttctcacatagttttcgagagtaaaaaggttctggtagtctttgatttttttttttttccctaaatgctcagaaggggacagatgttcacgtctagccagcttcgaggagctccgctgaacagttcctgtttgctttgccctctcctttggtgcaaagactgaggagtgatgagtgggaatagtaaataaaactcttcattcctgggctgtggggagcaagctagccttgtaatttgtattcttgctctgaggttccaggaactagctgaggattctgggctcagcaataactggacacatttctgagttctgtcaactctttctgtactctttcacagcccttttctgcaaggtaaacaaggctgaaaaccctccactggaaatttatagtaagacagttactcactgattcaacaaatacttgatactggagttgtcacagtgactaaacagactatctcagtctcgaagggtcttacagcacactctctccctctagggtctggttttgcagccttgatgtttctgccaagagcagagtggtggttacaggagacaatatgggacatgtgatcctgttgagcacagatggcaaggaggtgggtactgtgtggcccacgccccatcccctcacccctctttggttcaacacctgaaccaaacttttctctgtagctttggaacctccgaatgcacaagaagaaagtagcccacgtggccctgaatccctgctgtgattggcttctggccacagcctccatagatcaaacagtgaagatttgggacctgcgccaaattaaagggaaagacagcttcctctactcactgcctcacaggcatcctgtcaatgcaggtgtgacatcccaaaccccatcttccttatgtgccctgtctttctcaccaccagccatcaggtcaatggtgtgtaggaccctttctggctccgaccgctcctttggcagtggagttgccatggtagttttgttcatagttcagattgatctctcctcccctacctagaaaggaaaggtattttggaagatcaggataccaggggctgaggcttccttcagcttaagggcttttcactttgtcagcttgttttagcccagatggagctcggctcctgactactgaccagaacaatgagattcgggtttactctgcctcccagtgggatagccccctgaatctgatctcccaccctcaccgccattttcagcacctcacacccatcaaggtgagtgacaagagaaagggatctgtcattatgggaaggggacagatctttccatgttgggggaagggtcacatacacagcctacaatctcagaataactgacacaaaataggccccttaatcctttggctttatcttttccttttatcccatttctgtaattccattaagagttctgtctttttgaggtaaggtcttactatgtatccctggctaacctagaatttgctacatagactaagctagtcttgacctagtagagatcatctgcttctgcttcccaagtgtctggtgttaaaggcatgcaccaacatccacaccaagtacccactgagttttcttagtatatcttatcagctaactttctaaacttttcagcctagcatcgatcttactgtgggcattttctatgaccttgatcttttgctctgccttctgtttcagtttccatgttttgcagctgacccataaactaacctaacattattggatttccttacaggtttaagtggtttctaacaatagaaatatgacccttagtttcccaatttagacctctgtttcttctgtaagatgtacctaactggtagggttttgtgaagatgagtcaggatacataaaacacctgacaccatgataagtacttcataaacacttttaaataaagcttagtatctcacatacttcaaatcaaaaccaataataagcaatattaagaattcttctgaagccaggtattgtggcacatgcctttaatccctgcacgtgggaggcagaggcaggcggatctatgtgcgttcaaggccagccatgactacatattgagattctgtcacatgcacacaaaaggatttttctgaggctgttgctcagtagtagagtgtttacctagtatgcaaaatattaggggtaccatgatggcatacataaattatcaggtgtggtagtatacactggtaattctggcacctggggggtagaagcaggagttcacagccagttatcgctcttgctaggctgggtgctcttctgtcccatcatatccattgatgacaacatctatttttgtttctgcaactacttccaagccactgcacgtaccaattttctcttaaatatcatttatttaatgtgtatgggttacttttttctctttaagagatatatatagatcatattatatatatatatatatataaagagaatatatatatatatatagtgagagatgggtactttctttatgtacatctgtacacctgaagatggcatcagacagttgtgagctgtcatgtgggtgctgggaattgaactcaggacctttgaaggagcagtgagtgctcttaaccattgagccatctctccaggtgcatgtatggacgttttatctgcatacatgtctgtgtaccatgtgcatatgtgcccttggaggtaagagggcatgggatctcatgaaactggagttacagatgattgtgagctaacattgtaggtgctaggaaacctatgtcctctgaaagagccagtgcatttaaccattgagttgtctctcaagcccctcttctcttgatcttctctttcttccttcaaaactgccttaaagccatgcaaggggcacaaagtataatcctagcacttcaggttgaggaaggattgtcgattttaggattgctgggctacacagtataacctctgtctcataaaaatcaagaactgtcttgaaattaggaaaagcctaattcaattctatcacaaaaaaaccctgctagatttgttttgagtggtatggtctagggaatgaaggttttctttccttttcccttcataccagtaactttatatccaagtctttgttatgcatggatagaggaagattagtagtggagccacttcagaacctaagtcctttggtggtgtttaccagaggctttttgttctgttataggtttatctcttaggttaaagtctaaataaggttgcttggcaataatagtaaacacctccaatattaacacttaagagacagaggcaggcagatctctgagtttgaagccagcctggtctgcagagggagttccaggacaaccagggctacacagagaaattgtcttggtagaaaaaacaaacaaaacaacaacaacaacaaaagatccaacccccctccccagcatccttcctccaaaagatctgaacaaggctggtggaaaaacatttgttaagagccagaggtgctcagtggttaagaccgtgcctagcatgcacaaaggttcagccccagaattacaaaaacaaacaaacaaacaaacaacaaaacaaaaatgcccaagttggtatcaccttaagaaactgcaggaaaggagctagagagatggctcagtgattaaaaacaatgctgttctttcagaggacctgagtttaaatcccagtacctacatgctagctcacaactacctctaactcttcttccagtgcccttttctggtctctgccgtcgtacttaacttatagtatacttacatacatgcaagcaaaatactcacgcatataagaaataagtctttaccaggtggtggtggtggttcatgcctttaatcccagtagtttgaggccatctggatctacagagcaagtttcaggacagccaggagtacatagagtaagatatatacaaaaatcggttttaaaatatctttaaaataaaagaagagaaaaggtctgaggcatcctaaggacctggaaagcaagtatgtacaatgtagggcaactcacttttaagtcccctcctacatatgcaatagtcctggctagcctgactatgtaaaccagggcagccaggtttacacagagaagtcttttaaaaaccaaaaccacttttatttattaatgttatgtgtgtgcctataccctcatgccacagtgggcagagttggtttttccctcccacaacatggactctggggatcaaactcaggttatcaggcttggttgggatcagatgcctttatctgctgagtgatctagtcagccctcatacttgtcttatatgcagtattggattcttcttgacctatgagctgttaaaaaaagagaaaaatatgcatatatacatatattgtcatatacactcactgtgtatgtatatagtccagaagagggcactgtatcacctggaagtggagttacagacagttatgagctggcatgtaggtactaggaattaaactcaggttccctctgcaagaatagcatgtgttcttaaccactgagtcatctctctagctcctctcttatagtttctttctttctctctctctctttctctctctttttttttcaagacagtttctctgtgtagcccttgctgtcctggaactcactttgtagaccaggctggcctcgaactcaaatccgcttgcctctgcctcccaagtgctgggattaaaggcgtgcaccaccacagcccagcttttctcttgcagtttcttaagatgataccaacttgggcatttttgtttttttttttttttgcaattctggggactgaacacttgtgcatgctaagtaagatctttaccacttaacacctctggctcttaacaaatgttttcccattatccttgttcagacttttgttttttcaagacagggtttctgtgcagaccaggctggcctgtgtgtgagattctgcgatcaaacatacagccttgtgtatgctatataggtgctctgccacagaactggatatccagcccttaaaaaatactttgtgtgtgaaggctagaggttgacagcaggtgtctttctcagttgttctccatcttatttttgaaacggtttctcactgtacctggaacccactgatttggctggagtagatagctagcaagttctgggcatcctgtctccacccccagctggaattcaggtgcatcaggacaagatttgtataggaatgctggggatccaaactcaagtgtacttataccaaccaagtcctcgtccctaactccaaaaaatactttaaattctgactgacctctctgtttcctaggcgacctggcattcacggcacaacctcattgttgtgggccgatacccagatcctaatcttaaaagttgtgttccctatgaactaaggacaatagatgtgtttgatggaagctcagggaagatgatgtgtcagctctatgatccaggatactccggtattacttcggtgagacttgggcccccaaacagtgatgggaggaagcagggaatttctcattagaagtagtccccatttactgcctctgtactgccttcaacccagcttcacaccgatactcttacttttgtagctcaatgagttcaatcctatgggagacacactggcctctactatgggtgagtaaaagcaactgtatctcaaactgtctaagcctggccctatccgaggctgcagtggaggctgaattcaccgtagctctgccctattcgtcccagggcagtgggcagtaaatatatcttggagacagtggtatctggcctaggtcacccatctggttttattttagtcatggcaatgtcagtctgttagttccccaagacagccccaacctctgagacagaccagcaacagaaggtgtcattcagacttcttgtttcttctaggttatcatattctcatttggagccaagaggaagatgggtcacagaaagatcatgaaagactatgaagatggtgtgggacagcaatactggaccccacagatgggaacacattctgtgaggagtggcagctgtttgttaataggccaaaagtacccaattcttagggttggagcagggacacttgtgacaagggatactgtgggactaggatgctgacatgttactgctctagattttgctccagaaaattaaagagtaaaccagctacgctcagggtcccagctatatctagcctggaggccaagtttatgctagagccaaggtacttttcttttttctgatgtataggagcaaaataaccagagaattttaaaacttttatgttcaattttagcatggccaataaaagcatatcctttgtatctaactaaaaacccaaaagcccaacagggtttctgagtagatctagtactgacctggtaagagtgcttcttggatgtcagaaatggggaagggaaaaaaggcacagaaccagcactcacagtcaaaaccttcatttcctcggagctacttcagccctatttggggccacggtcaaggtgtacggtccctgaagagtccagcccagctgaggagagtcacctcatgattccatgtgtttcactcctacctgtgtcctcccactgtcatccaggtacagcccaagtatccttcagacctgcctgtggttgacactgacggtagcctcagccaaaggatgactttgctgttggatgacccgagttcttgatagccatattttatactcctagtgatttgcagtttttgcctctaaaaaagtaccaagggacaatgtcctccaagccatttgccaaagatatgggctagaagataaagagcaaggctcggtggaagagcaaggcagatcaagtaccagcttcttcaggttttcatgggggttttgttgttttgttttttagtcccaggtcttgagtgaaatctgaatgcttgtctgcatctcaagtccttagggaatatagaagaggcaaatcccatttagagaaagccagtgtccaacacagtacacggtaaacatcaggcatgaagatggtgagccccaggtgccgcacacccagccgagcctcactcattcatttgggcgtaggtaatcaggaaggctaaccctgtccctgggctgggatcagcaatggtcaggagcgaggactcagcccacctcccctaggaggcagagggaaggggactgagtggttgtcaagcatggtcttccctgtctgcaacatggtggtagccaggaggctgggcctgcatccggaagaggatggtgaggagcaacactatgagaaggaagaggatggagccacagacagccaatgccacaattacctctgggcaggggagaggaagagaaaggcagagttagtattcattccacaaatgcagagcacctaccccaagccaggggctgctgacaaaatggaaatacagaggtgggcaagacagcctgctcctggagtgtgcattctagagaagagatccagtaaacaagcaagcattccatggtaatgacacattattgatgctacatgaataagatcagtcagaaatcactgaggaaataggaccagacctgggatcaagaagtaaaacatgaggccggcctggtctacaaagtgagttccaggacagccagagctacacagagaaaccctgtctcgaaaacaaaacaaagaagtaaaacagatgagagcagagacatggagtaggggtaggaggacacatctgataggagaacaggcttggtgttctggattcagcaagatggagctgagtatgcaaggggcactaggaaacagaagacatccaggccaagcagaggcagggcagtcatggtagagaacctgggtctggggtgagattaatacatgcacattttaaaaacaaacaaacagacatggtctcctgtagcccagactgtctcaaaattgactgtgtagtaaaggatgaccttgaacttctgatcctcttccccccacctgagtgctggaattagatgtgtgcaccaccacacccagtttatgcagtgctgggaattcaattaaggggttctttttgtagtttaggtggtagatcaagtgccctaccaactgagctgcacacctagcctcaatttatttatatttcttaagaaatgaattctgctgtcttgatattggtaagggcaagaatagtttttgagcagttaaggcaagaactgatagtattagactggagaggcgagagctcaacatctgagaagcagaacaatctgctagtgactgggtggcagggtatcaggaagataatgcctaatggttcacggtgtgactatgagactaatgtagcacccattacattgacaattgtaagataaacaagtagatctgaaaagagatgctgttttagacacaacgtagatgcctcatgtgacatccatggagagaagaggcagctggggaaagcctagctcagaagttctaaatctaagcatattacaaaagtggaacttaacttaccatagagatgaggtaggaaagccatgagattggatgagatggcttgggagtcaggacagataggaaagggggtagagataagcctcaggccattcattatttagagacggggaaaatagtaaggaatttgtagtgagtaaaaaaaaacaaaaaactgaagtcctgagaatggtggttactgtattgcagtgcagtcggggagggaatccaggactttatacatgctagccatggattctactactgagctgtgtttacaacacttaaaaaaaaatgtgtttaaggaagaaatggcaactgtgctgagagaagctgactaagaattgattatatatatatatattgattatatataagaagactaagaattgattatatatatatatatatatatatataattgattatatataagaagaaggtgagagaagctgactaagaattgattattttggcaacagtttcattgcagcaaaaggtgatacaaaattgtttaagatcaagtctgagataaaaagtctgaagaagtaaagccagaatgtaggcaactctttaaaggagccctcaaagagatcagaaagtgagaccacagaagtgagtctcagaagtctttgttaagctttgcaatgcaacttatccagagaagagaccatgatcctagtaaatgggagaagagactgacacaggctaagtggagaggctgcacctgaatactatcttacatcagcaggtaagctgatagatggggtgggagaatgacagtcctctcctggtaatgcttatttctcagtgattagaatatcacctgagggtgaagaatggagagagtacataaatatggtcttaggcttaaggaggctgtgcagggaaaggcaggaagatggctgcaaatatatctgctccctgaagatttctgcatgtgacctgaactgtcccaggtatgggtaatacagaagcgggtggcagctcacctgtgtctgcagtatcatttgctagctggcactccttctgccagtccttgggtatgacaggctctgtgaggcgaaggaaatcctgcagtgggcaacggtgaggacagccaggcaggatcagaggccagggtgccttcttactgtcattccgaaagtacatctcgactgagaaattcctgagagttgacaggaagcaagatagggatgctcaccatgcccataactgagtctctgggtttccctcagccatcccagtgcctctttagaagacacctggtagccccacttacccattatcttcctggtacagttcaaatatgtggcaggaagcatagggagcttgcttcccattgtagacattcaatgccatttgcagagcaaccagggtagtgtcatgctgtaagggagaagggctgctcatgagattgttgctcctccacatcccaggaactggatcgggggaagtacccaattcctgttttcatacttgtgtgttgggtgggtgggaaggagcagggggatagggttgatgcttaccgcggaataaaccagaagcttagggaattgagaggtagttgccattagggtcaggttcttcaatatctgagccagcagaactcctgatgaagagaaattccaagtgtcagtgtcttgaaccatcactgatctgcttctctcatcatatgctagtcttagagaattcttctagttcatggggaccatactggaactctataccatctactgctaagaactgtcaagtttatagagaagacagataaagcaagctattagtatgtaaacacaggtgtagaaacgaataggaggcactgatcatgacttaacagtatgaacacagtgtaaacttaagactgcttcatagtacataagatgttggtttatgccagagcaactgctgtatgcacactttgaaaactactgcattctcaaatgtttgagaatgggtacccctgaatgctcaaagtaactggcacatgtattaccccatgtcttttctctaaaagtcttagcaattctctggagggaggtatgtagttaggaaaaagaggaagggtctttcaacatgggtgagacttaagagtaagaatgataggccagggctggagagatggctcagtggttaagagcgctgactgctcttccagaggtcctgagttcaattcccagcaactatttggtggctcacaaccatctgtaataggatatgatgccctcttctggtgtatctgaagacagctacagtgtactcatatagataaaataaataaatctttaaaaagaatggcaggtggttagcacacacctttaatcccagcccttgggaggcagaggcaagtagatctctgtgagaccacacagagttcaagctggcttgaccagaactacatagagagtgagacctgtgactctagctaaatatcagacaactgggagatttgggcaactagcagggatggccgggagaattatcttaggcagcctagtgtgtgagaagctcccacagcagattttcagtgctggagagttctgaggaaagggtagtggcatgttgtccttgtcactcacccccctgaagccgggccttctgtacttgctcgtggatcccgaagaggaagaggaagctgaagtcctttagctggctcagacgctgcacggtttggggtgaggcccagggcggcagaagcagcccatgggtttgctgtgtatcgcagcgggcaggttagctccctaggcctaggccagagcctctccaagggtggctttcttccccaggtggggaaggtgcctgtgtgtatgagggaggaagaggagagcagagaggtgaggcagaggggccactgcaaccatggcagacattggaaaggaagctcaagcatgaagagcagactcagcacagaagaaatctcacagctctgagctctggatggagaaggcacagagtgctgacgactagtaaaccatttcccactttgaggttctttttacccatgagggaagttcctaggttacataagcacgggcttgctgggccttcccagtggggacggtagtatcaaggcgatgtgctctattgccctagagacctggacctgttgaggacagaagagcaatcccaacaggcatcttagtcagctcacctcacaaaagagtgtgtcatacacattccagatggtctctagggtcacgtttgtaagccctgtctcgttggccaccatgttcagaaattgctataaaaaacggagcaggagatcagcactgttctggagaaagagcaatctgatgacctacacccacgccccaactcactgcattctgaatacttctgttctgatactctggtgtctgccgagtctcattctgcagctgctcataacggggacatggacccaaaggaaacttcagcaactacaaattaaggaggaaacaggcagagaaggagtctgggatcaataggcttataaccatagttgttccctcaccacttaagaagggctggccagtcttaccctgtcttcagtgatgggcacagtgtgaacagggataggctgccatgaaatgttagggttgaagtgctgaacttcattgggagggaagagtccagccaggttggcctcagcactcatgagagtacgatcgaagtctgtgcttcgcacataaacctgtagattggcaacacaaatctctttgtgtgtagaagcacttttgctcctccccagagccccagggtagaacctgttgttgattactcagtactttataaacttaccatgcatgcacaccctctctgctgcttccctattcatcaaggcctcaaacattcagctacaggctatcaccactatataaagcactcagactgtgggaatgactctagttcaaacactctttcctgttcttcaaaagcactcatttggtaaactatctggtcttggagacttaaataattggtttgtctcccatgaagaacagagtccttgtcagccagaatagtacatccccatccatacacatggagacaagatctcagtatgtaggtctgtcctaaaactcactatgaagaccaggctagcctcaaactcaggaatccactagcctttgcctcccaagtgcttggattaaaggtatgtgcctctaattcagcttggcattcacttttttttccttctcttttgtcaaaacagggtttctctttgtagccctggctgtcctggaactcaagagatctgcctgcctctgcctaacaagtgctgggattaaagttgtgtgccaccaccactggtttggtacacactcttaattccagaatttgagaggcagagacaggaaaatctctgagttcaagactagccagtaccataaaatgagaccctgtttaaaaacacaaaagcaataccctagagtccaaatggcaaataccactcttcaccacactccctttccttttataaatgggaagaaggggggaaaaggaacagcgaggtgacttgtgaaaagggaggaagaaaatagggaagcgaagggcaagctcagggtagagctaggtctttagggaacagtaatctagaggattgagacaactgtggctgcaagcagtaaccatggaacagctatctccactggggtaagcagagaacctcaggagctagcacatttgccagtcttcactgcccctcccccgatttagcttggctctgttcagcttattagactgctctaatataagctctattatagagatcataactctatggtataccatcataggaaaaacattaccacagtgcttggccctcaggtgacaataaatgtcttggacaaaatgcctatttattgtttcagagtcagaaagtactttatcagacccttcctcatgtctaagttggacccctggtcagttttgtcttttcccagacaagcagagacacttcagactccagagccgtattctagacagctcttagatgtcttgtccagggaccaaaagttcaagagggaaccttgactgcccaggctcatccttagattctctgcagtcagaatataatccaaagatcccagtccttttgccaatcaaactcccaaccttacctcttgcctgtggtaagaggtgttcagaaagccatggtagcgttgccgcagggcctggcccagctcccagtgctgtagcatcccttcctgtgggcaaacctgagagttaaagtccaaagaggagctgggcatggtggcctttaatcccagcagtcactctctgagttcaaggccagcctggtctacaaagtgagtccagaacagccagggctctgttacacaaggaaaccctgtcttaaacctcccccaaatccccaacccctggggaaaaaaaaaaaaaaagtccaaagagaggggattagccacaagtcctatgtatggcatttaggcattcttcccttggcaagaggtgaatttgattccagaagtggccagttgtaatgatactgtcccctgcacagagttgttaagaaatctggtcatagccagagatgtagctcactgtgcttagcatagacaaggttctgggtttaatttccaaaaccacaaaaacaaaacaacaaaatagacatctggtccatcagaacccatgtgggaagctagtagtttaaggagccccagtttctgtgctccagatgtgattcattccgtagcatatcccgagaccttgcaggttggcttttgacccaccttggttagctgaccaaatccctggggccatttctcttcctgataggggtccttgggatatgtcttcactggtgaccgatctccatgtcgatacagctgagcaaagaaaatggtgtgtctatagaatcagaagggtcttctagttaaggacaggacccacctctgcacatgccaggaaaggaaatttcactccatctttctctactgagcgatgaaaaaagaccccagttcgggcgatgcaatgtaacctgagataataggtaaagccccaaagcacaggtagaagagtagtgaaagcaacgccttctgggggaggaagtgggcaatgggactgggaaaacaaagatcaaagtcgtctttatgggtgactttcaaccttttaactaaattcccatcctagggaagaatatctcctactcggtcgtcctgccctaaaaaaaaaaaaaaaaaaaatagcctagggctccaaatcaattcttaatccagccgcacaacccactatgggccagcggtttcctaaaccggttctttctcctccttgagaagtgagaccccggccccagaacacaagctctgcccctccctctaccagccggcctttgccctttcagctttggcgaacccgttggtgactccgtcacccattaccaaggtaacaaagcgtagactccgggcctgtatgggtggcatcaccgttaggcacatgccaagaaggaactggagaagagccgcctggctccaaccagtctgtctgccggccatcactgttgtaggctgtgtagcaagaggccggaacgccttgggcggtacctgctgcagccgcccggatgcattcgtaaggacacttgccggaagtgcagccttcgccatctttctttgggttgcgggagaccgggaatgagaaagtctggtgggagaaggcggaatttgggagggaatgcaaatggagaaggtttgcgattggcggtgatgaacgagggtgggactgttgcgcgaccttccgggcagaaaaggcttaaacacctcgcttttgtagaggcgctaggtcaggcttaccccttcttctacaaagctggtgcttgccctggttggggtctgggcctggagagcgagtgcctgctttgaggaatgcttctgaaaatgatcccagagcctcggctggtgcaaaactggggcaaggtgtggggaagtacagagcctaactttctgctcttgggtgtgtagtttagtgtaagccttggcttagacactgttccgataagcgggcttgtttgagatgtagggtactgcatgtaaccagccctttggactccctgtgtccttgaggtagatccagtctagtctgccattcatgtcctgaacaaaccttcgtactccccagtttttttcagctcttttcttgtgcttaccgatttctaaattaaattagactcaaacgtcatgtttgaggaggagttggattgcataggatgttccgatttcccaaacccactacattgaattcttatgggaggaatctcagaaaactacatcagttttgatgcaggcatataactggaattgccacagaatcagagttcctccagacattagcctttaggatttggaggcaggcagccagttgggtgtctggatgttgtgattccaaaccttagagtgacacacagttgcagatgagatcttgggcccttgatatgctttaatgcaaatctgatcagaattgatactgtcccaggactccaaataaaattatgtaccttactgcctaaactttactttcgatgtcaccttgagaaagacttggggagaataagaaggcttcaaaactaaatagttttaaacttaaaaacaaacaaatctatgtggtgcatgcctttacttccagcacttggagaggggggtagatgtctgagttgtatgtaggccagcctggtctatagagcaagttccaggacagccagcgatacatggagaaatactgtctggaaaaaacaatgatgaaacaaaatattttctatgtatgggtgttttgcttgcatgtatatctgtgaaccatgtatatacagtgtccttggaggcaaaaaggcagcataggatcccctgtagactttaagcagctgtgtgggtgctgggaatagaac

SEQ ID NO: 642 - DNA, 1701 bp, Mus musculus
tacgtagtcccttcctgttttctccacggaggcttttccactccttgcttcgttattttgccacagagcttgatatctcttcaccaagtacgtcatggctcccaagaaatgcccagaaacccagaagtcccccgacgttgcggtgctcctcaggagcaaaagtcgcagaggtcctcaggagctggagcccgaagccaagaagctgcgtgtgcagggtcccgtttctagcaggacatgtgagtcgtgctgccttctggcagagttgtccagcctgcagatcccttcacggagtagcagcattgtcagggatctttaccagcataagttgggcaaagccacctggtcatcactacagcaggtgagatgtttcctgtctgacgtgctcaaaggtcacatagcttttcaactattgctctttctcactagatgataaattggttcaggatcatcaggtcacccccaggtatgatgattgacctactgtacactgagtcaaagagaaaaggttttactctgtagacttctagccacaacatgcgttctccctcttgctttccaggattagttcacttacattgcagatagttgatgcacaaggccagtgaagacttattgcctgtatataaaggggccagacattgacagtttatccaggacttgcgtttaatttttatttatgttttgagacacaatctcactgtgtagccttagctggcctggtcctctgtatgtagacctggctggcttcagtctcacagaaatccacctgcctctacctcctgagtactggagttaaaggcatgcatcactgtcagctcaggacatgagttttaattcagtgaatccagattaattctattttctctgtattagggtctgcagaagtcctttttgcactctctagcttcttaccaggtattccgaaaagctgccccctttgacaggaggactacgtccttggcatggcacccgactcatcccagtaccctggctgtgggctccaaagggggagatattatgatctggaactttggcatcaaggacaaacctatcttccttaaaggggcgacctggcattcacggcacaacctcattgttgtgggccgatacccagatcctaatcttaaaagttgtgttccctatgaactaaggacaatagatgtgtttgatggaagctcagggaagatgatgtgtcagctctatgatccaggatactccggtattacttcgctcaatgagttcaatcctatgggagacacactggcctctactatgggttatcatattctcatttggagccaagaggaagatgggtcacagaaagatcatgaaagactatgaagatggtgtgggacagcaatactggaccccacagatgggaacacattctgtgaggagtggcagctgtttgttaataggccaaaagtacccaattcttagggttggagcagggacacttgtgacaagggatactgtgggactaggatgctgacatgttactgctctagattttgctccagaaaattaaagagtaaaccagctacgctcagggtcccagctatatctagcctggaggccaagtttatgctagagccaaggtacttttcttttttctgatgtataggagcaaaataaccagagaattttaaaacttttatgttcaattttagcatggccaataaaagcatatcctttgtatct

SEQ ID NO: 643 - protein, 155 aa, Mus musculus
GLQKSFLHSLASYQVFRKAAPFDRRTTSLAWHPTHPSTLAVGSKGGDIMIWNFGIKDKPIFLKGATWHSRHNLIVVGRYPDPNLKSCVPYELRTIDVFDGSSGKMMCQLYDPGYSGITSLNEFNPMGDTLASTMGYHILIWSQEEDGSQKDHERL

SEQ ID NO: 644 - DNA, 44742 bp, Homo sapiens
ggtgatatgttagttactgataaggtctcatgatgatggtgaagaagccctttgctgttctcagaagtcctcactggttagaaaaccgtcatagaaagaactggaactccagaatcagaaaccagggttttgagttctggtagatccttcctctcactgttctcatgccaaagccctcttccaaggatggcaaaaatcccaagtggcagaaataaaaatgattctgtctgtgttacagccaagctagttccctatgggtggatgagtcacatgtgagcagagctgggagaactacatttacattcctttacatttccctctttccaccctcctttccactgccctgtgttggctcctgtcgctatgacaaaaaacttgctcaagaaaccccagcttagtttctctatggggaggaaggtggcaagctacctgggtagctgtggttcttgttggtgaagcccatggcccagtggggcggtgtctttgtacaaatccacacacgtcctcccctgtgctccaaattgtgagtgcacatccccaaagacttttttttttttttgagacagagttttgcccttgttgcccaggctggaatgcagtggcacgatctcggctcaaccacaacctccgcctcccaggttcaagcaattctcctgcctcagcctcctgagtagctgggattacaagtatgcaccaccacgtccaggtaattttgtatttttagtagagagggggtttcaccatgttggccaggctggtctcgggctcccgacctcaagtgatccacccgcctcggcctcccaaagtgctgggattacaggcgtgggccactgcgcccggcctccccttcatacttgactatccctgtgtcataaggactcagaatctgagggttttgtcataattatacacagtctagaagaccaagccacacttgggttggcagcatttaagctgctgggtcatcctgcaaggaggcatatttgtgaaactggatgaagaaaaagtaggaaaagctacctactttttaagctcaggaagcattttataagatttccaaggctaacagctgcagcctcctctagctcctctagctgggttgactgtagtccctaaaaagatacgtccatatcctaatccccagaacctgtggatgttattctatgtggaaaaatgatctttttggatataattaaaggtttgtttttggcaggtgcagtggctcatgcctgtaatctcagcactttggaaggccaaggtggggggatcacctgaggtcaggagttccaggccagtctgcccaacatgatgaaaccctgttgctactaaaaatacaaaaattagccgggtgtggtggtgggcgcctgtaatcccagctactcgggaggctgaggcaggaaaattgctggaacctgggaggtggaggttgcagtaaactgagattgtgccactgcactccagcctgggctggacagagcgagactccatctcaaaaaaaaaaaaaaaaaaaaaaaggtttgtttgagacaggatctcaatctgtcacccaggctggagtgcagtggcgtgaacatggctcactgcaaccttgaacttctgagctcaatggatcctcctacctcagcctcctgagtagctaaaactacggccacatgccatcacacccagctaatttttatatttttgtagagacagtatgtcactgtgttgcccaggccagtctccaattcctgggctcaagagatctacccatctcagcttcccaaagtgctgggatcacaggcttgaggcactgcacctaacctaattcggaatttttaagtgaggtgatcatccaggattatccaggtaggacttaaatccaatggcaagtgtcctaataagagtaaggcacattggccaggtgtggtggctcacacttgtaatcccagcactttgggaggctgaggcaggcggatcacttgaccccaggagttcgagaccagcctggttaacatgctgaaaccctgtctctactaaaaatacaaaaattagctggttatggtggtgcacacctataatcccagccactcaggaggctgaggcacaagaattgcttgaacccagggagcagaggttgcagtgagccaagatcgtaccactgcactccaacctgggcgacagagcaagactttgtctcaaaaaaaaaaaaaaaaaaaaaaagtgaagcacataccaaaaagagtaaggcaagccagcgtggtggcccatgcctattttcccagttacttgggaggctgaggtgggaggatctcttgagcccaggagttcgagaccagcctgggcaacacagtgagaccccatctctaaaaacaaacaaaagagcgaaggagaaggaggtcagatacagagaaatagatgcacagaggagaagatcctgggaaaatggaggcagagattggaatgacaggctgtaaaccaagggatgctaaagattgctggcagccacaaaagctaggagaaaggcaaggaaagattcgaggcttggtgcagtggctcatgcctgtaatcccagcactttaggaggctgaggctggaggatcacttgaggccaggaagttcaagaccatcctggttaacatctctacaaaaactaaaaaaaaaaaaattagccaggcatggcagtgcatacctgtactctcagctactggggacgctgaagaaggaggatcccttgaatttgaggcttcagtcagctgtgatcatgccactgcactccagcctagatgacagaacaagactccatctcaaaaaaaaaaaaaaaaaaaattttaccccggagcctggggagtgtggccctgccaacactttaattttggatttctggcctccagaactgtgagagaatatatttctgtcatttgaagccactcatttacagtaactggttacagccaccctgggaaacgaatacacctggtctctgctgtggtgctcagtgttaccaaccggtcctcactttcccagttcttagctgtgtccctctgcaaatcttagcacctctctgattttcagtctcctcctttgtaaaacgggaagagtaagtcctactctgccaggttgttgtgaggccatggtgacagagtgctgagcggaatgccaggtgtaccacagacgcaacttacgcatgagttcccatcctcccccttctccaccctggtccaacctcaccttgggcacagagctcccattgcaaggctgaggagcagggttcctataccttttcctgggactcgggttcattggtgatgtccagaatagtgcatgaccctgccttcttgacaaatcctcccagacatctcatcagcatctcaaatccaatgtgtccaaaggtgaactcttgatctttccttctttttctgtctctttcacagtttacctcatctcaataaatggtatttccaggtagctaaacatctggacgtcatttttgctttcttttttcttttctttttttttttttgagacagagtctcactctgttgcctgggctggagtgcagtggcatgatctttgctcattgcaacctccatctcctgggtttaagcgattctcctgcctcagcctccaagtagctgggattacaggcatgcgccaccacacccagctaattttttttttttgagatggagtcttgctctgttgcccaggctggagtgcaatggcgcaatcttggctcactgcaaactccgcgtcctgggttcaagcaattctcctgcctcagcctcctgagtagctgggattacaggcgcatgccaccatgccaaactaaattttgtaattttagtagagacgggatttcatcatgttggtcaggctggccttgaactcctgacctcatgatcttcccgcctcagcctccaaaagtgctgggattacaggcatgagccactgtgcccggccgtgatgatggtgttgtgttttgttttttgtttttttttttgagacggagtcttactctgtcgcccaggctggagtgcagtggtgtgatttcagctcactgcaacctccgcccctgagttcaagcgattctcctgcctcagcctgccgagtagctgggattacaggcacctgccaccgtgcctggctaatttttgtgtttttagtagagacggggtttcaccatcttggccaggctagtcttgaactgctgacctcatgacccacctgcctcggcctccctgggattataggcgtgagccaccatgcccggctgtgatgatgtttttctcttggtttatcatggccacagagtagccttgtctggtgttcatgtattgtgaaattatttacttcagtggaacatcaaggcctagctgatagtaccaggcccactaccacatgccagggcttcatttcctttctcagaactcacacccgttcccaaatgttaccaagctgttccttgcctaagaggctcttttccattccccagccaaacactacttttttcaagtcaaactgcacaaaattccatctctcctgtgaggtcttcccaaagacagtgaaaccacctttgcaatattataactgatacagtgaaagtgatctaacttaaccaactccatcttgtttttaacctccaagctgtccttgttcattcctgggcgtaggctgaactaactttgggagaaatttatttataatttacagtgaaacaaagacaatggctgggcacagtggctcatgcctgtaatcccagcactttgagaggccgaggtgggtggatcacttgaggtcaggagttcgagaccaatctgaccaatatggtgaaaccccgtttctactaaaaatacaaaaatcagctgagcatggtggcgtgtgactgtagtcctagctaccagggaggctgagacaggagaattgcttgaacccagaaggcagagattgcaccgctgcactccagcctaggcaacagagagagactctgtctcgaaaataaatacatacgtacatacatacaatacataaaacaaagacgataacagccctttcccaaagcagaccatcttccttcttgcctagggactaggttgcctctgtaggactaacattagctgcaagattataaataattatggtttaggagtcatgcagctggaggatacaagattctgaccctccctaaactgctcctaagatcagtgcttgagatattttgcagaccctgcacttgatggatcagctggccccacccaggtcgataaactggctcacctgatcttgtggcccccatccaggaactgactcagagcaagaagacaacatcgacggcctatgatttcatccctgaccagtcagcactcctggctcactggcttcccccaaatcaccaagttattcttaaaaactctgctccccgactgggcatggtggctcatgcctgtaatcccagcactttgggaggcagaggcgggtggatcacctgaggtcaggagttcgagaccagcctggccaacatggtgaaaccccgtctctactaaaaatacaaaattagctgggcatggtggcgcatgcctgtaatcccagctactctgggtgctgaggcagaattccctgagcccaggaggtggagaccgcagtgagctgagattgcgccaccacactccagcctaggtggcagagcgagactccgtctcagaacaaaacaaaacaaaaaaccaaaacaccaccaccaacaacaaaaactctgctcccccaatgcttggggaaactgacttgagtaataataaaactccggtatcctgcacagctggctctgcgtgaattactctttctctgttgcaattcccctgtcttgatgagttggctcaggcaaagtgaaccccttgggtcgttacaacagtactactgtctccatagaattagctttcctgagtgcatccaaaaatcttaattggtgaccaggcatggtagttcatgcctgtaatcaaagcaatttgggaagctgaggctagaggatggcttgagcccaggagttcaaggccagtctgggcaacatagtgagaccttgtctctataaaaccaaaaaccaaaaaccttggtgggcatagcatacttagtcttcaaatgtgtacctaccttgaagtatttcacttgtttcacatatatttttattcagttcccagtaggttgtaaatcttttagaggcaaagtccatttcttacacttcaatatcccctgcaactgagcaccctgctgaaggacaggttggtcttagttggcatgttggttggtctgaataaggggagggggcgaacagtttgcttctgcaacacagctctgaaaacacagctctaggctagcaggggagaagctcccagcttgcccctttcccaggcaaaaccatttcttttttttaatttttaattttttattttttgagacagagtcttactctgtcgtccaggctggagtgcagtgatgtgatctcagcctttttgtgtttttttttcttttttttgagacggagtctcactctgtcacccaggctggagtgcagtggcgcgatctcggctcactgtaagctctgcctcccaagttcacgccattctcctgcctcagcctcccgagtagctgggactacaggcgcccgccaccacgcctggctaattttttttgtatttttagtagagacagggtttcaccgtgttagccaggatggtctcaatctcctgacctcgtgatctgcccgcctgggcctcccaaagtgctgggattacaggcgtgagccaccacgcctggccgtgatctcagcttactgcaacctctgccttcccggttcaagcgattctcatgcctcagcctcctgagtagctgggatgaccggcacgtgccccatgcctggctaatttttgtatttttaatagagaggggtttcaccatgttggccaggtgggtctcaaactcctggcctcaggtgatctgcccacctcggtctcctattgggattataggcgtgagccaccgcaaccggccttctaatttcccttttggagcattcattccgttgcaagagcttatttaatttttatttatttatttatttatttatttttgagacagagttttgctcttgttgcccaggctggagggctatcacgccatcttggctcaccgcaaccttcgcctcctgggtccaagtgattgtcctgcctcaggctcctgagtagctgggattacaggcatgtgccaccatgccctgctaattttgtattttcactagagatgggttttctccatgttggtcaggcaggtctcgaactcccgacctcaggtgatccggccgcctcggcctcccaaagtgctggaattacaggcgtgagccactgcgcctggccaatttttatttatttatttagaaacagggtaaacctctgtcatccgggctggagtgcagtggcacaattgtagctcactgcagtcccaaactcctgggcttaagcgatcctcctgccttggcctcccaagtagctgggactacaggcgtgtgctaccgcacctagctaagttgtgtattttctaattttttagacaggggtctcagtattgctgaggctgatctccaactcctgggctgaagcgatcctatcctcttgccctctcgaagtgctgagattaccagcatgagccaccacactggaccaagagttgattttggtaacatcttctgtccctatctgtctgaaaaatccttgagagtaggatctaccattaatgcattaaacaaattattattttttgtttgtttattttgagatggagtcttactctgtaacccaggctagagtgcagtggcgctatctcagctcactgaaacctctgcctcccaggttcaagtgattctcctgcctcagcctcctgaatagctgggattacaggtgcgtgccatgatgcccagctaattttttatatttatttatttttatttttatttttttgagttggagtcttgctctgtcgcctaggctggaatgctgtggcatgatcttggctcactgcagcctccctctcctcggttcaagcgattctcctacctcagcctcctgagtagctgggaccacaggcaagtgccaccacgccccagctaatttttgtatttttagtagagacggggtttcaccatgttggtcaggctagtctcgaactcctgacctcaagtgatctgcctgcttcatcctcccaaagcgctgggattacaggcatgagccactgcgcctgatggtatttttagtagagaaagggtttcaccatgttggcccggctggtcttgaactcctggcctcaagtgattcacctgccttaggctcccaaagtgctgggattacaggcttgagccaatgcgatggcctaccattaatgcatttttgtatatctcctcccacccccacaaactgtcaggcacggggcttagtgggtggaggaaaggcccagcaatgcctgagtaagcccaactcctgcctgcctcttcgcagaaactagggtgcatccaaactgtctcttctcaggctaggcaggacagcgcggcctcacctgtgaaccttcaagacttggactttggctgaagcgagggcgtaggagttctaagtaccgctggctgcacgccctctggcccatcacgtcccaggctgctcctaggtggacacccaacaggttaggcaagtcttagttaaaagcagtgagaggccaagaggctgggcatggtggctcacgcctataatcccagcactttgggaggccgaggcaggcagatcacaaggtcagaagatcgagaccatcctggccaacatggtgaaaccctgtctctactaaaatacaaaaaattagtcaggcgtggtggtgtgtgcctctagtcccagctgctccggagactgaggcaggggaatcgcttgaacccgggaggcggagattgcagtgagccgagattgtgccactgcactccggcctgggcaacagagtgagactccgtctcaaaaaaaaaaaaaaaaaaaaaagcagtgaggaggctgggcacagtggctcacacctgtaatctcagcactttggcagaccgaggtggatggatgccaggagttctagaccagcctaggcaacttagggagactctgtctctacaaaaaatgcaaaaattagctgagtgttgcggcgcgcacctgtagtcccagctactcgggaggctgaggtgggaggatcgatgtccaggaagtccagcctgcattgagcccacatcctgccactgcactccagcctgggtgacagagagaggccctgtctcaaaaaaaaaaaaaaaaaaaagaaagagagaaagaaagaaagaaaaaataaaaacagccaacgaccaaacaaataaaagagcagtgagaaccagacacggtggctcatgcctgtaatcccagcactttgggaggcagaggcaggaggatcacttgagcccaggaggtccagaccaacgtgggaaacatagcaagaccttgtctctacaaaaataaaaataaaaaaattaggcttggggatacaggtctgcaagcctacttgggaggctgaggtgggaggatcagtgaaacttgaggtcaaggctgcagtgagctgtgattacatcactgcactccagcctgggtaacggaagagagacactgcctctaggaaaaaaaaaaaaaaaaaaaaaaaaaggcaaggagttccaatcattctcccttcacagagaagcagcttggattcgatgggactgtagtttctggaatccgactgcaaagctgaccgctggtagagcccagcttctaacttaggaaaggcactagctctctacaaagccgccactccccaactacaccctgtagggaccagccaatcccaaagcccgagcgggcgtcatcaccaattgcaaggcgggagacagagccttggctggcaccgggcctcctccccggacccgcagaggcctggcagcgccgcgtttgaggagggttcgtgtcaggaagtcaaggctggatgatcgcttaagcccaggagttaaagaccggcccggacaacaaagcgagaccccgtctctccagaaaaagaaaaaaagagagagagagagagaaattagccgggcgtggtggcgtacgcttgtagtcccatctacttaggaggctgaggtgggaggatcgcttgagcccaggaggtggaggctgcactgagctatgatcgccccactgccctccagggtgggcgacagagccagaccctgttgctaaaaaaaaaaaaaaaatccataaagccggggaccatctttgctccagggaggtcagctgacccgggctggcactggccctggggcagttcccgcccctcccgggagcgctggcaccgccccttggcaccaccccctccccgcgcccccgccttccaggaaggggcggggtctccgagacgggtggggccggagctccaagctggtttgaacaagccctgggcatgtttggcgggaagttggcttagctcggctacctgtggccccgcagttttgtagtccccgccttgtttctccccagaggcctctcaatcctccctccatgatcttcgcatagagcacagtaccccttcacacggaggacgcgatggctcccaagaaacgcccagaaacccagaagacctccgagattgtattacgccccaggaacaagaggagcaggagtcccctggagctggagcccgaggccaagaagctctgtgcgaagggctccggtactgcctgtgcctgctgcttgaatatttccgccttttagggtgctcgcgcaggaggctgcagcgggggatgggtgctccgaggctcccgaggcccgcgcaggtcacgggtgcctccggctgtgcattctacctgcaggtcctttgacaccagagtgtttaggtttcaacacctctcccgctaggtaacaggaagcagatgagctccgtaacaacagacacacggacttgtcagattccttgttcgtatcagggttcttgcacagttaggacggcttcagagaatcctacctttcctggcgctgtgtgtgctggatttcatagtcacgcttgttagctgcacgtcctcggtggtcagttgtgagagcccccaattccttcctccttagaaagctcattctctgaggtttactggggcttgaacctggggctataaggagtttcgagacactcaaaaacgagctggggcttgttaatcaagtggtttttgtccatgagaagaaagaattggttgtcaagacgtcggacctatagtgattgggtcctcaaatacagtttggtgatcaggagttgttgctttattgctattctaatttcacttacctccccagaagtaacctagttaagagcatttccaggccttcctattccttcttttcctaaacggtgacttctgccatgctgccctaaaatctttttattgtgcattatatgtgatttataaaattgtgacccagtcccatctcgagttttgcagcccaaactgggaagagttctgcattgtactttatccttgtgtgtttctttggctggggtctcaggaaccctgcacgactgtatttactttcacttcagacttactgtttgtgggagtgttttggggaaggggccaaatcctcactcatttttttatttctggtgctcgttgagaccacacagacatggaaaggccgcaggaggtgatgagacagagattaaccgtgccgaatgaaacaaggcttcctttcggggaattcagcagaaaaacctttcgtgagattggagaggaaaatatgtctgttctgcttggcaggtcctagcagaagatgtgactcagactgcctctgggtggggctggctggcccacagatcctgccaccatgccgcagcatcgtcaggaccctccaccagcataagctgggcagagcttcctggccatctgtccagcaggtaaggcattttttgcctcaagtcctcaagggtttacacgtgcatttttactattgcatgctcccaaattagatgatggcttggttcaccagcttgtcagagtggtccgatcacccagactgtggtgactggcctactgggcactcagccaggtaaaaaatgtcttatgttgtaaaggtcccagctggaatgcactctgccccttttgctttccaagattattcgttcgtgtacattgcaaatattttcatgcacagggcaggcagttagctttcctttggtgggaggacttggatctagggctcatccatgaaggaggcagagattggcagtttacccagaacttgggttttaattcaacctaattcatttctctctgtggcaggggctccagcagtcctttttgcacactctggattcttaccggatattacaaaaggctgccccctttgacaggagggctacatccttggcgtggcacccaactcaccccagcaccgtggctgtgggttccaaagggggagatatcatgctctggaattttggcatcaaggacaaacccaccttcatcaaaggggtgagcagttccccatgccaggtcgtgctaaagaagtgtttgttggctgggtgcagtggttcgcgcctgtaatcccagcactttgggaggccaaggtgggtggatcacctgaggtatggagtttgagaccagcctggccaacatggtgaaaccccgtctctactaaaaatacaaaaattagctgggtgtggtggcaggcgcctataatcccagctactcaggaggctgaggcaggagaattgcttgaacccgggaggcagaggttgcagtgagccaagattgcaccattacactccagcctgggcaacaagagtgaaactccatctcaaaataataataataataataataaaagaaaataaaaataaggagtgtttgttgaaggcatgaaaggaatattgatgtcatccagtaatcatcaggaagaggactgggatcaaaattaactgtgggcattttcaaatacgtaaatgatgatgatatatatttttctaatgcctgtccttaaaatactagaagatatagactattgatcacccatagaattgaagccccttctgggctgggcgcagtggctcaggcctgtaatcctagcactttgggaggccaaggtgggctgaccacgaggtcaagagatggagaccatcctggccaacatggtgaaaccccgtctctactaaagatacaaaaaattagctggatgtggtggtgtgcgcctgtagtcccagctacttgggacactgaggcaggagaatcgcttgaacccgggaggcgaaggttgcagtgagccgaaatcacgccactgcactccagcctgggcaacagagcgagactccatctcaaaaaaaaagaattgaagccccttcttaccacattgacctcatcttacgccattgtcttttctcacttctatgctgtagccacaccagctgtttctattcctgaaaccgggtctctgtaattgctgttccctttgactggagtgcttttcccccatggtcttctcatggctggcgtcttctctgcaggtctttgctgattctacctcttcaaagaggctttcgctggttgtccttactcataacgtagatcccactcctccaccgtcattccctgtatcattaccctgcttcatgtttcccccaagtgttgatgggtgtctgagatctgatgcttatttgtatgtttgcccactgatggcagggacctttcctttctggttcaccatcctattcccagtgcctggaacaaagtttggcctagagtagctgctttatatttgttgaatgagtgaggggcttgaagtgtaattgagcagatgggatgtatacatacgaggtaattaacaatacagatgccaagtgctacagaatgtgaaagaaggaagaaccccttgtgaattggagtcaataaagaagactccatggatgagcgaggaggagcagtattagataaatggagagaaaagaaggaaagacatagtgtgactgggtgaggtttggcacagagttcttgggaatggtctttgttgtgctagagtttatcatccattgctgaggggtgagtgtgtcgtcccctctaggacctttagccagcccagctggtggctgacattggagggctgtgctgtgaaaagtgacactgggtttagagcaggagtcacaaacttatagggctccagaagccagagtggaaaaaaaaaaaaaaagaatgtatggtggtagggtcaggggtaaactagagatgactgttgtgcaaaaatgtaggtcttttgatatcagatgtgatttttctcaaacaaagacacaaatcctcattttttaaatgtcatatatcttgagttttaaaaaaaattgtaaaatacacgtaacataaaatgtatcaccttaaccatttaaaagtgttttttttttgaggcggactctcgctctgtcacccaggctggagtgcagtggcgcaatcttggctcactgcaagctccgcctcccggattcatgccattctcctgcctcagcctccccagcagctgggactgcaggtgcatgctgccacgcctggctaatttttgtatttttagtagagatggggtttcaccgtgttagccacgatggtctctatctcctgaccttgtgatctgcctgcctcggcctcccaaagtgctgggattacaggcgtgagccaccgcccccagccaactttttaaaaaataatgataaaatacatataacatgaaatttactttcgtaaccattttaaagtgcacagttcaatggcgttgggtaaattgtgtaagcagtctccagaacttcattatttttttttatttttattttttgagtctcattctgtcacccaggctggagtgcagtgacacaaccatagctcactgcagcctccaccttcctgactcaaggaatcctccggcttcagcctcccatgtatcagggactacaggtacgcaccaccatgcctggctaatttttagagatgtggtctctctatattgcccaggctggtctcaaactactggcctcaagcaatccttctgtcttgtcttcccaaattgctcgggattacagggctgagccactgtgctgggcctctagaacgtcttaatattggcactgaatgaaactaaacacacgtctcagccgaattctgcttcagtccactatttttctagctctggtttaaaggtagacatgagggggaacccaggaggaggtctctttatttatttatttgtttatttttttgagatggagtctcactccgccgcccaggctggagtgcagtggcgcaatctcggctcactgcaagctccgcctcccaggttcacgcgattctcctgcctcagcctccgaagtagctgggactactggtgcccgccaccacacccggctactttttttatattttttagtggagatggggtttcaccgtgttagccatgatggtctcgatctcctgacctcgtgatccgcccgcctcgacctcccaaagtgctgggattacaggcgtgagccactgcacccagccagcaggaggtctcttaagtggagggatttggagagcagaccaccagaaaaggccaggttagacaggtgtgggagactggaattcaaagtgtgagatgggtgttcaaggaacaagtgccagaagcccccagaaaggcagtcagaggagtgccgcggacagagtggggtaggtttcctgcccagctaaagaggcaggtgaccgctaataaggcagcttgaagttgaagtcagaacccagagctcagacaggaagaaatttgttttcttgttttctccaggagtctaggacatgggaatagaggaatttagcttatgcctggagatgggaagaagcagtgtagggtattctaggggaagagcttcctgactaacaggataatgacaagtgctttgaacttgtgccagactgagattgctttttttctttgttgcatcaccttatgacatgcgtgtaaccttctttacagtgtaaactttctttacactgtaatgaagattggtctaggcattgaattttgtggcttgcatttgcagggagctaggttggagcagaggaagggtatggcagtctggaagagacctgtctggttttactcccagatgctgacagcagaatgctgatttgagaccagttactggaggagcaacagtgcctcattttgtcacttctttagtcatctgaccttggctgtgacctttacattcttcaggcccttggcaagggaacatgtattacagtttcacaatgaagatagcttaattttattcctattataaaaacaatgtatggggccaggcgcagtggcccacgcctgtaatcccagcactttgggaggccgaggcgggtggatcacctgaggtcaggagttccgagaccagcctgaccaacacatagtgaaaccctgtctctactaaaaatacaaaaattagccgggagtagtggtgcacgtctgtagttccagctactcaggaatctgaggcaggagaatcacttgaacctgggaggtggaggttgcagtgagctgagatggtgccactgcactccagcctgggcgacacagcgagactccatctctcaaaaaacaaaacagtgtattcttatcataaaatacagagaaaagtgtaaaaaataaattaaatatgatccaaaatccccattttcagcatccctctgtgcatgtgtacactatttttttttttttccaagtctgagtcttgctctgtcgctcaggctggagtgcagtggtgcgatctcacctcactgcaacctccgcctcctgggttcaagctattctccttcctcagcctcccgagtagctgggattacaggcatgcaccaccacaccagctaatttttgttttgttttgtttttttaagacagagtttcactctattgcccaggctggagtgcagtagcacgatctcggcccactgcaacctctgcctcctgagttgaaatgattctcctgcctcagcctcctgagtagctgggattacaggagcctaccaccatgcccagctaatttttgtatttttagtagagacggggtttcaccgtgttggccaggctcgtcttgaactcctggcctaaggtgatccacctgccttggcctcccaaagtgctggcattacaggtgtgagccaccgtgcccagcctgaattttatatttttggtagaaacagggtttcaccatattggccaggctggtctcgaactcctgacctcaagtgatccgcccgcctcggcctcccaaaatgctgggattacaggcacgagccactgcgcccggcctgggtttttaaaattatatctttattgaggtatagtggacataaactgcagctatttcaagtgtacaatttggctattctcagcctatggggtagtcctactccagagaagcagtaagaaaaaaagaataaattgtacaattccatgagttttgacatatgtgtacaactgtgaagccatcaccacaattaaaataactcccatttccccaccctttgttgaatatttggagactgatagatagatgagttatctatgcccctttgtaatccacccctctctacccaatatcttattcactgtaaactgctgatctattttttatttttagaaattaatttacattttctagaactatatataaatagaatcatagaatatatggtcttttatttttgttctagcttgtttcagtataattatttgaaatttatctacatttttatgtgtagttttttttttctttctgaataatggttcattgttttttgttttaagacagggtcttgctgtgtcacccagggatgatcatggttcagcatagcctcaacctcctcagctcaagcgattctcccacctcagcctcctgagtagctggcactacatgcacaggccaccatacctggctaattttaaaattttgttatagagacagaggtctcactgtgttgcacaggctggtttcaaactcctggcctcaagctatcctcctgccttagcctcccaaagtgccgggattataggcgtgagcccctgcacccagccacattgtactgatatgatacagtttattcatttacctgttcaaggacatttgaatttttttctagtttttgaatgcaacatataaagcgactgtgaacattcacgtacaagtatttgtgtggatatatgttttcatttttcttgggtaaatacttagcagtggaatggctggattatagagtaggaatgttttaaagatactttttaaatgagaaaaggtttttctatttgcccacatattgtcatttccagtgctttcattctttcatgtgatccagatttccttttggtaatattttctttctgcctgaagaaattcctttcatatttcttataatgcagattggtgataaatactttccactgttgtttatctagaaaagtattttgcctttattttgagggaggatgtttttgctaagtatagaattctaggttcacagtttttaaaattatttaacttttattttttaattggtaaattaaaattgtattttattgcatacaatatatttgttcacagttttctcctgtcagtactttaaagatgatgtctaggctgggcgctgtggcttacgcctgtaatcccagcattttggggggccaaggcaagtggatcatttgcgatcatgagttttagaccagcctggctaacatggtgaaaccccgcctctactaaaaatacaaaaattagctgggtgtggtggcgctcaccagtaatcccagctacccgggaggctgaggcatgagaatcttgaacctgggaggcagaggttgcagtgagccgagatggtgtcactgcactccattctgggtgacagagcaagactgtgtctcaaaaataaataaataaggctgggcgcggtggctgacacctgtaatcccagcgctttgggaggccgaggcaggcggatcacgagatcaagagattgagaccaccctggctaacacggtgaaaccctgtctgttctaaaaatacaaaaaaaattagccaggcgtggtggtgggcgcctgtagtcccagctacttgggaggctgaggcaggagaatggtgtgaacccaggaggcagagctggcagtgagccgagatcggccacttcactccagcctgggtgacagagcaagactccgtctaaaataaataaataaataaagaataaaaataaagatgatttctagttgggctcaatggttcatgcctgtaatctcaacactttgagaggctgaggctgggggacctcttgaggccaggactttaagaccagcctaggaaacacagcaagaccccatctctacaaaaaaatcttaaaaattagctagtggcttgaacttgtagttccagctgttcaggaggctgaggtgggagaattgcttaagcccagggggacaaggcttcagtgagctaggcaagcctgggtgacagagcaagatcctgtctcaattaaaaacaaaacaaaacaaaacatcctgatgagaagtctgctactatccttatgttcctgtctatgtaatttttcttctggtcgctttaaaaatgattatgatgtgcttgtggggggatcactaagcttctttgatttatggattttttttttcttttgagacagagtctcactctgtcgcccaggctggtgtgcagtgccacaatctcggctcactgcaacctccacctccagggttcaagcgattctccctgcctcagcctcccgagtagctgggattacaggtgcccaccacctcacctggctaatttttgtatttatttatttttattttatttttttagtagagacagggtttcaccatgttggccaggctggtcttgaactcctgacctccagtgatccgcccaccttggcctcctgaagtgctgggattacaggcgtgagccaccttgcccagcccattatttcttacaaagagttcaaaatgaagaaaaagaacagttctttttttcttgggactgcgattacatatggtcctgcaggtggttgatgcactgttcatttttgtctttttccctgtttcattttgtgcagttgttcactgatctttacttctgtaatatctaaccttctgctgtcaatccctccctccctccctcccttcgttcctttctctctcttctcttcctcttccttttctcttctctttcttgcctgtgcagagcagggctgctccataggcaaagtagcccagcatatttttcatttcagatactgtatatcccctctagaagtttaatttggattttttttcatgtcttccatttctctcctcatatttattatttcctcttctttcttttttgagatgaggtctcactctctcttccaggctggagtgcactggcatgagatctcagctcactgcaacctccacctcccaggttcaagcgacccttctgcctcagcctcctgagtagctgggattacaagtgtgcaccaccacgcccagctaatttttgtatttttagtagagaccaagtttcaccatattggccaggctggtctcagactcctaacctcaagttatccacccaccttggcctcccaaagtgctgggattacaggcttgagacactgctcctggcccgatcctgtgtctttaaaaaaaaaaaaaaaaactctaacaagtaatactgctttttttaaaaaaaattgtgggccaggctcagtggctcacgcctgtaatcccagcactttgggaagctgaggtggacggatcacaaggtcaggagatcgagaccatcctggccaacatggtgaaaccccgtctctactaaaaatacaaaaaattagctgggcatggtcgtgggcgcctgtaatcccagctactggggaggctgaggcaggagaatcacttgaacccgggaggcagaagttgcagtgacccgagattatgccactgcactccagcctgggcaacagagcgagactccatctctattttaaaaaaaaaaaacaaaaaactggtagaaaacacgtaaaacaatttacaatctttactatttttaagtgtacagtttagtaatgttaactatattcacattgttgtgcaacagatcactagaacttttttcttgtaaaactgaaactctatacccactgaacaagcctccacttctccctccccttagcccctggcaaccacagtactactttctgtttctgtgagtttgactactttagatatctcatctaagtggaatcatacagtatttgtctttttgtgacaggcttatttcacttaatgcagtgttttaagattcatccatgttgtagcatgtggcagaatttccttttttaaggctgaataatgttccattgtttgcgtgtaccaccttttgtttatctgtttattcattgacagacacttgggttgatttcatcttttggctattgtgaataatgctgcagtgaatatggatgtgcaaatatccctttgagaccccgatttcagttctttggggcttatgccaataagtacgattgcttcatcaaatggtaattgtgttgttcattttttgaggaaccgctatattgttttccatactggctataccatctcatgttcccatcagcagtgtacaaatgtcccaacttctctacttccccaccaacatttattttctttttttttttttttgagatgaagtctccctctgtcgcccaggctggaatgcagtggcacagcctcagcttactgcaacctctgcctcctgagttcaactgattctcctggctcagcctccagtagctgagattataggcgcacaccaccatgcccggctaatttttgtattttcagtagagacgggttttgccacgttggccaggctggtcttgaactcgcgacctcaggtgattcatttgccttggcctcccaaattgctgggattacaagtgtgagccaccatgctcggccttttctgtttttttgatagtggccatcctaagggatgtgaggtgatagcagtgtagtttcatttgcatttctctaatgattagtgatattgagcatctttacgtgtgcttcttggccatttgtatattttctttgaaggaatgtctattcaagtcctttgcctttttttttttttgaaacagggtcttacttggtcacccaggctgcagtacagtggcacaatcatagctcactgcagcctcgaacttctgggctccagtgatcctgctgccttagccacccgagtaactgggactgcaggtgctcaccatcataccttgctaactttgttttgttttgtttttttcgctgtctcttacagaaaggacttactaagttaaaaaaaaatttttttttatagagattggatcttgctatgtctcccaggctggtcttgaactcctgtttgcctgttttttagttgggttatttgttgttgttttgtaggggttctttatatattctggatattaacctttttttttttttttttttttttttgagatggagttttgctcctgttgtacaggctggagtgtaatggctcaatctcggctcactgcagtctccacctcccgggttcaagcaattctcctgcttcagcctcctgagtagctgggattacaggcatgcgccaccatgcccggctaatttttgtgcttttagtagagacagggtttcaccatgttggccaggctggtcttgaactcctgacctcaggtgatctacccgcctcggcctcccaaagtgctgggattataggtgtgagacactgcgcccggccatgatattaacctcttatcagatctatgatttgaaaatatcttctcccacttcatagattgccttttcactttgtcgattgtttcttttgatgcctgaattttttttttttttttaattttgagatggagtttcactcttgtcacccaggctggagtgcaatggcgcaatcttggctcactgcaacctccacctcccgggttcaagcaattctcctgcctcagcctcccaagaagctggcacccaccaccacgcccagctggcccgattgatttttaatagttaaaccaactttgcattcttggaataagttcatcctggccataacatatttatcatttttaaatattactggattgagctggcaaatattttaagatctttgcatttgtgttcatgtgtaaaattggccaaatccttgtcacatttgtgtatcaagattatgctgatttctggccaggcgcggtggatcacgcctgtaattccagcactttgggaggccgaggcggtcggattatgaggtcaggagatggagaccatcctggccaacatggtgaaaccccgtctctactaaatatgcaaaaattagctgggcgtggtggcgcactcctgtcatcccagctacccgggaggttgaggcaagagaatcgtttgaacttgggaagtggaggttgcagtgaggtgagatcgtaccactgcactccagcctggcaacagagtgaggctctgtctcaaaaaaaaaaaaaaaaaaaaaagattatgctgatttctgtgaattgcttgagcccaggaggcagaggttgtagtaagctgagtgcaccactgcagtccagcctgagcgacagagcacaactctgtctcaaaaaaaaaaaaaattatgctgccctctttagcttgggaattattccctctttttctagtctgtggagacggagggtttaagatcaatatctggctgggtgcggtggctcactcctgtaatctcagcactttgggtggccaaggtgggcagatcacctgaggtcaggagttcaagaccagcctggccaacatggcaaaaccctgtctctactaaaaatacacaaaaattcgccaagcatggtagcaggtacctgtaatcccagctactcgggaggctgaggcaggagaattgcttgaacccaggaggcagaggttgcagtgagccaagattgtgccactgcactccagcctgggcaacagcatgggactctgtctcaaaaaaaaaaaaaaaaaaggaaggaaagatcaatatctcttcctcagccaggtccggtggctcatgactgttgggaggccgaggcaggcggatcacttgaagtcaggagttcgagaccagcctggccaacatgatgaaactccatctctcctaaaaatacataacttagctaagcgtggtggcgtgagcctgtaatcccaggtacttgggaagctgaggctggagaattgtttaaacccaggaggcggaggttgcagtgacctgagatggcaccattgcactccagcctgggctacagagtgagactccatctcaaaaaaaaaaaaaaaaaaaagaaatatctatctatctatctatctatctatctatctatctatctatctatctatcttcctctttcttcatcttctttttcccttcctgaacagttcaaaccaaaagtcattaggtaggatcaagcaagatagatgtttacgtagtgggaaggctacagtgctggaagtgccagatgctggggcccctgaagctgaggtgaatgtcattacaggtggcaggtggcagctcagtacatagagactgggcccaaacaagatcagaagggcatccatgtaggcaggggtgaagagtagaggaggccgggcatggaatagtgaagtctgaagcggggttgaggatgctgaaccacagggaggcctagagtggggtggcggagtcaagtggggtgagcagggcttttgcatggagaggggcggccgtggcgcctgatgtgggcaaggaagttgtgtctgcatggttgagggagtggagagagggaagagggtgattgtgccctcgggagggtaaaagagtccaagcatcctaaggaagacgtgcatttggggagtgtgtggcagcaatagtggaagactggttacatacaaggagattaatcaaatatgtaagtatattgagtaaaatgggaaccacatttttcactgtcaaagaagggaattataaacatggaaagagagaaactcaaatcaactctgtggtgttgactttgaattgaagacattgatacaaatttaaggttttcagtatacaaagtaagacagttgtgaagcaatctgattgcagattccttttacatttttattaccttaatcttttataagtatctcaccctatgcttaatttgatggctcttcttttttttttttttttttcttcttcctaatagagacagggtcttgctctgccacccaggctggaatgcagtggcaggatcatagctaactacagccttgaactcctgggctcaagtcaccatcccacctcagcctctcgaatagctatgagcacaggtgtgcaccatcactcccagctaatttttaataattttttatagaggctggacccagtgggtcatgcctgtaacagcactttgggacgttgaggtggaaggattgcttgagcccaggaatttgagaccggcctgagttacatagtgagaccctgtctctaaaaaaaaaaaaaaaaaaaaattggtgacacacacctatagcctatagcaccagctacttgggaggctgaggcgggaggattgcttgagcccaggaggttggggctacgctgagccaggattgcaccactgcatcaaggttttgaactcctggccttaagcgattctcctgccccagcccctcaaaatactgggattatagatgtgagctactgtgcccagccaatagctattatttttgcaactcattatcaagttcttccaaagctttcaacacggcttttatagtagtaataatggcctttgtttttgcatgtatttcatcaatttacatgcttaattaaatttggtgttaattgcaataaaagatacaattggaataaacaggtttgagaacaactacaaccaacccttggtttggtaagcatagaactcaactggagggagccgaagattgtcatactaccagcaagcatttggcagaccatgagcattagaatgaccgtgaggttagaatgttttatagagggaagggaatgtgccagttagtatgttgtgatagctaagtggttgttgcatagaagaacttgtacaggtctgtgaggctgggatagctgcagcgtaaagaagaagtggaaaaggtggagaaaggcggacaagtggagaactttacatcttggggatgtaaagttcttaaaacagtgcctgactgggcgcagtggctcacgcctgtaatcccagcactttgggaagccgaggcaggccaatcacctgaggtcaggagttcgagaccagcctgaccaacatggtgaaacctgtctttactaaaaatacaaaaattagctgggtgtgatggtgtgggcatgtaatcccagctactcaggaggctgaggcaggaggatcactggaatccaggaggtggaggctgcagtgagctgaggttgtgccaccgcacttcagcctgggcgacagagcaagccttcatctcaaaaaaaaaaaaaaaaaaaaaaaaacacacaaagaaaatccccccaaaaaaccagcgcctagtacatagtaagcacttaataaggttaagccattgatattctcatgattattttcatcatcattttctggaatgtttggaagaataggaaggggcacagatctgactcctgccctcctaactcagccactgctctgagctgaagctcttctaaagagagcactgtgggaataacaaattagggcacatccatgtaatggaatacctcagcaataaaatgagatgagctcttgatacagcaaactcagatgaatctcagaggcatgatgagtgaaatgaaacaagacagtctcaaaaggttgcatactgcctaattcatttacatgacattctatttttaattttattttattttatttttagagacagggtcttgctctgtcacccacgctagagtgcagtgattcgatcgcaactcactgcagcctcgacctccaggcttccgtcatcttcccacctcagccttctgagtagctagaaccacatgcacctaccaccatgtctaaattttttttgtgtgtgtagagatggggtctccctatattgcttaggctggtcttgaactcctggcctcaagcaatccccccgcctcagtctccccaggtgttgggattactgtgctcggtctataggacattctatgagggcaaaacaatagtgatggagaacagatcagccaggggctgggggcgaggggagggtgtgattacaatgggataccacgatggagtttttgggctgttgcaaatgttctgcatcctgatttgggtggtggttatttaagtctatacatatgttaaaattcagagaactttatatcccaaatttgctatatgttaattaaaaaaaaaagtaaaaataaagccttaagaaatgaagggaggcggggcacggtggctcacgcctgtaatcccagcactttgggaggccaagggtggcggattacctgagggcaggagttccagaccagcctggccaacatggtgaaaccctgtctctactaaaaatatacaatttagccatgcgtggtggtgggcacctgtaatcccagctgcttgggaggctgaggcaggagaatcgcttgaacctggaaggcagaggttgcagtgagccgaggtcgtgacagagcaggactccatctcaaaaacataaaaataaaaataaaaataaaaaaaagaaagaaatgaaggggccagacaaagcggctcatgcctgtaatcttagcactttgggaagccgtggcagggggatcgcttgagcttaggagttcaagaccagcttgggcaacgtgacaaaaccccatcttaaaaaaaaaaaatacaaaaattagctgggcatggtggcacgcacttgggaggctgaggtgggaggatcgcttgagcccaggagattgaggctgcagtgagccgtgtttgtgccactgcacttcagcctaagtgacagagaaagaccctatttcaaaggaaaagaaaaagaagtgaaggccctgtagagagcgtcctagtgtctaagctgacctggccccaagcgctgctcgaggggtgcttctgtgacggcgcagcatgtgtgcccaggcctggttcctcacggccaggcccatcatcactcactggctttttccttcctcgtgttagattggagctggagggagcatcactgggctgaagtttaaccctctcaataccaaccagttttacgcctcctcaatggagggaacaactaggctgcaagactttaaaggcaacattctacgagtttttgccagctcagacaccatcaagtgagtagtttaactagcaggggaaagggcttctaagcttaggtgtagttccggcaagagcatccagatcccatttccttaacccaacctggcccagggaagaaaggaaagatgtcagccactttccgcccttctttctctttctcaaactgctccttggctgccctcactttggtccaggtgggttactgctttgggaaggtgttctggagcctcagctcttctgtaagtcatacctgtattagactggaccttgaccctcactagataagccagcatggcgtggacccagaaagccacctagagaatggagcaacagctcagaacttgagactgaatgccctgcactcactgtggtgtaatgacctgacctgttcctgggtggaagcttatatggatggaatcttttccataaagtgctctggacttcccaagagaaagtggctggagaaattacagaatgcggccgggtgcagtggctcatgcttgaaatcccagcactttgggaggccaaggtgggtggatcacctgaggtcaggagttcgagaccagcctggccaacatggtgaaacccccatctctactaacaatacaaaaaattagctgggcgtggtggtaggcccctgtaattcccagctacttgggaggctgaagcaagagaatcgcttgaacccaggaggcagaggttgcagtgagccgagatggcgccattgcactccatcctgggcaacaagagcgaaaatctatctcaaaaaaaaaaaaaaaaattacagaatactcgtcactttgatttccagctagagccgtgactctgactgctccctgaggaattaagtgagggtgctggggtgtaactagcattggattggatcctgggctgtcccgcagggatgaggagtgcatgcgcacgcaaatcagcaggcaattggatagacaaggctccaggctactcttccgcaagaaatcttcctgcttgaagatattcataggggatggcaaaaggcagtgtagcatggatttgagagtttgagagaaaaactgtgagctgagctcttctggctgaatagcaggatccctgaagcacccccctagtcagcctcccagtccagtggtttgagggaccagaagagctcctggttgtgttttttcccccagtgttcagaagggggcagaagtgcttttctagccagctctgaggaacagggccaggcaatccctctttggcttgtgtctcctttggcctaaagggtgaagagtgaaaggagagagcagtaaaggaggcttgctcagaacccggggtgtggggggcaggcgtgcctcagggcttgctttatggtataagctttgtctgcttcagggacttttaggagctggggatcctgggcccagccgtaaccagacagatttctgagccccattatcccatcccctctgtctggacggtagagcagtctgaatgttcctcactaggaatccacggcaagacagttattcattcattcaacaaatatttattgaatgcccgctgtgggttagtcaccggagcggcaacagtgagtaaataggactatctctgtccccaagaatcttacaacacagtctctccctccagcatctggttttgtagcctggatgtgtctgctagtagccgaatggtggtcacaggagacaacgtggggaacgtgatcctgctgaacatggacggcaaagaggtgcgttctccgaggtcctgcctttccctccctcacccccacctcggttctgtgtccccacctgaaccgagctcttctctgcagctttggaatctcagaatgcacaaaaagaaagtgacgcatgtggccctgaacccatgctgtgattggttcctggccacagcctccgtagatcaaacagtgaaaatttgggacctgcgccaggttagagggaaagccagcttcctctactcgctgccgcacaggcatcctgtcaacgcaggtgtgatatcccagacctcatctctcctgcagaccctgcctgtctgaccactgctggggttttccctcagtgtggaagccactacgtcaaacctttacccctgatagcgtctgccaagctgatgtctgggaacctttgtggctgtggctgtccccatcagctgctgagtttccagaatttttttgttgttgttcacagcccagattcacctcttcctttccgctcctgtctagagaggagtgggagggagagtacccctgcaggagaaggcctgcaaggccaggaccacagagggcttgtggttccttcagctcaggggcttttcactttgccagcttgtttcagtcccgatggagcccggctcctgaccacggaccagaagagcgagatccgagtttactctgcttcccagtgggactgccccctgggcctgatcccgcaccctcaccgtcacttccagcacctcacacccatcaaggtgagtggcggtgggaaggagctcgcagaaggaggctgtgatcatgaggccggagcaggtctgcccacagtggggaagggctgatgtggtaagcctgccaccccagatcgctcctggcccgagcacagagcatctcttacccattggctctctctcttccttttatcccacttctgccatcccatatggttgagttttctgtctcgctgataagatatttttctgagttttttcagcccagctctgatctcactgtgagaattttctaagatcctgaccctctgttctgtcttctcagcttcagttacctgtgtacagttgacccacaaaccttcattttttatttttttattattttttttaaggcagggtctcgctctgtcacccaggtgggagtacagtggggcaagcatggttcattacagccttgatctcccaggctcaagcgatcctcctgcctcactttttttttttttgtagagacagggtattcttgtgttacccaggctgatccttttttttttttttttttttttttcttgaaacggtcttgctctgtcacccaggctggagtgcagtggcacaaacatagctcactgcagcctcaacctcctgggttcaagcaatccttccgccttagcctcggaagtagattggactacaggtatgcgccaccatacccagctaatttttttattttttatagagatggggttttgccatgttgcccaagctggtcttgaactcctaggttgaagccatcccccaaccttggcctcccaaagtgctaggattacaggcatgagccactgcgcctggcaactttgccttcttagtttgtcttgcaggtttcagtgcttctaataataaaaataagtcttttattttcccaccttttctcaggctcttgttaatagcttctctatcattagtccccaacactaatagctttcaagtcctttgatgcctttttgcctaagcccccatgcagactgagctctgctagttctgcattcttttccaaaactacagatcctcttcagatcttcaggttttatgcctatacttctctggtcagttcagaatagtggtggggagcgccagtttccagcagccagaccccccgggttagaatccttgggcaaattacttatattttggatctgtttcctcatctgcaaaaagggaatactagtctctaactgatagggttgttgtgaagatgagtcagtatacttaaagcacttggccccatgcccagcacctggtaagtactggtaagtattcaataaatgatgattgaatattgagtggcccccacgtacctcaatcacatccaagctcttaataaataatgtcaagaatccttccccagttggtgttcctgttaatccatcagtgttcccgataatccatctgtctgcatgtcccagtttgtatctagccaggtgtcgtaagtcattacagcttcctgtgtgtgatttgtgacttatttctaagccttcgcatgtactatttcttccttcctgctaaccatgtctttcttccttcaaaacttccttgagaagtttaggaaaatcccatccaattctgccattttaataactgccagatttgtttttagtggggtgatctggggaatgtgggtttccttctcttttttagccattagcaattttacactcagctcttagttattcgtgttgatggagacaggatgacagtggggctcctccagaactcaagtcctgttagggtttggtcaccagaggctttttctgctttgttgtaggcctcttaggtcagtatctgggtcaggctgatgttaaaacgtttaccagttggtatgatcttaggaaatgcaaatgagggagaaggcctgaaggtgccctaagggccagggaggccagctagggattaaaaatgtgcaatggcagaggcacacacaacctaaaaccattcttgtagttttctgtaagacttatctccattattaggttggcttgttactggcaaatactacttttttttttttttttttgagagtcttgctctgtcacctaggctggagtgcagtgacatgatcttcactcactgcaacctccgcctcccgggttcaagtgattcccctgcctcagcctcccaagtagctgggactacaggcatgtaccaccacgcccagctaattttttttttggtatttttagtagggacggggtttcaccatgttagccaggatggtctcgatctcctgacctcgtgatccgcctgcctcagcctcccaaagtgttgagattacaggtgtgagccactgcactcagcccaaagaatacttttgatgttcctctttgttcatatttgtttttgatgtcccccttgatcatgttctgtgtttaccctcatggccggcctctccatctcctaggcagcctggcatcctcgctacaacctcattgttgtgggccgatacccagatcctaatttcaaaagttgtaccccttatgaattgaggacgatcgacgtgttcgatggaaactcagggaagatgatgtgtcagctctatgacccagaatcttctggcatcagttcggtgaggcttgggtcctcaaataatgatgggaggaagcagggattcaacctaccttattgaccaaaagtgaccagaaatcaggtgtctctgctaataccttcaccctctcctcatgctgacactcttgtctctgcagcttaatgaattcaatcccatgggggacacgctggcctctgcaatgggtgagtaggaggagaatgtctctgacttgccaagtccgatcctacttcccaaggttcagtgcgggccagcctcagccccgccctgccacattcaccccagggcagtggcccacgaagaagatggctgggagacagtggtctctatagccaaggccctccattcctctggctttgtcttggtcatgcaatgcctggctactgtccagtttcctagtatttcttttttttttttgagacggagtctcgctctgtccccccgggctggagtgcagtggcgtgatcttggctcaatgcaagctccgcctcctgggttcacgccattctcctgcctcaacctctcgagtagctaggactacaggtgcccgctaccacgcccagctaattttttgtatttttagtagagacagggtttcaccgtgttagccaggatggtctcggtctcctgacctcgtgatccgcccacctcagcctcccaaagtgctgggattacagacttgagccaccgcgcccggccttcctagtatttctttaccaaattgtaggtttgcgggccagccccaggctctgagagattggtaacagaaagtgtaagtcagactggtctcactcttcctaggttaccacattctcatctggagccaggaggaagccaggacacggaagtgagagacactaaagaaggtgtgggccagacaaggccttggagcccacacatgggatcaagtcctgcaagcagaggtggcgatttgttaaagggccaaaagtatccaaggttagggttggagcaggggtgctgggacctggggcactgtgggactgggacacttttatgttaatgctctggacttgcctccagagactgctccagagttggtgacacagctgtcccaagggcccctctgtatctagcctggaaccaaggttatcttggaactaaatgacttttctcctctcagtgggtggtagcagagggatcaagcagttatttgatttgtgctcacttttgatatggccaataaaaccataccgactgagcttctgcgtggatcttccagaagtgacctggtcagagagcttcttgcgtctcagaaatgaagaaaaagcacaggaaacagcactatcagtccaataggaaacagcactattcattctctgggagctgccccagccctattctgggccacagtctagaactttcttttccagctcacaacctgcatgtagctcaggtccctggagaccccagcccagctgagggagagcagtttcctgattcgtgtgacaagcaactcccttcccaccactccccactccctcccaagtacagacaaccttccgtcctgctccagttgaaggggtgacaacgattcctgaagcattctgtctgagtctaatggtggctctagccagacacagggaaatgtggctggctggctgttgggtgatccagttccttgggagccaatgtttgtacccctggtattagctgtttttcccactaaaataagcactgagaggcaagaccgtgtccctctgagctatttgccgaagacttcaggctggaggaaaaagaacagggcttgatagaagtgcaaggtggatccagcaccaactctgccattttctaatcctaggtcctgagtgaacactgactgccagtttacatctcaggtgtgtagggagcgtggaggaggcaaatcctgtttggagaaagccagtgtccaacacagcacttggtaaacatcaggcatgggaatgctgagtgacaggcaccatgggccacgctgagccccactcgctcatctggctggggtcatcagagggaggcccaacccaggatctcctgtccatgggctggggagcagcaacagtcaggagcgagggcccagcccacctcccctaggaggtggagggaagggggctgagtggttgtcaggcgtggtcctccccatctgcgacgtggcggtagccaggaggctgggcctgcatccggaagaggacggtgaggagcagcactatgaggaggaagaggatggagccacatacagccaaggccacaatcacctctgggcatgggggaggcaagagaaaggtcatgtcagcgttccatcatatgccagctactgttctgacatataggagatacacagaggtggccaagacagagtccctgctctcatggagtttacattctaggagaggggatgtaataaataagcaaatgggctggtcacagtggctcacgcctataatcccaacactttggaaggttgaggtgggcagatcacctgaggtcaggagttggagaccagcctggccatcatggtgaaaacccatctctactaaataaagttggccgtgcgcagtggctcacacctgtaatcccagcactttgggaggccgaggtgggtggatcacctgaggtcaagagtttgagaccagcctggccaacgtggtgaaatgccgtctctactaaaaatacaaaaaattagctgggcatggtggtgtgcacctgtaatcccaactactcgggaggctgaggcaggagaattgcttgaacctgggagacagaggttgcagtgagccgagatcacgccactgcactccagcctgggtgacaggatgagacaccgtctcaaaaaaaaaaaaaaaattaggagtgacaggtcagtgacgaatgtgatacagagagacaaagcaaagtaggtcagcagggaaggcatcattgagaaagtgagaagtttaacagagacctggagtcaatgaatgacatacaacaatctgagaagagtatcacagggcagaggagacgaagggcaaaaggcccagatgtggggataagcctggcacatgctagtatcatcaagagtcagtctcaccagagtagagtaagcaaggggcatgtaggagatggggcaggagaccagatggagtagggcctagaaggccatggtgaagaacttggattttattctatatgtgatgggaagccactagaaaattctgagaggacagtagtatgaactggtttacattttttaaaagttaactcagtcggccgcggtggctcatgcctgtaatcccagcaatttgggagactaaggcgggcggatcacctgaggttgggagtttgagaccagcctgaccaacatggagaaacctcatctctactgaaaatacaaaatcagctgggcatggtgatgcatgcctgtaatcccagctactcgggaggctgaggcaggagaatcacttacacccgggaggcggaggttgcagtgagccgagattgcgccactgcactccagcctgggcaacaagagcaaaactccatctcaaaaaaataaaaaaagttaactctgctgtgttgaaagactggtagggacaagaatagaaccagaaagaactaggaagcttttcattcggtcaggcaagagctgacggtagattggactgcggaggcaagagcacatattaatatttgaaaggttgagctgatctggcagtgggctggatgaggggtatgagaaacggtatgcagaatgaccccaagggttatactgtgccactaggtgactcgtggcattgactgaaacaaggaagcctggaagaagagcagctgtggaaggaaaagcatctggttttagacattgcaactttgagatgccttacttaacatgcatgtagagatctcaagttggcagctggatatgagtctctagctcagagaagaggttgtgaatctgtgagtcagggcgtaaggacagaagtgggcatggagatgggcataaagtcatgaggctgcatgagatcacttgggagtgtgcacagatggggaaagctccagggatgagtcctgggtcatccgttctttagtgaggaagggacgcctgaaagtcagaagccaagaaagtgtttcaggaaggggtgaccaattatgtaatgctgctgagaggtgagagaagctaagaattagtcactggctttggtaggaggtgactggtcaccagacaagtatggcttcagggtagtggaaggtgacacaagactgtctaatgtgagtctaagagaacaagtggtgaggaagcagagccagattctaggcagctctttcaaggattccattctgagagggaagaggctggtggctggggaagaggtggctctcagaggtcatggatgggcttttgggagggaagtgatccagtagagaagcagaggcgtcagagctccttgcagagatgaggagagaacccaagtgcgggtggagaggccaccctaagcggtggcttcccccaggaagtaacctggtggtgggagaacgagccaattctctcttggctcttattttctcggtgatacaagtgagacatcacccgagggtgagaagtggggagaaggtataaagcagtctggggtcggggagggaactcctagcaaatgcagtcaaatggctggaagtgcgacagctcttgagatgcgtggatgtgaactgcaggctggtctagggcatgactagcaaggaggccggtgacagctcacctgtgtctgcaggaccgcttgccagctggcactcctgctgccaatccttgggcacgacgggctctgtgaggcgaaggaagtcctgcagtgggcagcggtgagggcagccaggcaggctgagcggccagggggccttgtcactctcgttccgaaagtacatctccactgagaaattcctgagggtcgacaggaggcaacatgggagctgctcagcctgcccatcatggggtccttgggctgccccgagccacctcccgagggcccccctccagaggacactgctagctccactcacccagaatcttcctggtacagttcaaatatgtggcaggaggcgtagggggcttgttcaccattgtagacatccagtgccatttgcagggcaaccagggtagtgtcgtgctgcgggggagaggggctgcccgtcagcattgttccccacacccgcaggaaccgaacagagaagaaatccagctccttgcctgacacagcacgctagggagcgcaggcactcaccgcagagtaaaccagcagcttggggagctgggaggtggtcgccattagggtcaggttcttccttatctgagccagcaggactcctgaaggagaaaagtccccggtgttgctggctacagccacctctgccttctaattagacctatctgtgctcctttcaccctctgccaggcctgggcctcatcacctacacggagaactctttagtgtcatagggaccatgtaagaactctgtggcacccctcctctctaagaactgtcaaatgtacagaaggaagcaagacaaaacaagatatctgcctatatttcaacacggatgtagaaacctgcctgtgtttacagaagcacttcagtttgaaacaaatgtaaacttaagattgcttcagagtacacagcgggtgggtgcatgcccgggtaactaccatatgctctgaaaagtgagatgtcaaaaaggtgtgacagcaggcatgcccttaggtgctcaaataaggaagctggcatgtgtgttactctcagccttctcaaaatggcccccagtggttctcttggggcagctattcatttaggagagggagggtcttctgatgtgggcgaaacttaagaacatgaatggcagggctgggcgtggtggctcatgtgtgtaatcccagcactttggaaggctgaggcgggcagatcaccagaggtcaggagtttgagaccagcctggccaacatagtgaaaccccatctctactaaaaatataaaaattagttgggcgtggtggcaggcacttgtagtcccagctacttaggaggctgaggcgggagaatcgcttgaacctgggaggtggaggctgcaatgagccgagatcgtgccactctactatagcctgggtgacagagcaagactctgtctcaaaataaataggctgggtatggcggctcatgcctgtaatcccagcactttgggaggccaaggtgggtggatcacctgaggtcaggagttcaagaccagcttggccaacatggtgaaaccctgtttctactaaaaatacaaaaattagctgggcatggtggctgaggtcaggagtttgagtccagcctggcgaacatggtgaaaccccgttcctactaaaaatacaaaagttagccaggcatgatggcatgtgcctgcaatcccagctactcagaagactgaggcaggagaattgcttgaactcaggaggcagaggttgtagtgagccaagatcgagccattgcactccagcctgggtgacaagagggaaactccatccccccgaaaaaaaataacaatttttttaaaaagaatatgaatggcagaaaaggaagagaggtggggaaatttggtgactagcggcatgaggagggggatttggttttgaaagagcagggagtgtttcagtagagagggaagtgtgtgagaagcccccacagcagatttttaacgccttagggtcctgaggagtagagtgacacgctgtccttgtcactcacccccctgaagccgggccttctccgcctgctggtagattccgaagaggaagcggaagctgaagtcctttagccggctgagacgctgcatggtttggggtgaggcccagggcggcaggcgcagcccgtgcgtttgctgtgtatcgcagcaggcaggttagcgccccaggcctaggccagcctctccagggggcagctctcttccctagtgggaaggtgcctgtgtgtgtgagggagggagaggggagagaggcagaggggctggaaccagtagacatggcaggcggtgtggatgcttcagggcacaggaaaggaagctcaggcacaaaaagtgagactcagcagaaaggagctctgggtggagagcagcagggactgctgacaattaataaaccatttcccactctgaggatctctgtcacccatgagggaagttcccgtgtttcacaagcacagcctccctggacctccccaggggcgtgacggtatcaggcactgtgttctaccgtcctggtgacctgggcctgctgagagggaaaagaatgatcacagtgggcaccctagtgggctcacctcacagaagagtgtgtcatagacattccagacggtctccagtgtcaggtctgtaagccctgtctcgttggccaccatgtccagaaattgctatgaaaaatggatcagggtctcagtcctgctctggggaaaagacagcgtggtgagctgcacctctgcccccactcactgcattccgagaactctcattctgatactctggtgtctgccgggtctcgttctgcagctgctcataacggggacatgggcccaacgggaacttcagcagctgtagagcgaagcggggaaacaggcagcgggaaaaggagcctggcatcagcaggcctacggccagagctgtcccctcaccaccccagggaagggctggccactcttaccctgtcctcagtgatgggcacagtgtgcacaggaataggctgccacgagatgttcgggttgaagcgctgcatcccgttgggagggaagagtccagccaggttggcctcagcactcatgagagtccggtcaaagtctgtgcttcgcacataaacctgcagcgatagcaacacaagtcgtgtgtgtgtgtgtgtgtgtgtgtgtgttggggaagttttggtcaccctgaagtggagccttgtatgtatgtgtgtgtgtgtggtgggaagttttggtcaccccaaagtggagccccagaggagaacctgttcctgatggtcacccagcaaactaaacctaccatacatctggccctcaccctcctctggcctctggccttccccatcccccaaacactccactgggggttgtcaccactctgtgaagaactcttgtgggaatggccttagttgaaatgccccttccagtcaaaagtgctgagtcaatcagtaaggctctctggtctgtctggtttcataacaacacctctctccctgtctagatcagggtccttggggcagaaactggctccagtgacgacccttagagaccagggagaaaaaaataagataaagggctgggcctggtggctcacacctataatcctagcactttgggaggccaatgcaggaggatcgcttgaggccaggagctcgagaccagcctgggcaacatagtgagaccctgtctctacaaaaaaaaattttttaattacccaagtgtggcgggcacttgtagtcccagctacttgggatgctgaggcaggaggatcacttgagcccaggagtttgaggctgcagtgagctatgactgaggcatgtgctacagtttgggtgacagagtgagacccctttaaaatatatgtatatattttgggccgggcacggtggctcatgcctgtaatcccagcactttaggaggccgaggcaggcggatcagctgaggtcaggagttcaagaccagcctggccaacatgatgaaatcctgtctctactaaaaatacaaaaattagccaggcatggtggcacacacctgtaatcccagctacttgggaggctgagacaggagaatcgcttgaacctaggaggtggaggttgcagtgagccaagaccatgtcactgcactccagcctgagcaacacagcaagactctgtctcaaaaaaaaaaattttttttgaagagcttattcagagatagtggctcatgaaaagggaggaggaaactggggaaggacaagctcaggacagagctgggccttaagagaacaataacaatgtctatggattcttgatacggctgaggctgacagtggtaatcagaggaacagcttcccccattcctggggtggggcgaagactcaaggagcaggcacactcaccagtcctccctgatgtgccctaggaatatagcacgacctggcgcagcagacagggctcaaaaacctcatcttgatcaagaaaagacaagccctctctacgcatgtcttccccgctgtctttcatcttggccctgtctggtttatcattagatacccccacaacattctaagctccatgaagacagagatcatatctgtatggtgcacaactgaatgcaaagtgctagcacagtccttggcctttaataggtactcaatgtcttggatggaaagcctgtgatttcacagtcagaaaccactttgccaggcccgcccttaagtccgaatttggatgcttaatcaaatttgcctcatcccagccaagcaggggcaactcagctcctagggctttgttccagacagctctcagatgtcttttcctgtagttgtgaccaaaaatacaagaaggaggccaaagtgcccagcctcagccttaggctccctgagggcaaaagatgagggcagcataccttgttccccttgcctctggagctcccaaccttacctcttgccggtgataagaggtgtttaggaagccgtgatagcgctgccgcagggcctggcccagttcccagtgctgtagcatcccctcctgtgggcaaacccaagggttaagagggtctagagggaaggggtggcttcaagccccatggggtttaggccctgttgctttccaggttcacgctttgctggagtcaattaatctgatcccagaagtctttcattaagtggccagtcatgcacagcaatatcatgggcacagagattaaggttatgaaatctggtcaaagtcagcacccatatgggaaaaggcagtttagtaggaccccaagttttgtagactgctctagacgtcgctcattctgcagctcatcctgaggaaaggctggcttctgacccaccttggttaactgaccaaacccctggggccattcttcttcctgataggggtccttgggatatgtcttcactggtgaacggtctccatggcggtacagctgagagaataaaatggtttgcctataggtcagaagcatccccttgatagggacccagagcctaccttttgccccatgttagggaaggaagtctcattccctctgggaagcctactggctgcaaaagaccccagctaggagtcagtcacttcttccagattccagagattctaacttagctaagcaatgctactggagaccataggcaaagccaaggtacaggtaggaagggaaaagagaagtgaaagcaacgtatgtggtggggacaactggggaaaaaagataaccaaaggcttctttagggatgagtcttaaccattcaaccacttccctgtctcaaggcagactcaccccgacgtattcggtcatcctgactcccataagccagggctccaggtcaatcctgaatccagcctcccaactacccaggccagtcgtcccctcctaaaccagctgttccttcccgagatcctcgacctccaccagctggcctttgcccttttagcttcagggaagtctttggtgagcccatctctcattaccaaggtaacgaagcgcagactccgggcccgggtgggcggcatcaccaccaggttcacgccgagaaggagctggaggagagccgcccggctccagccggaccgcttgcccgccatcaccgttgtaatctatgcagcaaacaagctggaacccgctgggtggcacctgcaagcagccgcccggacgcacccgtaaggacacacgccggaagtgcgttcgccgccatcttacttagggacctgctggggtgcggggaaaaggcgcagtctcggtgggattgcgtgcaggagggtcgtggtctggctgtggcggaggagcataagaaggtaacgcgacctggcgcggcagacagggctcgaagacctcatcttgattaagaaggccacaaattcgcgtttgcctctgctcggagaaatcccttaccaaggtggcacttgcagtgggcgggaccatgtctggagaaccagcgtcccctccaggcttgaccccatagctagatcgggtgcagaattgaggcgagggatgggaaagtagaggtcgcttctctccacgcccctgcctttgtgg

SEQ ID NO: 645 - DNA, 2310 bp, Homo sapiens
ttcgtgtcaggaagtcaaggctggatgatcgcttaagcccaggagttaaagaccggcccggacaacaaagcgagaccccgtctctccagaaaaagaaaaaaagagagagagagagagaaattagccgggcgtggtggcgtacgcttgtagtcccatctacttaggaggctgaggtgggaggatcgcttgagcccaggaggtggaggctgcactgagctatgatcgccccactgccctccagggtgggcgacagagccagaccctgttgctaaaaaaaaaaaaaaaatccataaagccggggaccatctttgctccagggaggtcagctgacccgggctggcactggccctggggcagttcccgcccctcccgggagcgctggcaccgccccttggcaccaccccctccccgcgcccccgccttccaggaaggggcggggtctccgagacgggtggggccggagctccaagctggtttgaacaagccctgggcatgtttggcgggaagttggcttagctcggctacctgtggccccgcagttttgtagtccccgccttgtttctccccagaggcctctcaatcctccctccatgatcttcgcatagagcacagtaccccttcacacggaggacgcgatggctcccaagaaacgcccagaaacccagaagacctccgagattgtattacgccccaggaacaagaggagcaggagtcccctggagctggagcccgaggccaagaagctctgtgcgaagggctccggtcctagcagaagatgtgactcagactgcctctgggtggggctggctggcccacagatcctgccaccatgccgcagcatcgtcaggaccctccaccagcataagctgggcagagcttcctggccatctgtccagcaggggctccagcagtcctttttgcacactctggattcttaccggatattacaaaaggctgccccctttgacaggagggctacatccttggcgtggcacccaactcaccccagcaccgtggctgtgggttccaaagggggagatatcatgctctggaattttggcatcaaggacaaacccaccttcatcaaagggattggagctggagggagcatcactgggctgaagtttaaccctctcaataccaaccagttttacgcctcctcaatggagggaacaactaggctgcaagactttaaaggcaacattctacgagtttttgccagctcagacaccatcaacatctggttttgtagcctggatgtgtctgctagtagccgaatggtggtcacaggagacaacgtggggaacgtgatcctgctgaacatggacggcaaagagctttggaatctcagaatgcacaaaaagaaagtgacgcatgtggccctgaacccatgctgtgattggttcctggccacagcctccgtagatcaaacagtgaaaatttgggacctgcgccaggttagagggaaagccagcttcctctactcgctgccgcacaggcatcctgtcaacgcagcttgtttcagtcccgatggagcccggctcctgaccacggaccagaagagcgagatccgagtttactctgcttcccagtgggactgccccctgggcctgatcccgcaccctcaccgtcacttccagcacctcacacccatcaaggcagcctggcatcctcgctacaacctcattgttgtgggccgatacccagatcctaatttcaaaagttgtaccccttatgaattgaggacgatcgacgtgttcgatggaaactcagggaagatgatgtgtcagctctatgacccagaatcttctggcatcagttcgcttaatgaattcaatcccatgggggacacgctggcctctgcaatgggttaccacattctcatctggagccaggaggaagccaggacacggaagtgagagacactaaagaaggtgtgggccagacaaggccttggagcccacacatgggatcaagtcctgcaagcagaggtggcgatttgttaaagggccaaaagtatccaaggttagggttggagcaggggtgctgggacctggggcactgtgggactgggacacttttatgttaatgctctggacttgcctccagagactgctccagagttggtgacacagctgtcccaagggcccctctgtatctagcctggaaccaaggttatcttggaactaaatgacttttctcctctcagtgggtggtagcagagggatcaagcagttatttgatttgtgctcacttttgatatggccaataaaaccataccgactgagcttctgcgtggatcttccagaa

SEQ ID NO: 646 - protein, 423 aa, Homo sapiens
MAPKKRPETQKTSEIVLRPRNKRSRSPLELEPEAKKLCAKGSGPSRRCDSDCLWVGLAGPQILPPCRSIVRTLHQHKLGRASWPSVQQGLQQSFLHTLDSYRILQKAAPFDRRATSLAWHPTHPSTVAVGSKGGDIMLWNFGIKDKPTFIKGIGAGGSITGLKFNPLNTNQFYASSMEGTTRLQDFKGNILRVFASSDTINIWFCSLDVSASSRMVVTGDNVGNVILLNMDGKELWNLRMHKKKVTHVNPCCDWFLATASVDQTVKIWDLRQVRGKASFKLPHRHPVNAACFSPDGARLLTTDQKSEIRVYSASQWDCPLGLIPHPHRHFQHLTPIKAAWHPRYNLIVVGRYPDPNFKSCTPYELRTIDVFDGNSGKMMCQLYDPESSGISSLNEFNPMGDTLASAMGYHILIWSQEEARTRK

SEQ ID NO: 647 - DNA, 3322 bp, Homo sapiens
ggttcgtgtcaggaagtcaaggctggatgatcgcttaagcccaggagttaaagaccggcccggacaacaaagcgagaccccgtctctccagaaaaagaaaaaaagagagagagagagagaaattagccgggcgtggtggcgtacgcttgtagtcccatctacttaggaggctgaggtgggaggatcgcttgagcccaggaggtggaggctgcactgagctatgatcgccccactgccctccagggtgggcgacagagccagaccctgttgctaaaaaaaaaaaaaaaatccataaagccggggaccatctttgctccagggaggtcagctgacccgggctggcactggccctggggcagttcccgcccctcccgggagcgctggcaccgccccttggcaccaccccctccccgcgcccccgccttccaggaaggggcggggtctccgagacgggtggggccggagctccaagctggtttgaacaagccctgggcatgtttggcgggaagttggcttagctcggctacctgtggccccgcagttttgtagtccccgccttgtttctccccagaggcctctcaatcctccctccatgatcttcgcatagagcacagtaccccttcacacggaggacgcgatggctcccaagaaacgcccagaaacccagaagacctccgagattgtattacgccccaggaacaagaggagcaggagtcccctggagctggagcccgaggccaagaagctctgtgcgaagggctccggtactgcctgtgcctgctgcttgaatatttccgccttttagggtgctcgcgcaggaggctgcagcgggggatgggtgctccgaggctcccgaggcccgcgcaggtcacgggtgcctccggctgtgcattctacctgcaggtcctttgacaccagagtgtttaggtttcaacacctctcccgctaggtaacaggaagcagatgagctccgtaacaacagacacacggacttgtcagattccttgttcgtatcagggttcttgcacagttaggacggcttcagagaatcctacctttcctggcgctgtgtgtgctggatttcatagtcacgcttgttagctgcacgtcctcggtggtcagttgtgagagcccccaattccttcctccttagaaagctcattctctgaggtttactggggcttgaacctggggctataaggagtttcgagacactcaaaaacgagctggggcttgttaatcaagtggtttttgtccatgagaagaaagaattggttgtcaagacgtcggacctatagtgattgggtcctcaaatacagtttggtgatcaggagttgttgctttattgctattctaatttcacttacctccccagaagtaacctagttaagagcatttccaggccttcctattccttcttttcctaaacggtgacttctgccatgctgccctaaaatctttttattgtgcattatatgtgatttataaaattgtgacccagtcccatctcgagttttgcagcccaaactgggaagagttctgcattgtactttatccttgtgtgtttctttggctggggtctcaggaaccctgcacgactgtatttactttcacttcagacttactgtttgtgggagtgttttggggaaggggccaaatcctcactcatttttttatttctggtgctcgttgagaccacacagacatggaaaggccgcaggaggtgatgagacagagattaaccgtgccgaatgaaacaaggcttcctttcggggaattcagcagaaaaacctttcgtgagattggagaggaaaatatgtctgttctgcttggcaggtcctagcagaagatgtgactcagactgcctctgggtggggctggctggcccacagatcctgccaccatgccgcagcatcgtcaggaccctccaccagcataagctgggcagagcttcctggccatctgtccagcaggggctccagcagtcctttttgcacactctggattcttaccggatattacaaaaggctgccccctttgacaggagggctacatccttggcgtggcacccaactcaccccagcaccgtggctgtgggttccaaagggggagatatcatgctctggaattttggcatcaaggacaaacccaccttcatcaaagggattggagctggagggagcatcactgggctgaagtttaaccctctcaataccaaccagttttacgcctcctcaatggagggaacaactaggctgcaagactttaaaggcaacattctacgagtttttgccagctcagacaccatcaacatctggttttgtagcctggatgtgtctgctagtagccgaatggtggtcacaggagacaacgtggggaacgtgatcctgctgaacatggacggcaaagagctttggaatctcagaatgcacaaaaagaaagtgacgcatgtggccctgaacccatgctgtgattggttcctggccacagcctccgtagatcaaacagtgaaaatttgggacctgcgccagcttgtttcagtcccgatggagcccggctcctgaccacggaccagaagagcgagatccgagtttactctgcttcccagtgggactgccccctgggcctgatcccgcaccctcaccgtcacttccagcacctcacacccatcaagcctggcatcctcgctacaacctcattgttgtgggccgatacccagatcctaatttcaaaagttgtaccccttatgaattgaggacgatcgacgtgttcgatggaaactcagggaagatgatgtgtcagctctatgacccagaatcttctggcatcagttcgcttaatgaattcaatcccatgggggacacgctggcctctgcaatgggttaccacattctcatctggagccaggaggaagccaggacacggaagtgagagacactaaagaaggtgtgggccagacaaggccttggagcccacacatgggatcaagtcctgcaagcagaggtggcgatttgttaaagggccaaaagtatccaaggttagggttggagcaggggtgctgggacctggggcactgtgggactgggacacttttatgttaatgctctggacttgcctccagagactgctccagagttggtgacacagctgtcccaagggcccctctgtatctagcctggaaccaaggttatcttggaactaaatgacttttctcctctcagtgggtggtagcagagggatcaagcagttatttgatttgtgctcacttttgatatggccaataaaaccataccgactgagcttctgcgtggatcttccagaa

SEQ ID NO: 648 - protein, 268 aa, Homo sapiens
MKQGFLSGNSAEKPFVRLERKICLFCLAGPSRRCDSDCLWVGLAGPQILPPCRSIVRTLHQHKLGRASWPSVQQGLQQSFLHTLDSYRILQKAAPFDRRATSLAWHPTHPSTVAVGSKGGDIMLWNFGIKDKPTFIKGIGAGGSITGLKFNPLNTNQFYASSMEGTTRLQDFKGNILRVFASSDTINIWFCSLDVSASSRMVVTGDNVGNVILLNMDGKELWNLRMHKKKVTHVNPCCDWFLATASVDQTVKIWDLRQLVSVPMEPGS

SEQ ID NO: 649 - DNA, 1743 bp, Homo sapiens
ttcgtgtcaggaagtcaaggctggatgatcgcttaagcccaggagttaaagaccggcccggacaacaaagcgagaccccgtctctccagaaaaagaaaaaaagagagagagagagagaaattagccgggcgtggtggcgtacgcttgtagtcccatctacttaggaggctgaggtgggaggatcgcttgagcccaggaggtggaggctgcactgagctatgatcgccccactgccctccagggtgggcgacagagccagaccctgttgctaaaaaaaaaaaaaaaatccataaagccggggaccatctttgctccagggaggtcagctgacccgggctggcactggccctggggcagttcccgcccctcccgggagcgctggcaccgccccttggcaccaccccctccccgcgcccccgccttccaggaaggggcggggtctccgagacgggtggggccggagctccaagctggtttgaacaagccctgggcatgtttggcgggaagttggcttagctcggctacctgtggccccgcagttttgtagtccccgccttgtttctccccagaggcctctcaatcctccctccatgatcttcgcatagagcacagtaccccttcacacggaggacgcgatggctcccaagaaacgcccagaaacccagaagacctccgagattgtattacgccccaggaacaagaggagcaggagtcccctggagctggagcccgaggccaagaagctctgtgcgaagggctccggtcctagcagaagatgtgactcagactgcctctgggtggggctggctggcccacagatcctgccaccatgccgcagcatcgtcaggaccctccaccagcataagctgggcagagcttcctggccatctgtccagcaggggctccagcagtcctttttgcacactctggattcttaccggatattacaaaaggctgccccctttgacaggagggctacatccttggcgtggcacccaactcaccccagcaccgtggctgtgggttccaaagggggagatatcatgctctggaattttggcatcaaggacaaacccaccttcatcaaaggggcagcctggcatcctcgctacaacctcattgttgtgggccgatacccagatcctaatttcaaaagttgtaccccttatgaattgaggacgatcgacgtgttcgatggaaactcagggaagatgatgtgtcagctctatgacccagaatcttctggcatcagttcgcttaatgaattcaatcccatgggggacacgctggcctctgcaatgggttaccacattctcatctggagccaggaggaagccaggacacggaagtgagagacactaaagaaggtgtgggccagacaaggccttggagcccacacatgggatcaagtcctgcaagcagaggtggcgatttgttaaagggccaaaagtatccaaggttagggttggagcaggggtgctgggacctggggcactgtgggactgggacacttttatgttaatgctctggacttgcctccagagactgctccagagttggtgacacagctgtcccaagggcccctctgtatctagcctggaaccaaggttatcttggaactaaatgacttttctcctctcagtgggtggtagcagagggatcaagcagttatttgatttgtgctcacttttgatatggccaataaaaccataccgactgagcttctgcgtggatcttccagaa

SEQ ID NO: 650 - protein, 238 aa, Homo sapiens
MAPKKRPETQKTSEIVLRPRNKRSRSPLELEPEAKKLCAKGSGPSRRCDSDCLWVGLAGPQILPPCRSIVRTLHQHKLGRASWPSVQQGLQQSFLHTLDSYRILQKAAPFDRRATSLAWHPTHPSTVAVGSKGGDIMLWNFGIKDKPTFIKGAAWHPRYNLIVVGRYPDPNFKSCTPYELRTIDVFDGNSGKMMCQLYDPESSGISSLNEFNPMGDTLASAMGYHILIWSQEEARTRK

SEQ ID NO: 651 - DNA, 69958 bp, Mus musculus
  misc_feature (1)...(69958): n = A,T,C or G
ttaatatatccttgaggcaaaactgtgaaggtatactgttggccttgccaactgaaagcaaattgcttctggtggtccttatggacaggtactgagaagaaggcatttgccagatcaatagccgcataccaggtgccaggagatgtgttaatttgctcaagtaacgaaactacatctggtacagcagctgcaattggagttaccacctgatttagttttcgataatcaactgtcattctccatgatccatctgttttctgcactggccaaataggagagttaaacggagatgtggtgggaaccaccacccctgcatctttcaagtccttgatagtggcagtaatttctgcaatgcctccaggaatacgatactgtttttgattcactattttctttggcagaggcaattctaaaggcttccatttgacctttccaaccataatagccctcactctacagttcagggaaccaatatgagaattctgccaatttctgagtatatctatcccaattatacattctggaactggggaaatcaccacaggatgtgtccggggacctactggacctactgtgagtcggacatcagtcaaaactccattaatcacctgccctccataagcccctactttaactggagggccacaatgtttcttgggatcccctgggatcagtgtcaactcagaaccagtatccagcagaccccgaaaagtctgattatttccttttccccagtgtacagttacccttgtaaaaggccgtaggtccctctggggaagaactggagaaagggtaacagcaaaacctttgggtgtcttatcaagatccttcctcagcggaacctggccaccccttcattcaaggggttctggatctgcaaactgtctcaagtctggaaattgattcactggccgagattgctgcttaccacgatctaatgtagcctttctttcatttggctgtttaccacgatctaatgtaacctttctttcatttgtttgagaatttttctgcttatacagatcaaacaaatatgcagtaggcttcctatgtatttcattcctggaaacaccatgattggttagccagtaccaaaggtccaaccgagtcatgccattataaatttcacctctcctgtgctgaccattactgggtatgttattataaacattcttttgtctacgctgtccattataataactagaatcaccttgtctccggcgattcaatgctgccacctggcccttgttacctcggaatccaactaaacccagtgaatttaattcatctaattgagcagaagcatctccaatgctaagatctggcacaaggaaaagggaaagaccaaaacccttcaaatgtgctggtgcccctctcaccaatttgcgtcttatagagctagtgaaaggcatatcttctggaccttcccattgtggacaattatactttacacaatatatccactctagcattgcaatttccctaagtcttaaaatcccttcatcaacactaagccacggaatatcaggcatctccaagtcatttccagtaggccaccttttgataaacacctcagccaaccattcaaacaaacttttgacaccttttttaactatgcgagcttccgtattaaacctagaatctctactcagaggacccatgtcaataaactcagcctgctctagttttatgttccttccacccttatcccacacccttaaaatccattcaccaggtttctgcttgaatgaattagcaaactcattaagctccttagtagtgtagcgaatttcctcatggactacactttctacctcccctctaggagcctgttttgctttgagtctggttacaggtctagaagaaactattggtgggccttgagaaacatcagtagtgaaagtcattgctggtttatcagactctgcaaaattaatttcctcatgtggggaaggcattatttcaaggggtggggctgagggtactacttcctcaggtggggcaaacccttgagaatctgaagattcaaaattctcagcttcaacatggtcttcccacacatccccgtcccatgttgtaggatcccattctttgccaattagagcccttactttaactgtcgacacactctgaggctgagacttgaattttcgctgtagttcagccaaccttacaatgagagtttctgtttgattttctgcaacttgagctctattgctacaagagagaagattctcctcaaggacacacttagcaacttttagatcgtttacttgtgtctggagcctttcgattttatcacacaactccttcctttcattcatcattctttccacagatactaagagcagccagccagtaaaatcattttccgattttttccccatcttgtagaaagctttgtgcaccgaatcacctaattcattaagaaaatcaagggcattagcttctttaagttcggaatatagtttcaaccatgggtcttcaaaattctctgagctcccaggagggagagaatctggagaggtttcaatagttgaaagtgctggtggatcaacaagccaattccagtattttaaaagattcatccttgtacttctgttactctagaaccactcctggtaccaacttctgtattagtcagggttctctagagtcacagaacttatggatagtctctagatagtaaaggaatttattgatgacttacagtcggcagcccaattcccaacaattgttcagtcgcagctgtgaatggaagtccaaggatctagcagttactcagtctcacgtagcaagcaggcgaaggagcaggagcaagagctagactcccttcttccaatgtacttatattgtctccagcagaaggtggagcccagattaaaggtgtgttccaccacacctttaatcccagatgaaaggcgtagcccagattaaaggtgtgttccttaaactcggagattcaatcttctggaatccatagccactgtggctcaagatcttcaaaccaagatccagataaggatctccaagcctccagataagggtcactggtgagccttccaattccggattgtagttcattccaaatattgtcaagttgacaaccaggaatagccactacagtaagtggcctctcgtcacttccctgactgggccttgagtagcaggggaggatttacgagtgcccagtcattgaatcagccaagacatttcaagattaactggtgtgtgtgtgtgtgtgtgtgtgtgtgatgtgtgtttctatctgcggatctgaaatagctcctggacaggtgtgctcctgcgactcactaggagctcaaagcggtgtagcaaaaactccacactacaggccacattctctttccacctccattgtaggatgctttctctcctgcagcacttaaatctgatcctctgatctccctctgagtcctggagattcgcttcctctcctcccccaggtccttgcccatgcaatctaaaagttctgcctctttcacctggcccagccattcattagccattggcaactttattttccaatcagagccaactgggaccagacttcctttagcatctgacatgcagagtcccatatgattctgggagctgaattaagacaaaggattagaaccaaaccccaaccgctctcctcttgtgattgtccaataaacagtcaatctaggaatgccctggattggaccctgaccctggaccctgagtccccccatctttggacaatttgtcatgccaaagaaaattttgtacaacccatgaaagcaagacaaaaccggtcaatctgccactgcagagtcacactctcacaacacggaagagaacatatacaaccactgaatccatccaagagccactcgtgcagaaagatatggctttgacaagagtaaataaatgtaagaaatcaagagacctgctacgacagtcctaggctgtcaacatcgctgacattctaccagcttgaaattgaaattctaccagcttacaaaaaaaaaaaaaaaaaaaaaaaaaaaaaaaaaaaaagattgggttgcactatgcagcctggactgtctgtgtagaccaggctgatctcaaacttacaaggctctacctgcctctgcttcccagatcattggactaaaggcaaacaccattatttctggcctgaattttcttctatcaaacctccctgttaaagtagaaaagctgtggagggggcaatatgttaaataacacattcccaaatccatcctggaagaagaagcatggagaagtttctttatgaatattctagaggtactgtctcagttagggttttgttgctatgaggagatgccatgactaaggtgtctcctataaaggcagtcatttaatgggagctggcttacagtttcacaggtttagttcattgtcatcatggtggaaagcatggccgcacaaaggcagacttggtgctggaagagccaagtgttctagatcttgccccgaaggcagcaaaaggagactgtcctgcaagcagccaggaggagaccatcttccacactgcatggagcctgagcatgggagacctcaagacccacctacacagtgacacacttcctccaataagaccacacctcctaacagtgccactccccatggccaagcattcaaacacaagaatttgaagatgccaaaggtattcgaaccaccacaaataccaatgtaattttcatcatgaggttggtagaataatgactcttcaaatgactcctgtgactatgtcagcttatattgccaaagggagctggcagatatgattagggtttagaattagggtgttgcaggatatttgatcacactgtgaaccctgagattatgttatttactgaaaagcctttttctagttgtggtgtgggttagcccctagcacctacacttaacctctctggctggaataaagacatgcccttagtatacatctttaatcccaaacaatgaaagtaaagctagtttgtagaaagaagcgtccctgggcgagctgcgaggctgccacactggagaggcagccaagcggccatgtgaagtgagacgtccagccagatttggaatcgaagcctcttaaaatagcagatggtttggacttcaagacgggacacgcggggcctcagccaccttcccaatgcagtgctcagcatctttcaggtgagaatggttttgggtgctcaaaggccatccatgtaggattgttgagatgtctactttgaagactggcaagtatagccatgccaaggtccagctggttggcattgacatttttactgggaagaaatatgaagatatctgcctgtcgactctattatggatgtccccaacataaaaaggaatgacttccagctgattggcatccgggatgggtacctatccctgctccagaacagcgaggaggtacgagaggaccttcttctgcctgagggagaccttggcaaggagattgagcagaagtatgactgtggagaagagatccggatcacagtgctgtctgccatgacaggggaggcagatgttgcagtcaaggccatggcaaaataactggcttccagggtggcggtggtggcagcagtgatccatgatcctccagaggcccctcccccagtcagattctgctctggctgggcccttggctggactcctaatcagtttatttgacattttattttggttttcctcaccccttcaaactgtcaggaagaccctgaccttcacctagctcccttggccacaactgagggagccacagccttagtgaaactccctgcctcttctctcgcagccctgatgggggagagggatttgggtactgcatgtggtttaggtttccctctcctttttttttttttctttttaattcaatttggaatcagaaagctggattctggcaaatggtcttgtgccctttagcccactcctccccagtctggtcctctgttctccatagtccttcatccccagcaccacggtacagactggggaccagccctcttccctgcctgtgtctcttcccaaacccctttaggggcagtgagaagggggggggggacaggattcctcctcaggcatctgggaaggccttgcccccatgggctttaccctttcctgtaggctctctccttgacacatttgttaaaaatcaaacctgaataaaactacaagtttaatatggaaaagaaagaaagaaagaaagaaagaaaggaagagagagagaaagaaaggaaggaagagagaaagaaagaaagaagcaagaagcatctttgattgaaagtgacatctaattgagtggcagacaaagtgacgaatcagaggaagatttggcagaatagaatatgcccaactctcatgaagagaggaaagggaagccacttaagagagagtagcacagagaggaaggaggaaagaaggagggagtttaccacgacagttatagggagtcaggttgcagaaagagaacaagccggagaatgggaaggagccagaacattagtatacattaccacaggcagtatgaagccaagcagagcaattcaggaagagaccaagagagaagcaaaattgaatcagtcagcttggagaagagttttaagccagaacagttgagttgaccagccagccagagtttaggaagagctagaaaagatgaacttattcatcattaattgtcagagcttgaaaactttctaggcctagattagagtatatggaggttaaagcttccaggatcgggcctagtagtaagactagcagacggaggcagtaagcctcggagacaattactccaggcaaataaaagatacgattacattgaggggtaaaagtttatgctgaattctccaggtgggccccatctgaggtaatgagcctttaatttcctgactatgatcagagaaaggcaagtaatgctggaagcctggatgaagagatgctagatcccgagctctgaggataaaaagggaagcatgagccaggggtgacagtgaagcctctagaaaactgtcgaaggagaaacacactctcccacagcagctctagaaaacaaggcagaattccccaagcctcagtcaacccagagaacctgtgccaaacttctcatccatagaccagaacacaatgagtttgcgtcattttaagctattgagttgtgacatttcctacttgtgcatcaggaatactgatgcatacccttaaagattcaaggtgcaatctgatagatgaagaaacaaccaaacactaaatctctagtctcctataacacgtattggtaacttaaaaccctgtcaggagcatctcatcactatttagccctgttttctatatgatggttaggagaaagtggagtataatctggcactttttgatggggcagcatagaggtccaagagtggggagctgggtgaggaaactcactggataatggtggaaatagagaggtggaaatctacctcagacacacacctcagttgcttcagaacttgatttgttctgatgggtagattgtgccaactcgtcctttccctcaggttcactgtcttctgtagagaaattcccatggctcccctctctactccagagcctagttggaagttatatgctcaaatgactaatttatctgtttctggtctgggtatcgacgccctgacattccttgtttgtttgtatacccccgccccaacaaacggagaaaaatttgacagaataggctatgtacacccctaaggagacgagagagggagggaagattgagtcttaagggagaggcagtgcagtaaggaagagagtgtagtacaggatacagcagtcctggagagcagtgcagtattgttgcgagggagagtagagcagcacgggagggagagggaggcaggttgaaaagagaacaagctggacacaggtaaagacagaatgagcaagagattgagaaagagccagaagattaggaaatagaaaagactgctagagtgagtttgaggccaagcagagcaattcaggggctgggagagaagccagattgagtcagtcagctgggagaggagtttgagccagaacagctgagttgaaccagccaggtagacttcagaaagaacaagaaagggtgagcttattcaacaaaattgagaggctgacctagattagatcttatggaggctagaattttctaggagtggatctaggtcagcagatggaggcagtaagcccctcagacaacaatcacaacaggagaataaaagttatttttatagcctgatctacagagcgagttccaggacagccaaggctacacagagaacccttgttttggaaaacaaaacaaaacaaaacaaaagcaaactttttattgtgaggtaatggctcactaagttgccctggatggtcttgaagtcttggtcctcacatctcagtctccagagtagctgaactataggcctgcaccaccaagcctttagctccagtgcgacaggcaaagcgcttaccctgtttgtattctgtgttagatcgtagtttacaggacatctggtaggctgcatgagagaacaaatggtacacttccaagagagtttaaaggaagttggtcaaagttgagaagtggtagaggtcaaagggcttgctggggaaaggaagtgcagtgctaaaccaggtcttgtgtaaaagagaaaaacgagaacagtctttccacaggaaacagctgggtgagagtggcctaaggatccctggacaggtgttaagacctggggcgcagacaagacctaggcgtagcacagttaattgttcggagcaacccagaagagtaatgtactcaaagacacgttatgaaactgaaaccatcaaagaacctcttgttaataaagtgtccctccctgggttcgaaggcttgtcttagaaaggaaacactgagcaaactcgaagtgcctgaccacgctgcagtgctaggacaaccatgtcaaacctgaaactacaactcccattgtgcattgcgcagcgcgtgcttacacccgggatacactacaatccccagaatgctttgggaggagcgggggcggggagcggcgaggctacgtctgcgtcaagagacgttaaatttgaaacttggcggcccttgcatgatggggcgtgaggtggctattctgagaaggagtcggatgcgtggttttgtttaggagcacggggtgacgatcttcgcagctccagagccagctgaaggttgagggaggctcagttagcactcggaggataaaggtctgcggaagggcgagagcaagtattgggaatgcaggatggcggaggcgaggtaaggaccggacgcaagttgctgccgctgggtgctcggctggcgaggggaggatcgaggaggtcggcaaagagcaggtctccccaaacccccttcccaacggcgtggagccctgcatccagccagggggcaaaactgggagagtttggaatttgccatatgatctggttctgaaactcacctcagccgtttttatttgaccttgaacatgtttacggggggagggggggcacgcagatattaatgctgctttatggagttctgggaggattcaagatatttgtaaagtacctgctttcaactaataagtgttctcactttgctagcagcttagggatccgaagagcagagcacttgcagcttttcctcatcataaaatatagagggtttttctaggttagaatttaagatgcatttcaattatggaactcataataactgggtcattgctgtcataagctgtcattcatggaagagaatttatcgactaccattttgagcactgaaggcgaacagtaaaagacacaaaatcccaacctttgtgaagcttaagttctggggaggaatgaatcggggtgtgtgtcggggatgggcaataagacatgttttacatcagatagaatcagtattaacaagtgtaaagcaagagaagagggcattggaagtagaactagtgtggtttcagaaaggtttggacatgtaactcaggaagggcacttgttgaaggtacataaggccttagttcattacctagcaatgaggcttgggggtgggggagttggggcagagggagatttgaacagaggcctcactgatgagatggcacttgggtccgaactagaaggaactagtcatggacaggtgagatggctctgtggatagagatgattgctaccaagactgaggacctgtttggtcacccctcccccacccctgaaaccccatggtggaaggagagaactccctaaggttgtcgcctgacttacacacacacacacacacacacacggggcggggggggggggcgagaataaatacatttttgttttgttttgtttttttgtttttttcgagacagggtttccccgtatagccccggctgtcctggaactcactttgtagaccaggctaacctcgaactcagaaatccgcctgcctctgcctcctgagtgctgggattaaaggcatgtgctaccatcaccctgcttgttttgttttgttatgttttgttttataaatacatttttttttaaaaaagagctaatcatgtacatatttagaaacaggagtggatgctgctactggtgtctcattgtcagtggatgggaacccatgtcagacataaagctgctggttttttgcttttttttgtttttttctaaatttaaattaactttgctaaacttcagatgcttttaaaaattatttttcctagctttaactttatttgtacaatactgtcagcaacacccttgccatgttctctcttgtgttgagcatttacttgtagagcgtgggataggcttcgaagctgaagagaatgatgatgctcctggcgaaccagctgcgtccaaccccaaagagccagaaatcccctctatgaagatgtcatcacagtactgtgctgtaacactgttggcgtgggcttcatttctgtttccttcttcccagtgaagccatgtgcctggagggagcagagtgggagctgagtaaagaaaacatacagcccttacggcacgggcgggtcatgtccacacttcagggagctttggcaaagcaagagtcagctggccacactgctctgcagcagcagaaacggtatgtagtgggatgctttgtgttcagcttgtaagtccctggtgtgataggcagcatgggggtgaagctgccgaaggcctacaggcagtggctctcaaccttcctaacgctgtgaccctttaatacagttcctcatgttgtggtgacaacccctcccccccaaccatagcatactttgctgcttcataactgtaattttgctactgttacgtatctgttgtataagagatctgatatgcaaccctgtgtgaaggtcctttgactcccaaagcagttgcagcccacaggctgagaaccactgccctaaggaatactcttcagtgagagtatggaaatctgttctcccggttttctgattgcaagctttcaatagcatgagatagtatttatttcaggctaaaatgtaaagtgtaaccatactcattgaattagatctttgagaaccgtgcttttatggttttgttgtagatggtagcattctgtttttgtttttgtgagactggctctttctggcttagaactcactgtgaagttccagggtggccttgaactcagagaaccgcctgcttttgcttcctgagtgctgggatgacgccatgtgccactgtggctttattttattcttagcgcttgctctggtgcctggagcttcgtcctgcactgggctctctacttgtctgactctcctgctgtctgctcctgtcatgtctcatcccagtctctggcctcacttttgcttttacaacgaccgttgacgtctcttgccttctcagtgtctcctactgtgatgttgtagacagccccgagcttgagaacattcagcttatgattgtagggctctgggtgtgtggaaattatactcatttgattgaaatcatactctgaaatgtgatcttttcaaggataatggatgtgcaggagggctgccttgagatgctgggcagctgcagagagccgtagtacccagtaaccctgagtctctgaggctgagccatgtgcagtgtgttgtgttgctaagttgtggcacctggcaggatagatgtagctaatgctttttcacctaggctgatttcagtgatgctgggttcatctggatgtaattctgctgtcagaaaacaacgctcttcattcctaaatggccttcctttttctatttccctttccctattttggttaatgttacaaaacctcatctgcatgattcttattcattgctctctcacccccatccccactttaaaaaaattacttattttccattatatgtatgtatgtgtgtgagtatgtgtgactacaagttcccgagggggtcaaaaggggctttgatcccccagagctagagttaagggctgatgtgagctgcccagcgtggtgtcctctgcaagaacagtgggcttgtaacccttgagccatctctccagctcttcagggacggggccccagggcctaccactgagctgtccgcatagtgctgggaatttcttttgagtataatttgggtaccgtgattgctcagatctttgagtgtgctgtaagacagtgagtgcatcgcaccataagatcttactttaggaagttccctcattctcctcagtccgtctcccctcttcgtgaagtgcctgctgactagatagaattctgtcaagataagttactttggagttttgttgttggttagcgatagggtcttgctctatagcctagactggcttcaacttgtgagtcacctcctgcagtctcgcagatgatggacttgcggggcacgggtgtgtcgtatgtggctccttcctgcagcggaagtgttgagtacttctcgtgtcgcacgtgtcagcgtccctttctctcacagctgagtgagtactctaccacacaccagatgctggacagtaggctcggtcttttgttctttgaaaatcaagtcagtgggtatttgacgaggctttttgtggacatacttcccaccaccaccacccttggaatgcaattgctgggtcatggagtaccttaaatccagagccataacggcaggtgatgatctaccagataattcctcttttctctaggctattatgattgcctcccagttcctacctccattttggcttcttaaaacctgtactatcagttcttggcaggagccatgcccggtttatattgttgttgttgttgttgttgttttctcatgtgtatacttggccttttttaaattagaggtgtaattctttcgtgtcaggacgattttatttgtttatctgttgtttttggaaagaacttctccaagtatcctaggctggccttgaactcactgtggtatccagactggccttaaactttcagcctctcttgtgcagcaattacaattatagacatatgacaccttggctattttattactattttaaagggctttccttttgtttgttgattggttggttggttttggtttttttgagacatttttttttctctctctttctgtagccttggctgtcctggaacttgctctgtagaccaagatggtctcaagctcacaaagaaagatgggattaaaggcttgaacccaccactacacccagattaaagttttctttacaatacttactatatatatatatattttttttacttgacactttcatatgtttatataattatcttggtaattttcacaccctcccttttcccctcttattcccctctgattcccgcccaactcttctttattcccaacaagaaccatccctattttcatatcatttttgttgttttgttgggttgtaggtttgtgtgtgtgtgtgtgtgtgtgtgtgtgtcccactgagttgaactagggttgcttccatgaatcatgggttactctcctaccatgtgggttctgggatcccactcatgtcctcaggccttgccgtgagcacctttgcccactgagccatctttctggccatttcttgttcaggtctgtgcaagtaaccacagctgctgtgagttggtggggagtagccatgctgtttccaggaaacagggttttatgatgcttttctccattcatctctctccaccctctccatgtgatgttccctgagccttggaggcggtgatacagatgttccatttagagctgtgcacccaacagttgctaattctcatgctttgatcagttatgagtctctgccttcactgtcccccactacaaaaaagcgtctctaaccaaagctgatagaattctctcttctgacctccatcgggcccctatatgcacacaccctcacagacaagcactatattacccaagtggtcgtgcacgcctttagtcctagcactggggaagaggcagagacaggcggatttttgtgatttttgagtccaggctggtctatgaagaaaaaccctgtctccaaaacaaaacagaaacctttaaaaatatgcatataaacaaacctaataagtaatattatgcttcccattttataggtgaagaatcagaaagcagagaagtagttccccagtgtctgagctgactgtagaactaggttttgtttatttttaataagctttcatggagagccctggccagcctggaactcactgtgtaaatcaagctgttctcaaactcagagagagatcgccctgcctctgctctgagttctggtgttagaggacgcctgcaccactgcccggctcagaatctcatcatctcttcattttatgtatttatttaacattgctggacttttcttggacccaccagtagatgaataatgacacactcatgaatttttattgtagcttaggctacctcccttttttattagcgtaggctacctcatctaacttagttaacctgactattctagtttctcctccactggcaaacctttctcgtctctcccagtccctgtctctgcctgcaagtcccgccctcccttcctacttagctatggctgccagctttttattaagcaattgagagagagtgaggaaggtgcttgtttacaaaatgctgaggcgtgtggtgaccataagaacgacagtgtcaaaatccagccaggattcagctctctgccaggacagaattaacaattggatagtataaagacaagcttcacacagtgcatcgcaacaatttaagacttatctttataatttaaaattggtatgtatgtgtatttggatgtgtgcatgtgagttctaggtgattgagccacctgatgtgagtgccgaactgaacttgggtgctgtgggtttggttttgttttgaaagattttatttttggaagggtggggctggagagagggtcagtggctaagaggacttactgcatttgcactggattcagatttggttcccagccactcatggtggcttacaggcaactgtacttctctcatgttcttcctgcctctttgggcactgcatacatgtagcacccatacatacatgtaagcagacactcatacataaataaagctgtaggcagctgtgagtgcttggattcagacttaggtagtctgcatgagcaagcagaacagactccgtgtccagttggtcgactggtttgggaaggactaggagctgtgtccttgttgaagtgttattgggggtggtctttgtggtttcaaaagctcacaccaggcccaattggccctgtcctcctggtgcttgtagatcaataccataggctctcagttaggctctctctagctgtgcctgctgccatgctccctgccatggtggtcatggactctaaccgtcggaaactgttagcccccagtaaactctctgtcagtggcctgggtcatggtgtcttatcacagcaatagaaagtaactgagacagcactctccagagatgaatcatctctctaaccaaaacagtaattaatttggtgtgctttttgttctttttttaaaaagctggcttcagaatctactagggtcttgagtactgtgccactgagttaaacccactctattccttttctgtttaacaaattctcaaattctagtctagttacttaagtcactatgaactcattgagaagtgaatagaaatagaaaggagacctgtttcctggggctgtcagaactgcatgtgctaacacaccctgtttcaattccagggcatttgaatctgaaatccgcttttactctggagatgaccctctggatgtgtgggacaggtgaggatgtttatatggagagaacaacagagacattcacagaggagtgttgttggcctcatttctcaggtagagggatatggcgtggtggatggagcagacagtactgtttggcagaacattctggaacagccatggtagttttccagccaaggtttgttgtgcggggctgtgcatagagcccagagctttacatttgctaaggaagggctgtacagtagttaaactccatcttccctgaggtgcttaaggctggagcacgatacaacatgaaggcgcgtgtgttactgactctttccttagagtgtttattacaagcgcttcatgaaagcttgagagagagagaggatcggcacatgttattgagaacttctaaagaaacatactttgaatatgttaaatatttctgcttaaaaatccagagtagaggggactggagagatggctcagtggttaagagcactgactgctcttccaaaggtcctgagttcaattcccagcaaccacatggtggctcacaaccatctgtaatgggatccgatgccctcttctggtgtgtctgaagacagctacagcatacttatatacataaaataaatgaaaaaaatctttataaagaaatccagaatagaagaaggcttgagcaattgtccatctgttaaaagcgctggctcttcttccagaggattgggttggcttcccagctctcatagcagtttacagccctgcagaactccatcctgagggatctgatgccctcttctggcctctagtggcactgcacaatgcagtatctaggcacacatacacacaaatagtaaactaagtaaatccagagtagattgggtgtggtggaacatgccgataacctaagcattcgggaggtaaaggcaggggaatccctttgagttgagtccgtcctggtccacatggttgagtacaggccagccagggctatatagtgagactcaaaaacaaaagcaaaaaaatccattcagagtgagccttagaaccaaagcaaaagtatgcatcagtgcaaaataatgttcttttccttctcttctcattcagatatattaattggacagaacagaactaccctcaaggggggaaggagagtaacatgtcagcgttagtggagagagcgatagaagcactccaaggagagacgcgctattataatgacccccgctttctcagtctctggatcaaattggtgagtgtcactagaatattaaattgacagttttcctgtagaggtatctaataggcaaaagtggagtcatttagccagtaatgatgaataagtctttgtatctattgagttgctttgacttaaagatgtaactataacattgttgcaggatgtttatttgatcacactgtaaaccctgagattgtgttatttactagaaaagcctgtttctagttgtgtggctcagcccagttacactctaatccaagaatgttgtaggatatttggttgtactgagagattgtgtactggaaaaacctgtttctagttgtggtgtggcttaaccccagcacacacctttaatccaagaactttctctttattgtaaacagtattaaataaagtcaaccgtaggtcaagaggaggagcaagcagttgacagggagtgaacctagaaaaaacgatagagtgggagggagtcaggagagaggctagagagacgcacaggaagtagaagggagggacatccagcttgaaggggttgccactggagtggaggaggagagcggctttttccttttgggaagtgggctgtggaggaaggtcagctgggtgctttccctgactctgagctagcaggctttcaccctggcatctgggcccagagtctttattggtaaaattgaacttttgaggttttgttaaaaacgggataacatcctgaggctttgtgctttaagatgatcataaagtctgtagatttttttttaaaaatgaatatgggtttttttgtctcttagttgtaaacatagttgaaccatgtaacggtctcccggtcttcgaggacaaacctacaggacgagctttcttggtgaatctagaattcccctctctcctttaggagaaacactactgtaaaaggtgatattttagtgttagtggtatttggacatctttctcccaggatatcactatagccaacgttgtctgcctcttgacatgctctgtctttatatctaaagcacgcctgaggagtttctccatgaccgtatctatatcataaaacaatcccgaggtctctcagacattaattttgttgcatttaccttaaaagaaattttaaaaggaagggtgtttagaattgttggcagtcacattatataatgaaatactgatatttgaaactgacaagatttagagctgaaatatattcttggggacttgtcaaacttcagctaaaccaggtgtggtggctcatacctgtttgtcttagcaggaggatcttgagtttaggctagcttgggctacaaagtgagttcctggccatcctggactatcatagcaaagctaaaataataatactgctaaaatcatgtctaagaagtcatgtgattcttatttctgtgggatgttggcatgttttgacattctagtgacaagttagaattcacctgagagatactagttacatgactgtatttatagcaaaggattgttctcagagagcacagaagctgtgctccctgctggcttagcaagacttttgtccttcattctgtcctgtgtaatatttgtgtgtatgtgcctgtgtacacacacacacacacgagagagagagagagagagagagagagagagagagagagagagagagagagagagagagatcttgtgtctcttccagaggaccccagagtttggttcccaccagttacatcagacgactcacaaatgcctgtaactttggctcaggggagtcagcacttctggtctctgagggcacctgtactcaggtgcacatacaacccccccccgaattaataatttcttaagaatcaatgagaataatttctttgttcagttatgttgtcctgatgttagtaaaggggagtaatgatattatctggtgaaaagcgtagtgcagggctagctgactgagctcagttatagagcgcctcgctagcatgcctgaaagcctgtgttctgaatggctttgctccattcacactcagtgcttccttcaagcctgtcttctctattaagacagtctccacaaaggtagaaagcattgttacctacaaattatccctgtctctaaccacggttttatatgactagcctggaacaaatgaaatagtccatttgataaatttggactgaaccaaacatgccatctaaacatctttaatcttattttatcgtgccttttggtgatagggtcttgccatatagctctggctggcttggaattccctattagaccacgctagcctcaaactttggaggatcttattgtttctaatttcaaagtagtgtaactacagacttgtgttgctatgtccagtttccatttatatttttaacaaaaaccattattacttcatagtttaggtttgtagttgtggtggtttgtatatgcttggcccaggaagtagcactattagaaggtgtggccctattggagtaggtgtgtcaccatggctgtgggcttaagattctcaaccctagctgcctggaagtcagtattccactagcagccttcagataaagatgtagaactctcagctctgcctgtaccatgcctgcctggatgcaacaaaaacaacaaaaattctacaccatacctgatcttacaaagtttcttaaatacagacagacttgaccaaatcttgcctttgcttttaactctcttaagcccagaatgtatttactatcagacagaagcaaagttagttttccattcaaggcctgtgacagcgttttcctctggattccccaccttgcctgcctgggtagactttgtcttcgtcttcacttaggcagcccgaaggagaatgctcatcccttcccattctgtatctgacgagagtccagttcctgtgcaggccaagtcacacgtcacctcctgtctgaagccttctgttcccttgcctactttcgagttgatctcttctctttcttgggtctttatcccaagtgtattttatacatattcttcaacgcagggattgcatgtagcttccccagtggctgtttggcacataaccggcatttgataagtgaaaggaaattgggtaactgttattctttttaacatattacagggacatttgtgcaatgaacctttggatatgtacagctatttacaaagccaaggaattggcgtttcccttgcccagttctatatttcatgggctgaagaatacgaagctagagaaaatttcaagaaagcggacataatatttcaggaagggattgaacgcaaggctgagcccctggacagactgcagtcccagcacaggtaagctgcttctccagagcctgccttaacgcttatttaagtatccaaagagttctccgttgtagtaaatttacttaattgctatttggcttttaaagactctcttgtcttactgtcagatccatttaggtgtgtgtacatgtttttaccatcttgaggatggactgactacattccctgtccacgagtccatccagtcgtgctgttctttatagttaatttctgttctttccccacccctcacaaatgcctacctgcccttcaattctgtagttttgatttcccgggatgtcacagaatagccagtatgtaacattttgagtttagttcctttagctaattgtgcttttaagaattcctcttctgggctggtgagatggctcagcggataagggcagtgacttctcttccaaaggtcctgagttcaaatcccagcaaccacatggtggctcacaaccagccaaaaaatgagatctgatgccctcttctggtgtgtctgaagtcagctacagtgatcttatgtataataataaataaatcttagaagaaaaaattcctcttctgactaagacatggtggcgcacacctttgatcccagcacttgggaggaggcaagtccatcttgagtttgtgcccagccagggctgttacacagagaaaccctgtctcaaaacaaaagaaataaaaagaattttttatatgttctgaatataacatatatatgatttgtaagtctatttctcctggattaagtagtttttatttaaaaaaaattaaagtattaggaaatggaactatggcctcattcattattcttttaactatcttatagaataaaaattttcacatttgaaaagctctattgtatgaattaagctttttgtgtttctgtctagtctatcttctatagtctctagcacaacgtggcggctttttctagaggatcagaggatctgataccctcctctggcttccacaggcaccagacacacgtatggtacacagatgtaaatgcaggcaaaataccagacacataaaattaaaagaattggtttttatctgatgaatcatagttataatggctattttaaaatctcctcaatgtctggataatcttgatattggtatttgttacttgttttttttcctttgagaattagtcatctttttttttttttttaatatgtgtcaagggattacgaattcattctgatagtgtgcttgatcctcctctctggagagtgagtgatgttgtctcggtaactgagttccggatgtctcaaattctttctcaccttccagcaatggttaatctattgtcggctgagctttaagacctttgggatgctgttttcgtttgtctcctacgtgtgctgcttggcttatggagacttgggcagaggattatgtcatagttcagttctcaaagcctttctatgtccatagctcagtagtgagccgagaggagggcgttaagagttcctagtcttcagcatatgtatggcatgccaatattctagtagttctggccctcggaataccattcccactccgtaggccagaaaggtagggtttctcaaggagttgaaagtttcccaaattcccgtctctggaggtcaaaactataagagaaaacaggacacaggatgtgcactctgaccctctgcagctcacggaggatgtgtgcaccccgatcctgcagcttgcttgcgttgttaacctcccagagtcatggctttctctttttatgtgactagagttttaagtttaagtggttggaaaagagagaggtggaagtgactgtgatgtgccctacttggcacctacaatctattctttgttttttcgatactttaaagttgtagcagcaacagcatagaagtttagttttcacgtttctgccagctgtgctaaagtaaaatgtcatgtgtgtaaagtcatttcatttgggtaagaaaatctgcgtgttggggaggggtagatgcggcaggattctaacaattggttggccaggctgaagggtatttggggactcatttactcttgacacaactctgcacattttgttttcagatacataataaaaagttgttgagaaactgtgggtttcaccaaatttctagtcttagctggtcctcagatcaacctggtgatgatttttagagtctcttcaattggtcacttgtcaattttaagggactctagtcaggatgtccttatgtcataagcttgcctcctgattcctagagaattaagttttcttgaaatagttctacatttttttctcatttgttcttactgttagcattaacaagttagaaatgtaaaacctggtgagaactggttgtcctttgtcttgctgtagacagttccagtctcgagtgtcgcgacaagctttcttggcccttgggaatgaagaggaggaggctttggagccttctgaaccacagagaagctcgctagctgagctgaagagcagagggaagaagatggccagagcgcccatcagccgtgtcggaagtgctctgaaaggtgggtgagcttgtcagatgtcattttggagagcctgtggtctcttgaggtggcaaatgatgtaagaagcagcacataaatgcacataaatgcatgtgtggatgctgcctggtttcctgaatcctaggtagcaaaagggaaagccaaaagagagctattatcatagggtgtaggaaggccagaggcatagtctttacgttgtgactgagaatgaggctgatactggagatgtgacattttcaaatgtagttgaaagatgtgaaaaatgatcagtattgtcaaaataaagcttgagtgtgctaactccttagaggagtaggtaataccatttcagctgtttagcaccagaaatgtttactcttgtacaccaaagagatggtaagcaatgtgtctttctcttttattgagtcagggtttcatgtagtttaagttggcttcaaacttgctgtatgttgcagtctggccttgaactcctgatccttctgcttccccatccaagtgctaggattattggcagtgccccacatctggcacaaactttcccccctctttttaattagcagtgactttttaacattgtccagaaagtacagaggaaaataagcttttgttacctgaatttatgacagtcggacatgttaaccaaactggtttcccttacccctttactggtatcattttaacagcaatcaaaatgtggattggaaagcctagaattggggtgtagggagtgtgtgctgtcagaggctattccatgatgtcgatcacagtaaagcttgaaaccgctctcacagtagaaggtcccctagtaagtgggctggttctggggttttggttctagtacatcaagtaagataaaatagaaacctgaaaaatacttagggtagctcctgataaaactagacagtgtgctggttgtggtggtccatgctgttgacccagcactcgggaggcagaggcaggcgcatcccttgagttccaggccagcctggtctgtagcgtaagtgccagggcagccagggctacgcagagaaaccctgcctcaaaaacaaaacaaaaacccaaaaaaaccaaaaaccaaaacaacccaaaatacacctgaaaattaaccagccaaaggacatgacagtaggcagtgctacaatgacgattgaaaaaggttgtaaggctttttaagttatgagaggatgcctgacatgtgtggtagtggactgctttcatataatgcttggagacagaggcaggcagatctgagtttgaagctagccatcactatatagcaagactctgtctcaaaaacaaagacataaaatctgagtacaggtcggagagaaggctcaggaactggaaagtgctcagaggttaagcgcatttgttattcttacaaagggcccgagttgtgttctcagcattcctatcaggcagatgacagccgtatgtaactccagctacaggtgacccatacctctcacctccatgggcacctatgttcatatgcatatactcacatgcagacacacccttacacaaaattagaaatagtgaagataagtcttttttttaaacatttatttgtttattcatttattatatgtaagtacactgtagcaccagatgagggcatcagatctcattactgatggttgtgagccaccatgtggttgctgagatttgaactcgggaccttgggaagaacagtcggtgctcttaaccactgagccatctctccagtctgtgaagataaatcttaaagagaagactgaagtgttaggacaaagggaaaagtaaagaaaacgtataaaaatgttactagttgaatcactgagaacttattactatttcttactaagatttatttatttttagtgattagtatgtttgtgggtctgtgtatagatatgtgcatgtgagtgcaggtgcccctggaggccagaggaggtcttctgggatttcaagagttgtgagccactccatgtgggtgctgggagctcagctcaggccttctgcaagaacagtatgtgctctgagctacctctctgccttaaggtttaaaaaaaaaccaaaacttttaaatctcattgcgaggaggtatccctcttaattcagagcagagagtgtgtatcttatatggcatctatgttaataattaaagcttttacatgacattgtcatcacctttctctcctagctccaggtcagagcagaggattcctaaatgcagttccccagccagtacacggtaatcgcaggatcaccgtttttgatgaaaatgccgataccgcgtctagaccggagttatctaagcctgtagcccagccatggatggcaccccctgtgcccagggccaaagagaacgaacttcagccaggcccatggagcacagacaggccggtgggacgcagggtgaggactcaggggatctgccagtctgatttggagttggttggtctcttggtttgttcttgtttgagttgcttgctttgtgtgtttgatatgggctctcactatttagcttagtctagccttgaacttgctgggcagcccaggctggccttcaactctccatgctcctgcttcagctttccttgtgctagcattatacttgtgcaccaccccgcctggctgtgttctaacactgcttaactcctagactatttagaggttgtctgcatacattttaactttttttctccattcttagcctcatgacaatccagcctctgtgacgtcgattcccagcgtgcttcccagctttacgccgtacgtggaagagagcgcccagcagacagtcatgtgagtgcttccagatcatgtgcagaggagagggcgctaaggatgcctgagagtcccagcgcatctcggagggagtgacgccagatatacctgtgtctcctttgtacttgttgtctatgctagtgaacttagggttctggtgctcttgctgtagcagaaatagccgctgagatagatccacgtgagaaatgccgctttgttactgacagtatctatcacacagtggaattttagtcttaccccgtttttctcttctgggtgtctcttttctccataatccttgacacttttttttttcttttggtttttcaagacagggtttctctgtagccctggctgtcctggaactcactctgtagaccaggctggcctcgaactcagaaatccacctgcctctgcctcccaagtgctgggattaaaggcgtgcgccaccactgcccagcaatccttgacactttaaaagaatttttttctagattaaataatgtgtatgagcgtcttgcctgcatgtgtgcatgtgtgtgctacacatgcatgtctggtgtcagaaagcagtcagaagagagcattgaattctctgggacgcgatttacaaacatttgtgagctacagtgtgggtgctgggaattcagtcctctggaggaacaagagctttcaactgctgagccagctcttcagcccctaatattcttgttataagaagagttaggcaaaatggtagataaataatcactccatgctttaatctttaaagattgtgagttctaatgctaggttcaattctgtttcaatataagaatttcctcatagctagtatgtgtattttaatttttttttatgataaagttcctgtgtagaccatgctagccttgaactcagattcctatgtctctgcctcccaagtgctgggattaaagtcacataatacaatataattttagcttcatagctaatttgtaactcacactatgtgataggcatcataggaatgcaaattgagtacaattttgatcaaaaattctgtctaagcataaaacacaggaagccattagaaagaactttatagaattgatattaagctttatgtcaatttcatttttaaatttaaatttatttggttttttttgtttgtttgtttgtttgtttgagacaggtttcactatatacaatggctgtcctggaacttactttgtagaccaggctggccttgaactcaccgagatccacctgcctttgcctccctaaaccactctggctcctttttgaaaaatttgtttgtgtgtgtgtgtgtgtgtgtgtgtgtgtgtgtgtggtgtatatggtgtgtatggtgtgggtgtgtatggggtgtgtatgtatgtgtgtatgtatgggatgtgtgtggatgtgtatgtatgggatgtgtgtgtgtagggggtgtgtgtgtgtagggggtgtgtgtgtatgggtgtgtgtaggggtgtgtgtgtgtagggggtgtgtgtgtgtagggggtgtgtgtgtgtagggtgtgtgtgtgtgtagggggtgtgtgtatggggtgtgtgtgtatggggtgtgtgtgtatggggtgtgtggatgagcatgctctagtgcacatgtggagggcagagacctctgacgctgggattatgctcaagcccccatgcccagtcaggtggtttttcttagtgacttgtagttgctcttcatgttaagagaatcattctttgctggagttctccagcctaactgtgttaagcagttcccagtcactgtcacaaatgcctgaagcaaccagctcctaaacagaaagggttactgtggctcaggtttaagaggttttagtatgtggtcatgtgggctggatgacctaacttgctactgattctcttcaaagcacggtggccctcagaactcacacctcccaccctagtgttggggaccaaactctgccttgatgtaggccagggcctcaccactgagctctagagcatgatctctgtgctgcttgtgagttaatcgtagccccgtttgaactctctctttgcttgtttttgtttggggaacaaatcacatgtcttcctgctgctggtgttgtccatctgtttgggcaaaataactaagaagtaacgcacgttggcttttgattgagtggtaattatttcctttccttaggacaccatgcaagattgagcctagtatcaaccatgttctcagcaccaggaagccagggagagaagaaggagaccccttgcagagagttcagagtcatcagcaaggctgtgaggagaagaaggagaagatgatgtactgtaaggagaagatctatgccggagttggggagttctcctttgaggagatccgagctgaagtgttccgaaagaagctgaaagaacgaagggaaggtatgggacttgttagaagaaataactgcaagtctgagaggttgcctcccttattgtaccttcgtgtgctggtgtttctattgcnnnnnnnnnnnnnnnnnnnntgtgaacttcactctaaaacagaggtggttcttgtgggtattgaacacttttttttttctttttaacaaatttcttcacaggggaaatttcacctgctgagaacattttgcaagaacagcctgattctaaaggtaagttgtatttgacagcattttgagaaatacaacaaatatattacatagtagcaggaaatgcttttcttaactatagtaaagtaattataagaagacagagcagacacatactatttattacatgtgatttgagagaatattttcataagatttttcacttctttgaaatacttagtttagggccaacagagtatcctgacagcttaaggcacttgtagagcccaaatcacctgtgtttttatccccagaacccactgacttcacacagtcactgtgactacacaaatatgctgatatttgtggaagataaacaattattttactctgcacttagacgaacataacaggagtacccagcagtcagctgtgaggagagcagctcttgggagggagtgtcgcaaactagtttatattcaggttggttttcttttctgctaacaatatgctaaaagtattaggcttcccatctgttaatctcagttgaaaaagactccacattttcctctcagtttttattttgcatcagtgattattgttgtctacaagttacttaaaaaaaaaaaactataagctacgaaaaatataagtaaaaggagacctaagggtggtaagacggctcagcagtgatattaaacagaaagttttgatgtgcactaagatgttttaagtggtaaaaacatgaatagccacttaaaagtagtttttgtaaaacatcaacctagtgtcctctaattctagcctataatatcagggggcacaagcagggagatgcgtgttcaacaacaggggaagatggtgacaagacccagcatgaagaaatcaaaaataaatataacaatagaagatttattctcatatttacctatatatttgtttatctgtgtatgtgtgcacttgcatagcatgccacaagtgacgctcaggacaactttccgaagtcggttccaggatcaagctcaggttgtcaggtttagtgacaaaagcctttcattcactgaggcatcatcaacctcagaaggcatttgactcatcgacaatatacagatcaaattatgcatttccaattcagacacattttaaaaatacattggaaatggtttctaaaatgtacaactggcaggtattcagcgattgttagttatatagatattatgtcttaaataataaaaagagcctttaaaaaagcttagaaaacatactgaaacatttgcagataaaatgaagtgttctggatcagtgttgggttggatttgggggttggtagcaaggctagggaacatagaagaattaagatcatgcatggttagataattattatgaaatgatctttacatttatgtctttttcttatacgaacaaatctagggctggagagatggcctagtggttaggagtacatgctgctccagaggacccatgtctggttcccagtcatacattttgtgacatctgaactcactgatctgtatataatatacccatacacaagacacatacatacatacatacatacatacatacatacatacataattaaaaataaaatcatttttcaactgtggcttttctttcaaacagcacaattaattactttctctagttttcttgaagaattaaatacctctaaaacttttctctttctataggttccagtatgcctttctccatttttgatgagtctctttcagacaaaaaagacaaaaggtttggttttattgtttttgttggtttgtttgttataaagaaataatatctttctatatacatacaatttttaacttaaaattttagatttaaaaaaatttttaattacaaaagaaagtaatgtgtatggatactttgcttgtgtgtatagctgtacacagtttgtgtgaccaaattggccagaaacggtcgttggatcccctggaactggagtcaccaagcagctgtgagcctccgtgtgggtgctggcagtcgaacttaggtcctctgcaagagcaaccagtacttaacactaagccatctctccagccccttatcctaaagcctttaaaagttttattacatattttgcatatatatttatagtatatatgtattatatacatatgtgcaaaaaatatacggtacatgccagtctatacatatggaaaccagaggacaactttgtgacttgcatatctctttctaccattgggtctctcagatacaactcaagttagcaggcttctactacaaagcattcttacccactgaaccgcgttgttccccagtatcttagacttgtgagtgagggtagctaggtgctttggtgtacacattcagagctgggaagaaggaattgagatagaaggatcatgagttcaaggctgacctgggataaataatacaattttatctcaacaaacaaccaaaaagaagcacaaatcagaagttactgttatttctgtatgcaataacagggagtgctaactggaatatgtgtttttcgcagtcctgctacaggtggtccacaggttctcaatgcccagagaagacccctttcagttctcaaaactacagaagtgggcaccacaaatgaggatgtgtctcccgatatttgtgtaagttaacataaatggacttagtggattatttcactcagatatcttagtagtgtagcatttggctggttagatggctcagcgggtaaagtactacctgccacacctgatggcctgagattggtccctgggccccacatggtgaaatgagaaaactgactctgaccattgcatgactttccctgacacagacggacaagtaagtgtaataaaattaaaacaaacattaaacgttcaataaatgttgaaatttgcctgttgtaatctcaatggacagtggacttgaggagaatctcagatttaaagtcagcctaggccgtgcagtaagttttaggctatcttgagtacatagctaggtcttgttcaaaagattttgataaacattaaaatcactaatgtgaactaggcacataaaaagatattcataattatatcaccaggaaaatgcaaattagagccacagtgagatactacagggtacccgctgtcaggcctgtaatcaggagacagataataacaaatgtttgcaggcaaagggttatagaaaaattagaaccttcatacattgcacaaacagtccttctgtaaaacacactggtcattcttaaaatgttaaagctagggacccttaagagcatttgctctcccagaggaccaacctgggtttgattcccagccctagttggcagcctacaaaccgtccacagtcctcttgtggctctcatgggtactgcactcatgctaacatacatgtaggcaaaacattcatgcacagaaaataaaagcataaaataattactaggcaggcggtggtggtgcacacctttaagtcccagtgctgaggcagaagcaggtgnnnnnnnnnnnnnnnnnnnntgtgtgtgtgtgtagacctgtgttcagttagtctctggcacaggaaaatacccccaaactccccaaagagccaagttaacaaagtacctcgaataaaaatatttttctaaggaaaatttctaggtcatacctactatatagaaggtgaaacattttattcacagaaatctctgtgctgaggttcagtgggatttgggtagataaattcaattttgtctcaagttttcaagtcttgcatctgcagctctggttttctcccacagttcattgaaagacctgaagcatctcatttggtagtttagagtctgtctttctcgcggcagctgtttgtctggaacggttctccttccctccagcttttctcccccactgttgtagtaacctaggttcccattgttttgaagggcattattatcccaaaggtcttctcgagccattagctcatcattctgcttccccaaagagcaaacttcctattctttttttttttttttctagacagggtttctctgtgtagccctggctgtcctggaactcactctgtagatcaggctggcctcgaactcagaaatctgcctgcctctgcctcccaagcgctgggactaaaggtgtgcgccacctctgcccgcaaacttcctattctttaaaaaagcaaacagcaacaacaaacaccttactcctgttattcagggcaggggagggcgtggcatgcactgtgggtggggggcagaagtcattactgtggagttttctctacggtaacatgggctctggagacaacttaggttgttaggactgcatcttggagtggcaagggcttttatccactgagccatctttctgtccatctcttattcttctcctgtgtatgtgtgtgttgtagggagggggcagggtttgcattctttcttagttactgttctatttctgtgaagagacaccatgaccaaggcattagtaattcttaaaaagaacataatgaattggagcttgcttacagtttcagaggtttagtccattgtcagggtggagagcatggtggcactgaggcagacatggtgctggagaaggagctgcctgtttacatctggatctgcaggcaacaggaagagagagacacagggcctggcttggtcttttgaaaccccaaagttcaccccctgtaatattctccctccaaggccatacctactctaacaaggctcctaatccttaagtagtgccactccctggtgactaacattcaaatataggagcttttcagagccattcctattcaaacaagcacatacaccccatgctgttggttgctctggtgctgtttgtattccgatgttaattctgcctcctcaggtgggacttccctcccacctgccagcagtggatggatcccgtactctggggatcccatgtgaaccttttcctcattttatttggtcaaataaaggctagagcctgtgattggacagtggaggagaaaggtggaaggagagaaggaaggagaggggaggacagaagaagggaaggagaaagaagatggagcagaaccacatggccagaagaaactgcaagtagcaaaggctcatagctgaggaatgagcttgtatagtgctagatctgcccaatctaggcatatagcgtataaatataataactggattgtgtgttttttatacgggcttattggggttggaaattactgttatatacgtgtatgcatatgcatgcacatttgtgtgacgctgggattttccctccatcacttgagagcttgtctatgactagtgtggctagccagtttgctctggggaatccccatctaaagtgcagctgtcgtgcttgcatggcaggcgcactcacaccgagccatcttcccaacccgacttcccagtcttctcattgccagtgttctcataggtaatctctctgttcatggtcgtcagaggcccttttgccaaatccagtgcctgtttcttcacaataccacatgtctacctctccaaccccaccttttactgctttccttctgagaagctataagcaagctggctttcctggattgttcaatacagtagtcttcctgtattgacagacttctcctaaatctttatatgactgatccctcatcattcagttttagccttatcattgcattttatcaaaaaaatcactggtttttagtagatatgacctacatggccttttattttttttttttttaagatttacttactatgtataggagtgctctatctgcatgtacacctgcatgccagaagagagcagcggatcccattacagatggttgtgagccaccatgtggttgctggggattgaatcaggacctctggaagagcaggcggtgctcactgaaccatcactcccgcctcgctccgccccacctgcatatcttcatctcctaagcatctccataagtaccctccgtttggtactgttgctctttgacatttttgctgtactaagtattacgcttcaggcttgcactgtaaatcaagtgatctatcactgggctatgttttgggggtgttttgcttgtttgtttaagaaatctactcctgtagctaacttagtctggccttgaactgctgtgtatctagggatgatattgactttgaatcttcctgtctctacctcccaaggaccgagcttacaggcatgcatcactgagcctcattcttacagacccagggtttcatgctaggcaagcacgctaccaactaagctgcattccatgccctgttgtatagatacttttggcgtttctgagaaagtcttgcttatagcccaagttagctgagaacactaaatgattctcttattactttttgtgatcctgacatacttagcttcgtatggccaaggacttggtatcattgggacctattttccgttgtacctgtgcattgcagctgttcctctttttctagactagatacataaaagaatagagaagcagacctcaaatcgagggatttctcctccactgctccttttcgttaatattgacttgtacgctgagggtctgagcctcagaggcagtttttacaggatgaatcgtgaaaagaaatggctcagctaatttcactgtttgcagccgagctgttgaccagtgcaaagaagagggaggagatgcagaagcagatcgaagagatggagaggaggctgaaggcaatgcaggctgttcagcaagaaggagctggtggccaggtacacgttcctttcatttatttatttattttactgttctttaatacagaaaactcaagcatgccaggctttgatgtacatacccaacctaaaaaaaaaatggcagtttcttagttactagtagcaggaaagtaatttcacaagtggctttgaatgggatttatggcctgtgaactaagcgatgtaattcattgactttccgattacatttttgttgttaatgctgatattaactttctattttagtcatggtccattaaaatggggttaatttttaaaattcaatatatatttaccactgctcagttgagtacaacagtaccgaggtgacgaggaacctaaactatcgcactgtaaccacaggctttctacccaagtccaagttcccgaactagtgactctgagactgagttatttatgaatggatgcctaggccacaagctttggctcattcctactagcttataacccagttatccagtttaaactagtctaagtcctgccgtgtggttacttagctctccttggttcatgtgtctgtctcctcaagagtttggggcaaatctcttcttgtgcctgactctattctcctattggaactcctaccttctatttcctgcctcagctcattggccagtcagctttttattgataggtgatgcttccgtacactacacaagagattctctcaataagagaccttttgtctgatgtggttggcagatgtctaggaagtggtaaagtaaattttagcactgtaacttaaaaatagcattttctgtacgggagggacatttgtcttatttatgttaatataagcagcaagaagagaagatgcctacagaggacccagccagattgcagattgcttcggggcctcaggaaatgtcgggagttcctctgtcctgttccatctgtccactaagctcgaatcctaggtaagaccgttgtgatggaaggcaaggtgctcacagatcatagaacaaacttttgattctggccacttgccatctccttgacctttcacagtcctgagtgatgagttgtacaaacgttaacatgaggttccatgctaagagggaatgtatgctgctgccttttccttggtgaaaataaaaataaatgtttgttgagccaacagtggtacatgcctgtaaccctagcacttggtggtggaggcaggaggatcaagaattcaaggcggaagcccagcttggggtacatgagtccctgtccccaccctcactcagaagtagaccagtggtggtgcatgtcccctacctgactctagtactcaggtggccaaggcagagtgatcggtcagtctaatagttacagtctggtaagagtgtctcagaaaagcaaactgggggtgagaacacacacctgaagcgcaccacatacttacatgaagtgtccttaccagccccagtccaacactgtgcacattggatatatactaataaaatcaaaaactcaaagttgggcatggtgtgacacacacctttaatcccagtactcaggaggcagaagcaggcagatctcttgagtttgatgccagcctggtctatagagtgagttccaggacagccaggattacgtagagaaatgctgtcttaaaaaaacaaaaatcaaagctcaaataattaccacacaaaatatctcctgctcacactgacatgtgccttctgtggtgctgttatttttgtcttgtaaagctggtggcttaacttactgtaatctgctttaactgttcctgtgttatcgcatatattcatagcattttcagtgtgtagtggtttcctcttcaattggatgaacaagagtgtgtttaataggaagtcctcagactttaaaagcagtatggctgattgtgaggcagctgctttggagaggtagcagttccagacccctgtccacccaccatgttagctggagcctgccctggacaatgtgaacttcactctaaaacagaaggtggttcttgtgggtattgaacacttttttttttctttttaacaaatttcttcacagggaaatttcacctgctgagaacattttgcaagaacagcctgattctaaaggtaagttgtatttgacagcattttgagaaatacaacaaatatattacatagtagcaggaaatgcttttcttaactatagtaaagtaattataagaagacagagcagacacatactatttattacatgtgatttgagagaatattttcataagatttttcacttctttgaaatacttagtttagggccagcagagtatcctgacaggttaaggcacttgtagagcccaaatcacctgtgtttttatccccagaacccactgacctcacacagtcactgtgactacacaaatatgctgatacttatggaagataaacagttattttactctgcacttagacgagcataacaggagtacccagcagtcagctctgtgaggagagcagctcttgggaggggagtgtcgcaaactagtttatattcaggttggttttcttttctgctaacaatatgctaaaagtattaggcttcccatctgttaatctcagttgaaaaagactccacattttcctctcagtttttttttttttttgcatcagtgattattgttgtctacaagttactaaaaaaaaaaaaaaaaaaaaaaaaaaccaaaactataagctatgaaaaatataagtaaaaggagacctaagggtggtaagacggctcagcagtgatattaaacagaaagttttgatgtgcactaagatgttttaagtggtaaaaacatgaatagccacttaaaagtagtttttgtaaaacatcaacctagtgtcctctaattctagcctataatatcagagggcacaagcagggagatgcgtgttcaacaacacggggaagatagtggcaagacccagcatgaagaaatcaaaaataaatataacagtagaagatttattctcatatttatctatatatttgtttatctgtgtatgtgtgcacttgcatagcatgccacaagtgacgctcaggacaactttccgaagtcggttccaggatcaagctcaggttgtcaggtttagtgacaaaagcctcaaaaaaaatcatcagcctcagaaagcatttgactcatcaacaatatacagatcaaattatgcatttccaattcagacacattttaaaaatacattggaaatggtttctaaaatgtacaactggcaggtattcagcgattgttagttatatagatattatgtcttaaataataaaaagagcctttaaaaaagcttagaaaacatactgaaacatttgcagataaaatgaagtgttctggatcagtgttgggttggatttgggggttggtagcaaggctggggaacatagaagaattaagatcattcatggttggataattattatgaaatgaactttacatttatatgtctttttcttatacaaacaaatctagggctggagagatggcctagtggttaggagtacatgctgctccagaggacccatgtctggttcccagtcatacattttgtgacatctgaactcactgatctgtatataatatacccatacacaagacacatacatacatacatacatacatacatacatacatacatacatacatacatacatacataattaaaaataaaatcatttttcaactgtggcttttctttcaaacagcacaattaattactttctctagttttcttgaagaattaaatacctctaaaacttttctctttctataggttccagtatgcctttctccatttttgatgagtctctttcagacaaaaaagacaaaaggtttggttttattgtttttgttggtttgtttgttataaagaaataatatctttctatatacatacaatttttaacttaaaattttagatttaaaaaaatttttaattacaaaagaaagtaatgtgtatggatactttgcttgtgtgtatagctgtacacagtttgtgtgaccaaattggccagaaacggtcgttggatcccctggaactggagtcaccaagcagctgtgagcctccgtgtgggtgctggcagtcgaacttaggtcctctgcaagagcaaccagtacttaacactaagccatctctccagccccttatcctaaagcctttaaaagttttattacatattttgcatatatatttatagtatatatgtattatatacatatgtgcaaaaaatatacggtacatgccagtctatacatatggaaaccagaggacaactttgtgacttgcatatctctttctaccattgggtctctcagatacaactcaagttagcaggcttctactacaaagcattcttacccactgaaccgcgttgttccccagtatcttagacttgtgagtgagggtagctaggtgctttggtgtacacattcagagctgggaagaaggaattgagatagaaggatcatgagttcaaggctgacctgggataaataatacaattttatctcaacaaacaaccaaaaagaagcacaaatcagaagttactgttatttctgtatgcaataacagggagtgctaactggaatatgtgtttttcgcagtcctgctacaggtggtccacaggttctcaatgcccagagaagacccctttcagttctcaaaactacagaagtgggcaccacaaatgaggatgtgtctcccgatatttgtgtaagttaacataaatggacttagtggattatttcactcagatatcttagtagtttagcatttggctggttagatggctcagcgggtgaaagtactacctgccacacctgatggcctgagattggtccctgggccccacatggtgaaatgagaaaactgactctgaccattgcatgactttccctgacacagacggacaagtaagtgtaataaaattaaaacaaacattaaacgttcaataaatgttgaaatttgcctgttgtaatggacagtggacttgaggagaatctcagatttaaagtcagcctaggccgtgcagtaagttttaggctaccttgagtacatagctaggtcttgttcaaaagactttgataaacattaaaatcactaatgtgaactaggcacataaaaagatattcataattatatcaccaggaaaatgcaaattagagccacagtgagatactacagggtacccgctgtcaggcctgtaatcaggagacagataataacaaatgtttgcaggcaaaggttatagaaaaattagaaccttcatacattgcacaaacagtctcttctgtaaaacacactggtcattctttaaaatgttaaagctagggacccttaagagcatttgctctcccagaggaccaacctgggtttgattcccagccctagttggcagcctacaaaccgtccacagtcctcttgtggctctcatgggtactgcactcatgctaacatacatgtaggcaaaacattcatgcacagaaaataaaagcataaaataattactaggcaggcggtggtggtgcacacctttaatcccagtgctgaggcagaagcaggtggatctctgagttcaaggccagtctggcctacaaagcaagttcctggacagctagggcaatgcagagaatccctgtcttggaaaaaaaattttactagttaaatgtagttactaaaagccacagcatatctcatccatgacatacccatggtagctaaactaatacacagttagtatggaaatattttactcatggtagagagaggagcctagatgttatcaattaatgagtaaatcaaatacatattagcacagtggcctatcacttgacgattccaaggaacgaatgatagactgacctgcattacagcatggtcgaccctcacggtcagtaagtgaagtcatgtgtctgcagagtactgctttggaagtgactcccgtgctctccttgcctgctacaggtaatatcattttctcctctcagaaagataaagtgaaatgtgtgggtctggtgtgatagaaagaaacttacaggaaatatttttccatttgcacaaagtgtccataataaagcagtgcagttgggaattacggagagggcgaccgcaaggccctggagtgcattgtgcttgcttgctttctaccaaaagagcacactggtgtgaacacactagaaccctgagatgcacaccacactgtgaagtgatgaattatatctcagtcttttttttttaaagaattgtttattttatgcatatgagtactctgtagctgtcttcagacacaccagaagagggcctctgatcccattacattattatggttatattattattatggttgtgagccaccatgtggttgctgggaattgaactcaggacctctagaagagcagcttaaccactgagccatctctccagcctcccatatctaaaagtcttaaagggggggggtgtcactaatttgacagtcttttcacacttgcaattatttttttcccgacatacatgtaaaatgcctgggtagcaatggatatagaccaaccattttttctttctgttctttttttttttttttttaatttttcatgttttgtgtttatgtgtggggtgtgcttgcctgtgtatgagggcagctgtgggtagctttactcactgagctggctcacgctcctcatgttctttaccagtagagatttagtaacacccagggtagaaagacaggatataggcattcaaatccggtaaaaagacccaaggcactgtgtggcatggtggtgctttactgaaactttgggaaggaaaagtctgtgcagacgagccccaggcattgctggagggtgaaggggggtggctgggggcggggtatgagaagctacaacaactgcatttcctcttccacaaccaaggaaaagagctaagtcgctgaagacagtgacttgttaatagagttctctttttatttaccttcttgataaatattttctgataaagtacacaggattttatagctagacagatgtgaatggcaatgctattttatatccaaaaatgtagaatttctaatgactcagaagagcctaggagacttttatgactgaaggaagacacacaggctctactccagttttatgagatttgaatttccagagaaggaatccacacattatgttcccctttgttttaaataatttgggaaagttattctgattccgccagttccccgattgctatggaaagcacagcgattgaagagagcaagcagtacatgttgtgttctggagaataccgcccagtgtgcggtggacggcctagccagggaggatgggccttcagggaggttctgggttcagctcctcagggaaggcttgggctattaacgttctcctcgttcactctctgcctccctctgctgcctccctctccttcctctccctcttcctttcctcttgttccctttccctcgctttctccctcttctttccttaacctttgcaatgtcttccttggattttttttaaagaagtatttacctgaatattttagccatctccttccaccccaagttatttatttatttatctatctattttgcgtgtgtgtgtgtgtgtgtgtgtgtgtgtgtgtgtgtgtgtgtgtgtgttggtgtttgaggcaggcctggagctctctctttgaactgagctattttaaatctacattcaaaaccccttagtgtttttaacctttcaactagattagaaatatttatcctaggaacacttaaatgatcataaaaattatgtatattttaaaatagttttcaagtggtgggaaatagggaataatctgaattctatccccaggacctgcatggtggaaagaagaaaatgacccccacacactgtctctgaactccatacataccatggcacacatgcatgtacagtgtgaccaccctggttgtgtgtgtgtgtgtgtgtgtgtgtgtgtgtgtgtgtgtgtgtgttgggctatcagaggaaattggaaggggataccaacccccttagagctaagccatcccagcatgggtgctaggaactgaacgtgggtcctctggagagccgtcacatcctctttgaggcatctctccagtccctggaatactttttaagtgagaacagtagtgtcagttttcagctctcgggtaaaattgtctgggagaggacagtaagctgcctttctatgtgttgagccacacaccccctccggtatattttttgatgaagtatagttttctttgttaacaaaatcattttcctcaattctgtcctgtgctttttaaattgtcttccacttgaggtcctggtttgttatttctaaatctcatgtcaatgatctgatgtcttacgttttaaaaaaaaaaatgtgtgcgtgcgtgcatctgtgtgtgttgtactgcgtttgttgaactgttgcagctaaagtgtgtttggctactttaggatgaactcacagaacttgagcctctgagtgaagacgccatcatcactggtttcaggaacgtcactctctgtcccaaccctgaggacacttgtgactttgctagagcagctcgtttggcatctactcctttccatgagatactgtcctcgaagggcatcgctgctgatcccgagggactgttgcaggaagaggatctggatgggaaggccgccgaggctcatcacactgttcatcaccaggccctcatcataaagaaactgaggtgactagagtgnnnnnnnnnnnnnnnnnnnnatttaccttcttgataaatattttctgataaagtacacaggattttatagctagacagatgtgaatggcaatgctattttatatccaaaaatgtagaatttctaatgactcagaagagcctaggagacttttatgactgaaggaagacacacaggctctactccagttttatgagatttgaatttccagagaaggaatccacacattatgttcccctttgttttaaataatttgggaaagttattctgattccgccagttccccggttgctatggagagcacagcgattgaagagagcaagcagtacatgttgtgttctggagaataccgcccagtgtgcggtggacggcctagccagggaggatgggccttcagggaggttctgggttcagctcctcagtgaaggcttgaaattgtctggaagaggacagtaagctgcctttctatgtgttgagccacacaccccctccagtatattttttgatgaagtatagttttctttgttaacaaaatcattttcctcaattctgtcctgtgctttttaaattgtcttcaacttgaggtcctggtttgttatttctaaatctcatgtcaatgatctgatgtcttaagtttaaaaaaaaaatgtgtgcgtgcgtgcatatgtgtgtgttgtaccgcgtttgttgaactgttgcagctaaagtgtgtttggctactttaggatgaactcacagaacttgagcctctgagtgaagacgccatcatcactggtttcaggaacgtcactctctgtcccaaccctgaggacacttgtgactttgctagagcagctcgtttggcatctactcctttccatgagatactgtcctcgaagggcatcgctgctgatcccgagggactgttgcaggaagaggatctggatgggaaggccgccgaggctcatcacactgttcatcaccaggccctcatcataaagaaactgaggtgactagagtgtttctctcttggtctgtgtgcttgtcaattgcagtggccaggtatcggctcttactgtccatcagatgctcaatcagggagtaagtctgacccggggacacagtcggtgaaggttactgattggtttggatttgaggattagaagaagtaaattgtgctggttatgagactcaggtaacgaaggaaatggctcagcaggtaagggcactttcttgtagaggacccgggtttgatttccaacaccctcgtgataactctcaactctgtacccagttctagggtatccattggcctttctgacctccacatgtacagacacatgcatggtgcacaaagttgtgagcagaatgcttacatacatagagtaattaaatctaaaacaggtttaatctgtttcttatttgggaaaaaatgagaccaataaaaataaattctattacaagatgagttcagtataaaatttataatttaaaaatgtataaagttggactctaaacagatagctagtggctaaaagcattggctgctctggtggaggtcccgggctcagtttttagcacctacagtggtacctcccaaccctctgaactctatttccagggatttgacatcatcttctggctctgggtactatccctacactggtgtactgacatgcatgcaggcaaaacacatgtaaaagcaaatagatctttattaagagcatatataaagttctgacagaagttggagtatactgtcctgaggatggcttcactcttgtttcttgcagcccaattattgaagacagccgtgaggccacccactcatctggcttctccaggtcttcttcctcagctcccagtacatcctccatcaaaggctttcagcttctggaaaagctggagctgactaatgacggggcaggtagagtgttccagccaacagcaagcttccgagtctgctcagtggccgtttagtccctccgcaggctgaccctgccccagttgtactatttcccaaataaaccagcactaattcaacgtatttcatatgcccaaagcaaatgaatgtggtcaggttagcagtgttgattttgtaatgttggagttccctcccccctcacctgtttttttgttttgttttgtattgtttttctgagacagggtttctctgtgtagccctggatgtcccggaacttacttatagaccagcctggcctcgaactcagaaatccgcctgcctctgcctcccaagtgctggggttaaagatatgtgccactactgcctggccctcaccccctttctctccgtgtgtgtctgtgtgtgtgtgtgtgtgtgtgtgtgtgtgtgtgtgtgtgtgtgttgtgagagaggcagagacagacagacagatcatacaaaggctataaagggcatcagatctcctagagctggggttataggcagttgtgagctctgagacataagccaaactcagctcctctggaagatgaagaagtgctcttaactatctgtccagccctttactactgtgttttaaacattaatttatatatattttcaacttcttttctccacagaagatgctattcagtcaccctggtgttcacagtatcgcctacaactgttaaaatccctactagaattaagtgcttttgcggagttttctgtggaagaccgaccgatgcctgtgctggaaatagggaaggagattgagttaggtaagtagtgtgtgtgagtccttgtccttttgcacatacacataagtgatttgaatgccacaggcccttgaacactaagtgctcctaggttgtagtagatagcattagagaggttaacacattgataattcatgccacaggaacaatactacttcttcttttttttttttgcctcttttagtatttttcttagatttatgtattttacttactgttttgcctgcatgtatgtaatgcctgttgcatccctttactgcgtttacagatggttgtgaggcggcatgtgggtgctgggaattaaccctgagtcctctacaagactgctaagtcctcttaactgccatcatctgcctggggctcctttggatttttatataaataactttgaagagtattttagatgccacttaatggcaaaaacactagcacttctcacacttaagccaggaggtaaagtgtaaggacctacatatattcacagtgactttaaaatggaaccaaaccttctcaacaggtcctgaggattacgtcatcaagcaagagcacctaacatgtgacgattacaggttattctgggtggcaccaagaagctctgcagagctaaccatgataaaggtgaggtgggccctttgtgatctcatcaccttgtaagtcagcaaagaagagatagtgtgtccttgtagtactgtaaaacctgggacgccaaaaagtcagtcaccgttctaaggcaagatcaaagctaaaaactgaggggtggctgtgcacaggcgctctcatgtctaagcttacgaggtattcttccggctttctctttctgaggaaacaggccctggagtgtgtggactgctccactcgggacaggttgtattctagccttcacacatataccttgaaatctcagttctccatcactgtggggaaacctcagtttgtttttcttatattggaacctggacacctttttccctcccatttcttccttggttttaattcctcttattttggaaaagtacaccctttagtgcctttctgaggaactgaaagcaaagggtctgaaaattccttattctctgtcttttcattatcggtagcatgactggatacagaattctttattttttttttagaattctaaagccttattttataactgtgcttggttttgtttgttttcttactgttatctagttgactggtttcttggtgtattttcccgcacagttttagaacctgaatatagacattacttaggcaaacgcagcaccaccgaggcgtgtcctcagctcctcaccttgcctttgaagtctttgccatcctgatgtttgtttggtttttgtttttgtttttaagctcagcagagcaattttgtttgcaagaggatgtgctgctcgaccccaaagcacgcacaccccgtcacagatgctctctgggcgttagtggcgatgtggtgactgtgtcttttctcggctggttggggtccagcctcatagtctttagcttttggctagtactaaaaacccagtacgaagggacgaaggaaagggggtcaggagtcagccactgtgcagtcaggctctacaagtgcagtggggcttttgtgcgaacagaagtttactctggtgagcgtccgtcatcttggtggtgtaagataaaggtcattatgtaggcctggttggcttcaaaccagtaatcctcctgtctctgcctcctgcataattggattacaggcatgtgtcaccagggccagctgtcattataattctagtggctttgtgtgaaatctccccttatctttagatcctggaagtcttgttgtggtgtaagagtcccacactgtgatgtaagtctgttatcatccaagtgctaggcacacgtcagtacacatctcagtctggggtcctttcaggcgtgacattttctatgaggaaaagatgtttctttcaattttctgctttctcaatttgtaatttctcatatagggcattcattttcctgtacaattatttctttgtttaggatttatttgtgtttgtgtgtatagatcagaggacagtttgtggttcttagttctctcccatcatatgggctggtgaaaaacacctttgcccactgagtcatcacaccaatagtgggtggctcacaaccacctgtgactgcagctcctggcgatctgaggcctgaattctgagggaacctgaattggatgtccttacccacccacagacaagcaaaagaaaacataacatctttttattcctcctccagccgccgctgctgctgctgctcttttcctttagtgcagttgtctcttggtagctgcaggtgactgcacctgaagctcccctccctgtgcgggacacccacaccgaaggccctctagtcttttctgtaactgacagtcattgcagatgacacacagaccgttcccatgctttaaatcaccgtcatgttacttacagcactgacataatgcacgtgctgtgtgacttaccggatgttgccctgcaccctgcctcggttatgcccatcggccaagtcctgcactgtacaacctgcaggctcacactcttatcaccacagcctatcctttttataggtttttacatttcgtgcgaagaggaaatattttttattttgctgagatattaatgaagttttaaattgttttcttgggttagcaaggtggccaagtggatgaaggtgctttccaccagcctgtcagcctgagttcagtcccggaaatgggcagggaaaaacgtcgtcagtcctgtaaccttcatacccctgccacgacacacgcacacacacacaaagtaaatgtctttatttttcctttctttgtttttttcttcctttttaaagatgtatttatttcataaataggagtgttctgtcttcttgcacactacaccatgatgtaaaggaaatcaaatcccattacagatggttgtgagcaccgagatcagacagtgcagtgctcttaacctcttaactgctgagccatctcttcccggccccctcgtttttttgtttgtttgtttgtttgtttgtttctaagacagggtgtcttagaaaaaccaaaaactctgctggctgtcctggaattcacactgtagaccaggctgacctggaattcaagatctgcctgctcctgcctctgagtgtgggattaaaggtgtgtgctgctcccactgccacctagcacaagatattcttctaaaagagggaggcgagaacagtctgtgccccttcccatccattttctttttttgtctgtttaaaattctgacttttcatgttagcaactttgagtgtttggctctcttcagagttaggtgttaacactaaaagccaattgaaagctgtgtgtatatagaaagaccttgacagctacaggcttcactgtagtttggcatttgattggcaagcccaccaactgttaagtcttttctcttgagtgagctggatctcatttcctgcccagagaatatgtctgcctgactgctggcatgagaagaaggtagtgtaggagagaagcaacatggaaggtcccttcctagctccacccacccccactccagcacctggcgtctcctagcctaggctgttgctctacacctggaaatggccttctgctttccagaagaggagcagttatcgagctgggctacaggaacaggaaggagagtctggagactgagtggcctaaagtggggctcaggtactcttgcagtacagcaccttactcacctagccgctgctgctgccgccgctgccgctgcctttccgcggcagtgcctgtgttccatggctgcttggtggtcccctccgctgctaggacaaggtttcttgtgtcttctaagtgtattaactctttccagctcgcagagctgaattgctcctccgttctttcttacaggttatgctttggtgtttgttggttgtagtctggttttggcattttagacaaggtgttactatgtagccctggctggcctggaactcacagtgccgagtgccaggattaaagattcaccactttgcctggccagattacgcttttaaattactttctactttacatttgctggagtgtcggagggctgtgtggtggtttcagtaaggatggctcgtgggtttatgtaaccctttgataagattagattaggtgtggcctttggaagggtgtcacttggagtgggctttgaggcttcaaaagccaatgccaggcccagagtctctctctctctgcccaagcatcaggatgtaactctcacctagttctccagcgacaccacgtcagtctgcctgctgccaaaatgattgtatggactataactataagtacacctcgaattaaatgctttctgttgtaagagttgcactggtcatggtgtcttttcacagcaatgaagaaatgtggagggttttgttttgcttgctttagacagggtctaactctgaagtcctggctagccaaaacttgtgttgttcttcctacctctgcctcctaagttctacagtttttgtatttcttttttcttttgggttggttagttggttatagttagcatacaaaattgttgcggaaaatattaaataaataatccacgcaactctggcaggccggccggcctgttctcatctgtggaggctgactcagaactctgaaacctctccacccagctcgctaagcacccactggtgggtcgcaaccatgccagctccatgctgcaaaatttccatggcctttgtttggggtacactaattcaaacccacgctttgccaccataccattctctctggaacccagttgagtgtccgtccgttccctcctcccccccccccaaaggaaacaccacacaaacttagttcagaatcaagggtaactcaatcactgggcacaactaaaatcctaatcttgtaagccatattaaatctaaatcctccagtggcgagtcctggtagattcactatctaaactgggtataactagtatctacatcttatcctcccgctatccaaaggcctttaattttctcctacctcttcccttcctctcttcaacccggaagtcccacctactcgcccaatcacccagtgattggtttctttattcattagactcattcctccatccagaaaagccctcctgggaaagtggaattaacatcaaaatacaaataataccagggacatccacaacacaaaataatgggttttattataacacatacaggggtgtgtgtgtgtgtgtgtgtgtgtgtgtataattgtacttaactcttacttgctcccctctgtcaccctccctggcctccccattgctgcccttctcagagttccctcctgctttcgtatattgttaagttgagattctgggtgtatcatggcagtcagtgtgtgtttgtgtgtctggctcattttacctaacataatctccatttctatccactttcttacaaacaaaaggattttgttctttatgtctaagacatgttttccatttggccatggtagtacatgctcttatcctaggaggcagaggccaatggatccctgtaagttcaaggctagtttgtactatgttgcatgtagagttttttttgttgttgttttgttttttaaaattttttaaattttattttattatgtgagtacaccattgctctcttcagacacaccagaagagggcatcagatcccattgcagatggttgtgagccaccatgtgattgctgggaattgaattcaggacctctggaagagaagtcggtgctcttaacagctgagccatctctccagcccttcgtgtagttttagaagcacgttactgcctaagcccgggagctgcgactgtgctaccatccagcttagctttaggatgatcacaaccatcccccaccccagcttccttttctaaccaccgttgctcctgcttggctctggcttggctctaggataggcgaccatcagccccacccggcttctttctctacccacttttgctccgggaggggctgcattaccatctcactcctggtaccctagaatccacggataaaggacacacagacagctttattattgtagaacttgctggtacaattgctgggcacagataactcctgcctggaaaggcatgccctcttcaactattatctccatttctcctcttgccctaaacttagtggcttgtgtcagctggcctctgccagcctccttggccatccacccttagtggaggctacaggccctagctgccctaagatcttgatgtctgcatgattgctgtgtgcttctcgttccaaagcatggcagaaaagcccctcttttcttgtgtctgcctattcctcctgggacccagaggtctcacctgtaccacccacccagcaacaattggctcccagccttctctactgacaaatcaagaaccaattagagaactagaccatagtatcagcacctccccttacagtactgtagagagagttctaggccatccagggctacattgtgagatcttgtctccaacagtgcttccaatctgccagcctaatcaatccgcatgttctaattgcccttccattttaaatattctgtcttacaggcatcatctcagcctatcccgtgggatttttatatcaacctcaagttgaaggagcgtctgaatgaggactatgaccagctttgcagctgctgtcagtaccaagatggccatgttgtttggtaccagtatataaactgctccacccttcaggtttgtgatactactgcacacactccatctatgctaggcatttcatccagcgctgcagagatggctaggcactggctgccaggtccaatggcctgagcgggatccccagaaccccaatgggaatattgtgacaagaattaaacctgataaattgttctcttctttccactcccacatcatggcatgtacacacacacacataaaaataaatgtagttaaaattttaagatacttaatacaaaattcctttcaagcatctagaaatagaccagccaggtggtggtggcgcacacctttaatgccaacactggggaggcagaggcaggaggatctctgagttcaaagccagtctccagagcaagttccaggacagtcagagctacacaatgagaaaccttgtctcaggaaaaaaaaagaagtagtctagttttaatgtttatttatttaacactgtgtgtgtgcgcgcgcgcgtgtgtgtgtgtgtgtgtgtgtgcgcgcatgtgcggcatgcatgtgaagatctgaggataaagccagtccttctgacgcataggttctagggatccgactttaggcttggtaataagtgcatagacctggctggctttgactttatggaagtttttctacctcaggcttcagaatgctgggattacaggtgtgcctcaacataccatctgtagagaaagacaaattcaagtaaaatgtaaaagcattgatgactctttccgtaggtaatggttgcttgcttgcttgcttggtttttagtgttgaggattgacaaaagcccagtacagtctaggcagccatgagctgtatcccttcttacacaagttgctttgatcagttacctatttgatatattttagcattttatctttagagatggggaggagggggcagggaggagaaatgaatgggtcacctaactagactaattatcaattcatttaaagcaaaataaaatcttgtctttcctgtactgcatcccttgaaacctttgaaaatagacacattatatcattttattctttgctgtgttcaagttttgctaccaacataatttttaatgttctactttatgtatgcgtgtgtgtgcgcacatgtaggtgaacatgcacgtggctattagagcagcttgcaggagtcctttctctctgtccaccatacaaatgtcatggatcagaagatttccagcttggcagcagcatctttgcctttccttcatgctcttcctccacagtctcataagtccttgtagccttcaggagacctcggtgttcagctggggcggggggccagctgcattccagcgggaaacaaaaggaatgcacacagcagcgtcaccaggcacgtactgtggatgtgacagctggagaaatagttttctctctttctgtttccagaatcttctccaacacagcgaatttgttactcatgaaataatagtgttgattatttacaacctcttgacaatcgtggagaagctacacagagctgaaatagtgcacggagacttgagtccacggagtctgatcctacgaaacaggttggttggtcttttttatttccttcgtttatttccttcaaccaatgggctggctgccaaataattcttgtatttatgccttaaaaagaaagcataagagagtgttttctctgcctgtatgtctctgcaccacgtgcatgcccagtacccaccaaggacagaacgagtcggcacctctggaactggaatgacagatggttgtgaagctgccatgtgctataggtgctgggaacatacaggtgctatgtgtgtgaacatataggtgaaggggggcttgccttgcatgtgtaaagccctgggctccaattgaacaccagaaaaaatgtaaaagggcattatcttttatttaacaaaattggcaggaaatagtatatagagttataagtactaaattccagagagccttttacttttaattatttatatatatttaatatgtgtttgtctgcatgtatgcaccgcatgcacgtttgatgccattagaggttaggagaaggcatgggatgccctggccctggagttacagatggttgtaaaccaccatgtggattatagaaattgaactctggtcctctgcaagaacagtgagggctcttagccactgggccatctccagcctccaggaaagcgacctttgaagccagttagtttattgtgtacataacttgtgaggaaaatgagattgtgaggtaggagcaccgctcagtgggaaagtgattgctagcctgggcttgatccctggagagggagaggaggagaagaggtgttgcccatggcaacactagcagctaagccgagagctagggaaggccatgcttccttattaatttgtgaaacactctcaagctttaaaaaaaaatgttttaagtggccatagcttataaaagcaaaattaggttggatctatgcaaaggaaaaatgggagcgtctgtaaattgtaaaatccttgtgctaaagtcgtttgtgacaggaagagtgtttcctcctaaggcacattgattctagagattcatgcaaataactaatatatgaaatatacttacttggtagtaagtttgtgttttgaagtattttatgaagtgaaagataaggttacaaaaaagtaaggtaaaaatatggtgttggctgagttgaaacaggacatgtaatagcagttccctggaagtagcagagctagattgttgcctgcactgcagaggtaggcaggtcctgtgctccttggaaagcccacctgttacagtaaacaggaaagactgtggcacctgagtggggagaactcatttgtaatgcccgtccttactgcggagtgtaagagcttcggagtgttctgaggcggccatgcactgtgttttaggttagatagagtttattcaaacctgtgaccaaagaaatcttaacccttgccatttctctctgtgtgcactttcatagctcaccactggagggcactgttggcaaggctaagatacacctgcagccctttcaaaaaggaaaaaaaagctgggctctgctgctgctctcacagcctgtctctgttatctctcttgaatcccctcagaatccacgacccctatgactatgtaaataaggacgatcacgctgtgaggatcatggacttctcctacagtgttgacctgagggtgcagctggatgcgtttgcctatagtggctttcggactgcacagatcctggaaggacaaaagatcctggctaactgttcttctccctaccatgtaagtggaagacaagcctggacaaatacggagagcattcttttttctttttttggtctttcgagacagggtttctatgtgtagccctggctgtcctggaactcattctgtagaccaggctggcctcgaactcagaaatctgcctgcctttgcctcccaagtactgggattaaaggcgtgcgccaccacgcccggctcatggaaagcattcttaacctcttggttgtctagataagtcataagagctggtatttactgccacccgctcgcctagatgtccctgctgtcaaatactgtatcaccatgtgacttacagttaaccgtccttcctgtcacagtgcccaaggatataaatatagacatgtaaatacagaactgagtggctttagtgctccagccatttctgtaccctgccatccgtgtcacccgtcagtcattctctttgcccctcactgtacagtaaggacagcagcctgtgttccttggacatgagacttgggaggattaaaggctatgctgtctgtgaggacaccaggatgggtgtgcagtgtctcacatgactgtgtcgtgtgcaaacatatctgctgactggatacatggtgtatacctgaagcggttatgtgggccagagtagatcacaactggagtctgcaaatgcactaggtgtcctgatgcctggtaatccaggtaatccacaaagacatgctgttgtcgttggctcttaaaaataacccactaaattggacagtggtggtgcacgcctttaatcccagcactcgggaggcagaggcaggcggatttctgggttcattgccagcctggtctacagagtgagttccaggacacccagggctacacagagaaatcttgtctcaaaaaggccaagtcataatagtaatccttaaatgatctggtcacttcttctccctgtcctgtacagataaggacatctactaaggtctagagctgtcagtgctttcagccctgtgtaaatcagttgctaatggaagcagaggccactttacactttagctcatgaagcgttttgtgatttcaggtagatctgttgggtatagcagacctagcgcacttactcctgttcaaggagcacctccatgtcttctgggatggactcctctggaaacttagccagagcacctctgagtgagtactgggtcctccagggttcctccacatcccaatagtttgccctctctcttcagcggactctgctgtggtaggcaacctgagttttttaaaccaagtgctgtctctgcgttcacttcagtgtctgcagagcacctaggacagggaaaggaatggccagctgaaaataagacatggacctgctcagactttagggcatttcttagcttagaaatagaaacactttagaggaataagttttctaaccaattggtgttagtctttttaacagctgtgtttatcaaaagtcggttgtcttttgaagagttaagtttccacatggtatactgagtttagattattatctattaaatgataaggtagaaccaaaccaccgagcagtctcctggtgcagaaataagtgatctctcaggtctgcttgggaacttgtcagacaccttacatagcgccaatggcttcccagcataggctcaccaagtagtgacgcactgcatgccagttctaaagttggttttcattttagatcagtgttgaagactgaatgtcccttccctgctttcatctccagaacactaagttgtattttcctcatttgattcggaaatttgtctcctgcatgtatttttaagataggtttgatcctgacttgccagctcaggcctttaaccccagcccatggaaggcagaggctcgaggccagccagagctacacagtgagacattgtctcagacagcaacagaaatagataagttaatgagattgctgaagggtactttgagatgtgcagggctaagaggcatcttggtctagctgtggacctgctggtgtggttaatggacacaagcaaaaatagatggctgggcccgcctttgtcaaccccctgctctacagcagtgcgagttttcagataagagaaggagagtaagagcaaggcaccttaaccaaggttggacgtcagagaactgaggatggcggagcctgaggtgaggggatgttgtcatgacctgcagtgaaaaagctggcagggaacgaagtttctttttctttgactgtgtgtggataagtgctagcgggtgtcactgcaccggagtggccaggatccatgggctcaggcgagaatggatttccttcttccatgcgtgttcagggccaccacagcagactgatttttgtagttcttccctgtgccttcaagagtgtttgaatgatctccaatcttagagttcttggtattaccatatatcactttggcatgttagtgccctgctgagttaaacccagaaagaattctaattttcacatgcccaatcttgatagaaatgattttttttttattttcttaggctaaaagacagtgaattgtggaataaattctttgtgcggattctgaatgccagtgacaagtccacagtgtctgttctgggggagctggcagcagaaatgggtggggcttttgatgccacattccatagccacctgaacagagccctgtggaagctggggaagacaatcagcccggaagctttgctcactcagcaagacaagcagccaggcggctcccagagccctgcctaagccatgcgaatggtgaagaactggtctggggctgctgtgatttgtttagagcacacttagacacatcagcagtccttcactaggggtcattctcagtagcacagctttcagccaggtggctgtgccctggcagcctcatctggtttattcaaaaggtttctgtgcagacagctgctttttagccctctggcttctgccttctctcttttgtaattttataacatgtactctcctttcactgtgtattttataataaaatagtttttgttacatttctgttgctggcaattcatctacacttgcaaactaaggtgataaatggcttcattttggagaggacttactctacggtggtagaaacttatgtatcccagacttagagcagctgcctttgggttataagaaggcagctggtcggccatttcttccgtctctctctgtccttctagagggtgtccagaaagaagcaggtaaaatgacacacacacacacacacacacacacacacacaccagctttccttaagttcaaaggtaccggcctttggggacagagtactcagcaacctgtcatgcaggacacagggctgctgaggggacagagaccattttccttaggtgtcaggaaagcaggggtcagaacagaaaggactgaaatggggactaatatggaaaacagtaagtctgatggaacactgtgcacccaaaggggcgcactggctgggtgtgtggggggctgtgggggctgtggttgtgtcattaaggcttttgtttcttcagtaggataataagcatttatttatttatttcacactaaaatgtcagtcacctgatgtccactcgtgctggtgcctgagtctcctctacttgtcaccattgttgctctaagcttgttagagagcagattccctaactaatctctcaactgaaacacttgggcaaattcgacagggtaagccagaaaaaatgtatctgaaagacaaagaaagtaaatattttccttcaaccaaaatacagttctgcaaacatcttcagtttgcttcttatactgaagataataaatgatgaaactgcctttctgtaatcaagtccttcttagtccccagtgccctgtattgcccaggaaattgagagcctttaacttaagcaagcttctacctagtgaatacttcagcagtctaggcagccaagttgctgtatgggcaaatcttgtttctgaaagtacaagcaggagtgggaggagccaggacaccctgcagctctgttcacaccccacacctcaccccatacaccccccactctctgacctccgccaacttcagcctttgaggacaggaaaggatgtcactgccaacagtgcctgtcatcaacaatgtctgccatcgcttcagttttctttacaaaagcataaaaccacaaaatagaaccctttccgtttccctttcatttttgtttatttttaagctaagatcactgcatggcataggctgccatcaaaccccaggtactctggtcacagtccccagagggctgggatttcaggggcccacccaccagactccctcatatttgatgcccattgtcttaggaaaaggaagcctttgttttgtgtagaggctacaggtggctttgatctggtctcatgaaagcaagaagaacagaatgctgggcctaggagaaggaaagacagatgcacaactgggaagaacgggacttctttctccccgtttggaggaagactgtggaataagctctccccattcacaaagcactttgtgccctaacttgcttggggccctgttagaggcatcctcctcacaagtcagagtgttctaactgatgccagacccgagtctggaagtgaactccttccttcctgctggaggaagttgtggcctattgctcgagctgtgatctcaggcaggtaggaaagtctttcagggttagcacaggccttcagaataacttgttgatgtcttaaggtgaaagtctaaggcaaggccagtgaaggtgcactcttcattggaactgaaaacaaaaattcttgctctaccaaaagttactctattctgacttcaacagctccctacggagcaggtgcagcatgcttttaacatgactgactttgactataatgaggtcggaggcatggaagctgagtatttaccaaggtacagatgtgtcactaaagcctgatgaccagaatcctaccctctacatggtagaagagagaacagactccacaagtcatcctctgactccatacatgtgtgtgtcacacgagcccatacctacaaacacacacataccaatacacacacacccacaataaataaaaccttttacagatcagcgagaaaggacgaaccacatagcatccagggctgaaactgagacctaaagcttgaactctgtccccagtgccccgttcagtgccttagcgtgagttaaaggctgatccagtgtttgccagcacgcaggtcaacaccttttcagcccctctaatgccttctaacccgctctggtgccttgtgcagagaatatactttatatccatatgctatgatctaacctcttgtactccttgttccccaaatcaatttgggtaagtcaatttaagaaaagataaaaaaaagataatgactcatgtagctcaggcttgatctcagtatgtagcccagggtggccttgaactcctgcctccctctcccaaatgctggagttactggcctgttctactacaaccagcctgagatggctttagtgttctgcttggttccttgcttttccactccaggactggcgggatgtggagccgtggagttgctgatcttctgcaggtgtttgcatcacctgccgtcgttgttatctcaggttctagtcacttgcttctcccccaccctccagccatctcagaactcatctcacatggccccaagtcccaacgaatttgtcgtagtctacagaacactagctgcccggttccctgatgtctctgcttccttactcaaggtcaacccacgtccctctggccactcttgtctgcctggaattcttttccagttcagtggatgacatgtgatcccatgtgtgcttgtatatacaaaccctttttctgttttctcactactacttaaactaagggcaggaatttgtgttcttaactctaataccccagttaaatgcttgcctttataagagttgccttggttatggtgtctcttcacagcaataaaaccctaactcagacagtatttttcctgcttttatgtctgtatacagcatgcatgcctggtggctggaagtcacatgagggtgtcgaatcccctggaactggagttacgcatagttctgagccaccacgtgggtgggtgctggaaactgaactcaggttctctgtgagagcagtgagtgctcttaaccactgagccagccctcagatcttcattttaaaatcattaaagagaatgcatctaaatgtctatttgtagtatgctgaaaattcaatggtgtcttaatgttttgtgatctgttagaagttttcaaaatcactatttctgttactgttacacttccttatgtctgtgaacaaggactgaatgacatacagcccccccctttttttttttttcaaaatatttaagtggcccttgaaatgactcagtgggtagaggcacttagcgccaagcctgacaacctgagtttgatctctgggacccatgtgataaagtagtgggacctatgtgatagaactcccaactgttctcagacctccacacatgggctatggcatgcacgtgtgtgtgtgcgcgtgtgcatgtgcgtgtgtgtgtgtgtgatggctcagcaggcaaaagcccttgccaccaagcctgatgactgctagagttagattcttgggccccacacagtggaaggacagaaccacttcttacaagttgtccttgtgcatgcacacatatacaataaataaaatgtaacttagaaatactgctctggaataaaagcttgagttttcatacgctggttccgtatggttatgtggtggatgtcaaatgaccatctgtaaacacgctgtttcctccatcaaagcacctgcttctgctgttgctcctgggaggctcctgtggccgtcttgaagccgagcagtaatctgtccatgagttcacatcaacctctccctgtgacactgaggttgcccagactgctagttttcccttgtaagcaagggaccatgtatatactgtcactctgtgcccagcaatgtgtattgtgggaagccacatgtgctgttgcagggtggcgctggttaccgctggccaccacgcatacataggcagtaaagtttgccaagatgaggttttgagaattaaccaatcagatgagagacaagttaaccaatcagatgagagacaagttaaccaatcaaatgtaggcatgcaaatgaggtggtaagcataacccatgcataaccaatctgggtgtgagacacgcctctcctaggcctatataagcagcaccagttctgggcttggggtctcttcacctctacaatcaagctctcccaataaacgtgtgcggaaggatcctgttgcagcatcattcttgctggcgagtcagggcgcgcgtgcaagactgtataattctcaaaaatgaaaatcctggaaggatccagctacaaattcagggacaaattatagtggttgcaggttaatgtctgtccttagtgttagatctcactttcagtacaccattttattacgctaatgtagcatgctaaatgattgttaagttcacgttatggtaggcttcactgtctaggttgttatgccaggcgcagtggggcacagctgtcatgcagtagctgcactgggcagagagcttgccggtggcctgggctagatcctagagacgatctctttttttaaaagttgtttctaaagggtattctctgtgacgtggacattgtatttccatgtacacttaatttaggtccatgctcagctggaagagttggatgcctctgtctgtctgctccagtttcagagccgttttaacttgccagcctggtcatgtgggccttttcctctaattgctgctcttccaagatttgcaaagtgagggttgcacttcataaaacaactactggactagggatatggctcgcttggcagagtgcttgccctggcatcctccacatcctgggtttgattcccagcactgcatcctgcagtggaaacttaagggttcttaggaaagtcagttttatggtgtcttgctggggcaaacatgtgaatgaatatttcactgaagcagacacaggagagaaaattttctgctaaagcaaacatgtgaaaggacccatgatggaggattctttgctaaggactcgaacattggtctaccttccactgagtagttgagctggactcctcagaaatccggctgattggatgcacctgcagaggcagggcacgtggaggacacatgatgtctggagggtataaataggactcggaccgagtgacagagagcttggcctgctgacacagctagtttgtgctactcttgtgggtcttgagtctttgctgattttcgtttccctgagagaaacacagctgaggaacttctcctggtgtccctctgggtccctcctgctgactggagctgaggctgaggcctggctgtctctgctaggtcctgtcactgttgctgctaaccacttttctgaactggactgcttgtgtatccgtgaaatgtttgagtgggtcgagctgccgctgcctgtgaactgatgacttcagacaacacagacgggagttgcttcaaagaacctttctaaacaggttcacttctaaacaggatgcgttcccatatcctttcttttcaactacctctggtgggtagtgggataaagggaggttaaagtgtttaagaaccatcattaaaaaataggatgtgaaaacttaaagttgcagcatacatcagccgcactggtactcctgtaaccccaaccctggggaggtggaggaggagcttcggaagctgattatcttcagctatacagtgggcttgtagcctacctggacggaaagtcatagaataaatccacagagccatgcatggtggcatacacctcttacccaatactctagcaatagaagcaggtgggtgtctgtgagttttaggccagccagggtacatagtgagattccccccccccaccatctataaataaagtaaaaccaccaaaaatctgtaaacaagagatgaatatggatttattagcttttctattttaaaattgaaaaaaaaatgtagtgctacactaaagcactagtaaaggcagaaaaagaagcacacatgaagtttcactgaggcactgaggttggctggggataatagctaagggtgagtgactgtgacaaagctgcattaagcacaggggtcagacacataagctggacataggacacaaggtgacttccgctgacttcttccagatctagggcatcactacatagtaagaaagccattgctcaggattcagatcggcatgccctccgccccagtgcgtggagcactggccaaggctctttcacgggctgcataacttattgcattttccttatgttagctttgcattcccggttcaggtgagctctgtgggggtgggagtgggtcctcctaacagtcagttaggatttacatcgcgtgagtcaactttacgggtctgtacctgcctagaagctctcagggtgtgatcccagccagacaagacaaagtgtggaggtcagaaagctgactttttggtttgcttgtttattttgtttttaagatggcctcactgtatagcaccaatggcctagaactcattgtgaagatcaagctggcctgagacttatggtggtccccctgtctctgccaggcctagaaatgcttcctttgaagccagaataattggacctgacttttagctgtgactttaacttccctgagccactgccatcctctaaatgacactaccccgagacctgcttcacatgttgaaagctgatggtctctgcataagcatgtgtgtcggtttagttctaacgtttactgatctaaggctctgtaaaaacctctccagaccgagatcccggctgactgattggagccttgctatcacgcatgtgcagagcagtgctcttctgtgctttcctgcaacctttatatcacgataaaccacagtgctagcaggattctatttgttattatttctctctctctctctctctgtgtgtgtgtgtgtgtgtgtgtgtgtgtgtccattcgtgaccatgtctgagtctggtctttctttagacactccatatagccctagctctcctggatcttaatatgtaaagcaggctgacctccattcccagagatcctgctgcctctgccacctgagtgctaggattaaaggtatgcaccaccgcatactctcatccacccttttacagcacgctattcacaagccatcacgtgagacgctgaggatggagcccagggtgctgcatgttccccagtcacataacacacttttcaaaagcaattataacccggtggtcctatattcctaggaacaggatttttagttacagatagaagactaaagcaactgttatgaatcctactgtgccccagcttcaaataatttgggttctttccttggcagagtaacacagtttaaagggagatatactatatacaatatttattaccatgtcccagagagtgggtggattgttacaagatgggtaacaaagaaagaacagtgactgtgggaagggaaagatcacaccagatcctaagagccgctctgaggccagcggctggctgtcttgcttaggaggagtttgtgaggctggcttgatacctccactccgtatccaggcaacagggacagttcctggtgttttgattggcaccaagtgctacaactcctcctcccacttcagcgaggtatgtttaaaggcattttgggagcaagagacatagctcagtgtccgagtgtttgtctagcatttgcaggaccctaggatccatcactagcataatgaagataaattattaatttttaatggaaattgggaccggggtgtggctccgtggtacagcacttgctttgcacacatgagtcagactgtagtgagaattctggagtttggtttcttttaaaaacacagaaacattataagaacatgcttttgttttaatcccatgtgtgggataaggggctgctttggactgtccataccagctgaccctgatttgcctcatgctctagcagaagtgtggttttgccagctgctatgaacagacaccatgaccaaggcaactcttataaaagaaaacatttaattggggctggcttacaggttcagaggttcaatctagtattatagcaggaaacatggcaggctacagtcaggcatggtgctggaaaaggagctgaaagttctacatctccatctgaaggaagccaagaggaaaatgtccaccacaggcagccagaaggaggctgccttccacactgggtgaagcctgagcataaaagacctcaaagccttcacagtgacacacctccaccaacgaggccacacctactccaataaagccatacttcttaatagtgacactccctacctacggctaagcattgaaacactcgaacctatggaggtcaaacctattcaaaccactccaccatcaaagctgataggattagaactgggcaggagacgtctcctggaaaccttggccatgacctgaaaagcactgacttctttgaaaaatgtctgtttataatttcccgctacagagagcacagttgatgacttaacaacagaagggggaaatgtagtgagaattctgggatttcgatttcttttaaaaacacatcaatattctaaaaatgtgctttcattttaatcgcaggtacagggatgctttggaccgactgcagctctgactatgatttgcctcatgctctagcacaagcgtggttttgccagctgcaggtatttcctgcaattgtgtaacattttggaattctggaaacttttcagagggtttcaaaaggcagagggtcagtgattattgttcattcagagggtgtcttagggtttcactgctgtgaacagacaccatgaccaatgcacctcttataaggacatttaattggggctggcttacaggttcagtggcttagtccattattattaaggcaggaacatggcaatgtccaggcaggcatggtgcaggaggagctgagagttctacatcttgttctaaaggcaaacagaagactgacttccaggcagctgggcagagggggggggggtctcaaagcccacatccacagtgacacacctactccaacaaggccacacctcttcatagtgccactcacccggccaagcatagacaagcatcacagagggattgttcgttgtttgttagtaggtgctcaaaaaagaaacaaaaggaaggaaattaaaattcagggctctctctctctctctctctctctctctctctctctctctctctctctctctctctctctctctccaccccctctaagggataaagacctctaagggataaagggtggggaaaagacccacaaagtagcaaagactagatacatcaggcactgatttcaatctcagcagcacaaaagcaaaacacaacagcttggggagttgttcctccagttcttaggtggcaagggggtcatcagggcagccgcctcctgggtcagtgggattcctgaaggttagaataaacactcatgccaacaacaggataaggagaactaggtgagctttgtgtcacatcttccaggaaataagtgctctggaatttaagcactcaatgaccagcaccagccatagagcaagctcccagctgtcaggacaaagcccccatgagaatcatctcaggaacacctgctcttggctgccagggcttgaaccgtggcaaactggggccacaaaaatacagaaacaccctggacacagatagggatagttcagcctgagccgtggggagcagtaaaaggacaaagcttcccatggatagcagaacacccataaatggtccagagaaagctccagagactctggatgggaacagatgttaaggaagagccaggggaaactgaggcagagctctgcactcaaaacagtctccaaactgcctttggcagaggagctgtgcagttgtacatgacctgag

SEQ ID NO: 652 - DNA, 3623 bp, Mus musculus
gaaacttggcggcccttgcatgatggggcgtgaggtggctattctgagaaggagtcggatgcgtggttttgtttaggagcacggggtgacgatcttcgcagctccagagccagctgaaggttgagggaggctcagttagcactcggaggataaaggtctgcggaagggcgagagcaagtattgggaatgcaggatggcggaggcgagtgaagccatgtgcctggagggagcagagtgggagctgagtaaagaaaacatacagcccttacggcacgggcgggtcatgtccacacttcagggagctttggcaaagcaagagtcagctggccacactgctctgcagcagcagaaacgggcatttgaatctgaaatccgcttttactctggagatgaccctctggatgtgtgggacagatatattaattggacagaacagaactaccctcaaggggggaaggagagtaacatgtcagcgttagtggagagagcgatagaagcactccaaggagagacgcgctattataatgacccccgctttctcagtctctggatcaaattgggacatttgtgcaatgaacctttggatatgtacagctatttacaaagccaaggaattggcgtttcccttgcccagttctatatttcatgggctgaagaatacgaagctagagaaaatttcaagaaagcggacataatatttcaggaagggattgaacgcaaggctgagcccctggacagactgcagtcccagcacagacagttccagtctcgagtgtcgcgacaagctttcttggcccttgggaatgaagaggaggaggctttggagccttctgaaccacagagaagctcgctagctgagctgaagagcagagggaagaagatggccagagcgcccatcagccgtgtcggaagtgctctgaaagctccaggtcagagcagaggattcctaaatgcagttccccagccagtacacggtaatcgcaggatcaccgtttttgatgaaaatgccgataccgcgtctagaccggagttatctaagcctgtagcccagccatggatggcaccccctgtgcccagggccaaagagaacgaacttcagccaggcccatggagcacagacaggccggtgggacgcaggcctcatgacaatccagcctctgtgacgtcgattcccagcgtgcttcccagctttacgccgtacgtggaagagagcgcccagcagacagtcatgacaccatgcaagattgagcctagtatcaaccatgttctcagcaccaggaagccagggagagaagaaggagaccccttgcagagagttcagagtcatcagcaaggctgtgaggagaagaaggagaagatgatgtactgtaaggagaagatctatgccggagttggggagttctcctttgaggagatccgagctgaagtgttccgaaagaagctgaaagaacgaagggaagccgagctgttgaccagtgcaaagaagagggaggagatgcagaagcagatcgaagagatggagaggaggctgaaggcaatgcaggctgttcagcaagaaggagctggtggccagcaagaagagaagatgcctacagaggacccagccagattgcagattgcttcggggcctcaggaaatgtcgggagttcctctgtcctgttccatctgtccactaagctcgaatcctagggaaatttcacctgctgagaacattttgcaagaacagcctgattctaaaggttccagtatgcctttctccatttttgatgagtctctttcagacaaaaaagacaaaagtcctgctacaggtggtccacaggttctcaatgcccagagaagacccctttcagttctcaaaactacagaagtgggcaccacaaatgaggatgtgtctcccgatatttgtgatgaactcacagaacttgagcctctgagtgaagacgccatcatcactggtttcaggaacgtcactctctgtcccaaccctgaggacacttgtgactttgctagagcagctcgtttggcatctactcctttccatgagatactgtcctcgaagggcatcgctgctgatcccgagggactgttgcaggaagaggatctggatgggaaggccgccgaggctcatcacactgttcatcaccaggccctcatcataaagaaactgagcccaattattgaagacagccgtgaggccacccactcatctggcttctccaggtcttcttcctcagctcccagtacatcctccatcaaaggctttcagcttctggaaaagctggagctgactaatgacggggcagaagatgctattcagtcaccctggtgttcacagtatcgcctacaactgttaaaatccctactagaattaagtgcttttgcggagttttctgtggaagaccgaccgatgcctgtgctggaaatagggaaggagattgagttaggtcctgaggattacgtcatcaagcaagagcacctaacatgtgacgattacaggttattctgggtggcaccaagaagctctgcagagctaaccatgataaaggcatcatctcagcctatcccgtgggatttttatatcaacctcaagttgaaggagcgtctgaatgaggactatgaccagctttgcagctgctgtcagtaccaagatggccatgttgtttggtaccagtatataaactgctccacccttcagaatcttctccaacacagcgaatttgttactcatgaaataatagtgttgattatttacaacctcttgacaatcgtggagaagctacacagagctgaaatagtgcacggagacttgagtccacggagtctgatcctacgaaacagaatccacgacccctatgactatgtaaataaggacgatcacgctgtgaggatcatggacttctcctacagtgttgacctgagggtgcagctggatgcgtttgcctatagtggctttcggactgcacagatcctggaaggacaaaagatcctggctaactgttcttctccctaccatgtagatctgttgggtatagcagacctagcgcacttactcctgttcaaggagcacctccatgtcttctgggatggactcctctggaaacttagccagagcacctctgagctaaaagacagtgaattgtggaataaattctttgtgcggattctgaatgccagtgacaagtccacagtgtctgttctgggggagctggcagcagaaatgggtggggcttttgatgccacattccatagccacctgaacagagccctgtggaagctggggaagacaatcagcccggaagctttgctcactcagcaagacaagcagccaggcggctcccagagccctgcctaagccatgcgaatggtgaagaactggtctggggctgctgtgatttgtttagagcacacttagacacatcagcagtccttcactaggggtcattctcagtagcacagctttcagccaggtggctgtgccctggcagcctcatctggtttattcaaaaggtttctgtgcagacagctgctttttagccctctggcttctgccttctctcttttgtaattttataacatgtactctcctttcactgtgtattttataataaaatagtttttgttac

SEQ ID NO: 653 - protein, 1066 aa, Mus musculus
HSEDKGLRKGESKYWECRMAEASEAMCLEGAEWELSKENIQPLRHGRVMSTLQGAKQESAGHTALQQQKRAFESEIRFYSGDDPLDVWDRYINWTEQNYPQGGKESNMSALVERAIEALQGETRYYNDPRFLSLWIKLGHLCNEPLDMYSYLQSQGIGVSLAQFYISWAEEYEARENFKKADIIFQEGIERKAEPLDRLQSQHRQFQSRVSRQAFLALGNEEEEALEPSEPQRSSLAELKSRGKKMARAPISRVGSALKAPGQSRGFLNAVPQPVHGNRRITVFDENADTASRPELSKPVAQPWMAPPVPRAKENELQPGPWSTDRPVGRRPHDNPASVTSIPSVLPSFTPYVEESAQQTVMTPCKIEPSINHVLSTRKPGREEGDPLQRVQSHQQGCEEKKEKMMYCKEKIYAGVGEFSFEEIRAEVFRKKLKERREAELLTSAKKREEMQKQIEEMERRLKAMQAVQQEGAGGQQEEKMPTEDPARLQIASGPQEMSGVPLSCSICPLSSNPREISPAENILQEQPDSKGSSMPFSIFDESLSDKKDKSPATGGPQVLNAQRRPLSVLKTTEVGTTNEDVSPDICDELTELEPLSEDAIITGFRNVTLCPNPEDTCDFARAARLASTPFHEILSSKGIAADPEGLLQEEDLDGKAAEAHHTVHHQALIIKKLSPIIEDSREATHSSGFSRSSSSAPSTSSIKGFQLLEKLELTNDGAEDAIQSPWCSQYRLQLLKSLLELSAFAEFSVEDRPMPVLEIGKEIELGPEDYVIKQEHLTCDDYRLFWVAPRSSAELTMIKASSQPIPWDFYINLKLKERLNEDYDQLCSCCQYQDGHVVWYQYINCSTLQNLLQHSEFVTHEIIVLIIYNLLTIVEKLHRAEIVHGDLSPRSLILRNRIHDPYDYVNKDDHAVRIMDFSYSVDLRVQLDAFAYSGFRTAQIGQKILANCSSPYHVDLLGIADLAHLLLFKEHLHVFWDGLLWKLSQSTSELKDSELWNKFFVRILNASDKSTVSVLGELAAEMGGAFDATFHSHLNRALWKLGKTISPEALLTQQDKQPGGSQSPA

SEQ ID NO: 654 - DNA, 80096 bp, Homo sapiens
catctgtggccctagctactcgggaggctgaggcaggagcatcacctgagtttgggaggtagactttgcagtgagccatgatcatgccactgcactccagcctgcgcaacagagcaagaccctgtctccaacaaaacaaaacaaaaacaaaaaaccccacaaatgctcaataaagatttgttgactgagcaactgattgactaaataaaggaataggagttgggttgtgctctctatcctaatacactgggtgaccttgggcaaataacttttctgaacctgggtacttcatctgtcaattgggagagttgcactagaacatctccaagaccccttctcgctctgacatttggtgatttttaactcccaccgtgaaccacagaactcccatttctggagttatttatttggtttgaggcattagctatccagatattctctgttaaattgtatatgcaccatatgaggacgttattcaaataagaattccatcagcatcactgaggaaaaatctctggtgttatgattagcaggtcttagagtgaattttcttgagggagtgaagcgtagagagagaagctttaatgtggataggaaagtctgaagtgagatataccgtccagttactctgggactcgttgagattgtgcaacaggagacagggagcctgagtaactggaatgtaggtgacataaggacagtggggagttatgggggcacagaaaggtgccaaagaaagtgccattcgtttgttcatgtctgtctagcagaatagctgaacatgaacgagccaggctgtgtgttgcagaggggcattggggcaggggtggagcaaaaaatcatgctttgctccaatcagggtggccagaggacctgatgggagactcctctggccaggttgtcagtgtgtggcctgcggccatctgtcttccacagtgataccccacgggacagaccttagggtccctgcatggctgaaatggaacaaaagagggaagagcctgtcactttttcatttagcctgtaccttccagacccttcctccgccacggcatgcaggggagaaagtcacacacaaggcgagtggcattcttcccaaggtgcatacttgtgcctttttgcataacctgtcatgtgcgctccccctcatagatatttttgccatgagtagaatggtattaatttattactagtcatcatcatgagtaattcacttttttgtacacctcaggtacattggatgaaccacagtctttggtctataatcctctctttttactgatccaggcctggcccatctttgtgcttctttgtgtttaattatttatttatttcaaaataatataagaaacacaaactaccacccagggctagaactaaaatatgaagcagacccacatgtacctatgtgcacctcgtccgttctatccctctatctgttatcctgctaccccacatagattattattattttatttatttgtttattttgagacagggtctcactctgtcgcccaggctggagtgcagtggtgtgatctcagctcactgcagcctcggcctcctgggttccagtggtcctcccacctcagtctcctgggcagctgggactacaggtgcatgccatcatctccagctatttttttagtttttgtagggattgggtttcgccatatttcccaggctggtcttgacctcctggacacaagcaatccacctgcctcaacttcccaaagtgctggaattacaggcatgagccaccacacccagcctaggttttttttttttttttttttgaggcagagtcttgctctgttgctgaggcaggagtgcactggcctgatttctgctcactgcaacctctgctgaatcctccacctcctggctgggttcaagtgattctcctgcctcagcctcccaagtaactgggactacgggcgcgtgccaccatgcccggctaattgttgttgttgtgttttgtttttggttttttttttagacggagttttgctcttgttgcccaggctggagtgcaatggtgcgatctgggctcaccacaacctccacctcccaggttcaagtgattctcctgcctcagcctccctggtagctgggattacaggcatgcgccaccgcacccaactaattttgtattttttgtagagacagggtttctccatgttggtcaggctggtctcgaactcccaacgtcaggtgatccacctgcctcagcctcccaaagtgctgggattgcaggcctgagccaccacgcccggccaatttttgtatttttttttcttttttttttttagagggagtctcactctgttgcccaggctggaatgcagtggcgtcatctcagctcactgcaggttccgtctcctgggttctcgccattctcctccctcagcctcccgagttgctgggaccacaggcgcccaccaccatgcctggctaattttttgtatttttagtagagacggggtttcaccgtgttagccaggatggtctcgatctcctgacctcgtgatctgcctgcctcggcctcctaaagtgctgggattacaggcgtgagccctcgcacctggcccaatttttgtatttttaatagagacggggtttcgccatgttgcccaggctggtctcgaactcctgagctcaagtgatccacctgcctcggcatgccaaagtgctgggattacaggcgttagccactgagcctggccatcagcctagattatttaaaaattttgatctcggccgggcgtggcgggtgacgcctgtaatcccagcactttgggaggccgaggcgggcagatcgtgaggtcaggagatcgagaccatcctggctaacacgatgaaaccccgtctatactaaaaatacaaaaaattagccgggcatggtgtcgggcgcctgtagtctcagctactcaggaggctgaggcaggagaatggcatgaacccgggaggcagaactttcagtgagattgcgccactgcactgcagcctgggcaacagagtgagactctgtcccaaataaataaataaataaataaataaaaatactgatctcttaaactgtgtgagctatgagaccgtgagcctgtgtgaggcttgtgaaggatcacacctactaccacagtttattcaccaggacctgagccagtgcttctaagtcctaactggctgaatttgcttatgcctagagggaccagaacctcagtcaatgacacatgttcacagccttgtggctggagtccccaacttgcagtgaagtaagattgtccacaaatgtatttcacattgttttgaaatttcacctaagctagggtgtctcaatttcggcattactgacacattgggctggggaattctttgttgtgaggggctgccctgacccttgtagaatgtttaacagaataactggcctctgcccagtagatgccagtagcactcccagttcaaccaattctgcagataaagtttccccaaaagacaatgcccctccataaaagaaaatacaagcacatttgtattgtggggcctagctacataacctgtgggcctcaaactagcagcctgaaggatgcctggaaggtcattagaaacggagaatctcaggccccactcagacctagaaatcaggatctgcctttcagcaagatccccgggtgattcatctacacaatcaagtttgagaatcacattcatggagtttatacaaaccgcacatctgtgtgtgactagagtgggcccagctgtgtttctcaagggtgggagggggattactgccattttgggtgggacaatgcattgttgtgtgggattgtcccatgctttgtgggacagactatcccatccccattaaatgttcacaatgctccccagtgcccaagacaagtagacattccctctaagactcttggtggagtagagctgccctgaggtgtgaactctggaagaggagagtccctccactcttaagaccttggatgaatgcaatttgcctgacaataggactgcctgtctacagatgggtctgggaggaaaggaaagatgcagaagttaaaacatcacagtgctcttcatcacggcttcaaggggttaggggcttgctaggaagtgccaggtgataagtactggccaaaggggagccagggccatgagcctggcatatcccaggcaatgtccaagctaggagcattgaggagtggaacagaggagatataggagccctccgggagaagcaggaattacaaagtgctgcccaaccagtcagaccagctgggccggttccccctgagtcctggcagccttaacgggctcattagaataaagccaatgattgaaaacagtttggcatcccagagcgtgtctggggagaggaaggaaatgcatacaggtgggtgaggtgcccattctgtgccccacccccttctcacctgcaggcccttcccagaagtgggaggaataggtggttccacagctgggaaacttgagagctcagtgggataagcccctgctttgacaatgcagctggatgcccgccctgggctcaaaactgaaggggctgggtttgctccccacctgctgcttgtcaggcacagtgagtcagggtctcatttcaggtcctcacaactctcctaggctcctgccattgcaaccacctgcacttccccagatgccgaatgcactctcactctcctgcctcctagtccttcctgtgctattctctccacctggaaagccccttctctctttttagtaactcctactcatttttaaagacccctcttggcagcaatcccaacctccctttctcttgttctctcagcccccatgcttgggtgtgggagggcccccatcctctttcaagttcccctaactccaggctcctgctggggctatagctcataagctgttatatcatagattgttttgtttttcttgagcataagactggtgcttttttcatatttatatctctggtgcctggcacagcacccgacacaaaatattcaagaaatgtttgtcaaatgaatggtggacatcctagagtgcttggtccaacaaggtcatgtgctagctattctcttttgttcattactgtcaatcagtcagttaaccagtattgattgagtacctgcctcgggccaggtcctagggatgaagagttagaacccatattctcatagcttttctacaccagtgaagaaaacaaggctaactggagcctttgactgctagaaagaggtcaactggtccaatatctttgtttaccactgaggaggaaggcgcagcctgtgggtagacggatgggcctctctcatgctcgtctgtgtagtggggtcttcctcatgtcagctgccataggtaactcatattcattgttgggagtctgttccaggcacacatcccacagctggcagtagtcagcctctcaaatgccacatcttcctcattgacaacaaagggaaccagagctagcaagaaaaaaaaaagccttttctcttggaatgcccactgccttctatagctgtgttaggccatttttgcattgctctcaagaaatacctgaggctgggtaatttataaagaaaagaggtttaattagctagagattctgcaggctgcacaggaagcatggcgccagcatctgcttggcttctggtgacggaggccacaaggagcttttacttctggtggaagatgaagaaggagcaagagagagaaaggggcgtaccacatacttttaacgaccagatctcaggtgaactcagaatgagaactcaccattcaccaaggggatggtactaagacattcataagggatctgccccaggatccaaacaccttccttcaggccccatctccaacaatggagaagcctctttctatgcgagatttggagaggacaaacatccaaaccatgtcaatagctccttacaaagggtttggacggaaaactagaaataggctcagatagatccagagaggtttgcagccctccatgccatctttggctgttaggagatgatgtttctaactctgcttgtctggattctgttctccctgctttagcttgggagcccgtgttggaagaaaggcactgaaatgcctcagagcaacaagtgtcaaagacctacatggagagcggaagcttgtggttgtcttggctcaagaggctggggttggccaggcacgatggctcatgcctgtaatccctgcactttgggaggtcgaggcaggcagatcacctgaggtcaggagttcaagaccagtctggccaacatggtgaaacccagtctctactaaaaatacaaaaattagccaggcgcctatagtcccagctacatgggaggatgaggcaggaagatcgcttgaacctgggaggtggaggttgcagtgagcagagattgtgccactgcacttcagcctgggtgagagagtgagactgcatctcaaaaaagaggctggggttctcatctttggtatgttcaatcatcccagaggtgagcctgaaattctaaaacataaagagttcctccaaagttgctctgggcgggtcccaaattcaagtttcccactggccctcagtctcctaaggttgttttaaagggagaatgttggccaattctgactgggacccacacctccaggtaaaactttaaaaggacagcctttagagaagaaggcagagatgggaaagaggtaaaacagctgtcacctctcttaattctaacaatcttctcgcatctagctgtagccaacttagttcccacattcagcgaagttaagttgtttccaatcatttggcccctcccagcctgggggcctctgacctctggcctttctttggaaaagcaatgcagagtccagatctgcaggagtagctcccagctgggcccccgagaagggaagaagcaaactttccacagtttgcaccaagacccaggaggcaatgtcagagaggaagtgaggaagcctgcctggcagaaaagcaatggcggctcagacatatccacccacagacactccattctcctgcaagtgtccccacaatggattggctctgccaggagccatccctacccccattcagctatcttagaattgtcacctcctgaaataaggacagaacattatgtaacccatttcctcaggcctcagagctatggagtcacatgcactagtcaggagaatcccattggctcttccatagggccccagggccgctgcacacagggctttgtgtgaattagagagaggaggcctctctgggcacttttgaaggtgccttctctgagtagaaaaagcagaaaaatgtccccatttgcgtgacaggcactctcggatgcagcaatatttatgcaactgtatgtgtggcactgaatgagtccctccttttgaagccttccctaggtggtctgggtgttttcagagcatctgccatgttcctcctgtcctgctcaagctctctctggttgatggcctctgtctccaaggctactggaggacatcttgcttctgctggtgtccactgtggggtgctgatgtctggctccagggagggcctccctgtgctctcagaatggccaagtgaggctgtgccctcggcgcctgggcacgaaggcagtgctgttggaggctggcatcacactgaaccagctttttttttttcctttttagagacagtctcactctgttgcccaggctggagtgcagtggcatgatcacagctcactgcaacccccgcatcccgggttcaagcgattctcctgcctcagcctccggagtagctgggattacaggcatgcaccaccacacccagctaatttttgtatttttagtaggacggggtttcaccatgttggccaggctagtcttgaactcctgaccttaagtgatccgcccgcctcagccttccaaagtacatagaaccagctcttaaggccactgcctcaggccctcactccacaaaaccgtaagtccttgggaccaggccaacaaagggtcacaatccaaggtggatatcctgtgccccactcactccagttcccccaagtccacagacaaaccctgctgctttcagcattcctcttcctcaaaggcaaaccttgcttgctgggagctccacccatcagttcatgggacatccctaaaaactcattttccaaattaaaccacagagtaccttctgtcatacattttggagttttgttttacctacctccttcttttcccgtagtgaaacaagcaaggggtttagcctgaatgcattctacatcgtagcagagtttatggggaatccgactaggttataggaaagactgagatcaaaagaccaaacgctacgtttccaagattgtttgtaggaaatagtcaaaattgagaagctgtagatatgaacaggacaccctgttgaaagaaaatgaagtgctaggccagtactgacataaggtaagagataaaatgagccagtgagagaatcccacgcaccacacctcatatgatccaggaaagcttcctggatgtggaggactttgatgtaaagagtaaccaaaatttcctatgaggaatcaccccttcccctctctcagtcccaaggtgaaacacatgacttggttctgaacaatcaaagccctgaatccactatccccagtgactgtttgggaggaaggggttaagcagggtgactcctaagtctgaatttgaacctgtaaggataaagtcgtgaatctgttacccaatggagaatgacaataaaccaacaacaagagtagaggcgagaaatggagagaggcccagtccacatgagtcctgggttaagctttatctgaagtcttttatatataaaagacagtaaattcccttttctgagtaggccgatttaagttggatttctacttctttggaatcaagagtcctgatgattcagaggaaagaaggacttatataacatgaacaaagacagaaagctgggaactaagaaccagagggtagtggacagtatcctcagcatctgcctctgggaagtgccacctctctgaccatccccacagtcataaaggagaactcccctgtacctgggctttcttaaatgaccctgttccttcctcaaggtggctaatgcctgtaatcgcagctactgcggaggctgaggtgggaggatcacttgaccccgggagttggaggctggaatgcagtagccccatgatggggctactgcactccagcctgggcaacagagcaagaagaagaccctgtctctaaaacaaaaccaaccaaccaaacaaacaaaaagactctactcccctggtcacatctgagctatcacaatttcttcctcagaaaattgaaattgcaacaaacagtttaatgtcagtcaaggctagtcccctgaaggggaaaagaggtaacaccttgggaaccatagcatggctgtgtttactgcttgtggactgagcagaagagaaagcaagacagtatcatcactttatagatgaggaaaactgatggtcagaaagattatgtagcttgcctaaggttgcacatttggtatgattttacagaactagaatccagctttttgaattcaagggtggggcaggaaacagctaggtcagtggcctaagaactccggacgggtgagatttggggcagacagcaggggtagtcaccctacaagagtcacgccaagtgcaagcactcagagacatctcccaacactcaaaacagcaaagaagttctggtgctttaagtgttcctcgctcggctcagagactcggcttcgagccgcgactcaagacagcacctgggggtatttgttttgcctaagcctgctgcacttccacggccattgaatcccaaaaactacaattcccattatgcaccgcgagttcgcggactaaacaggcataaactacaagccccagaatgccttgggcgagacgcgagagcacggaggagcggaggggcgtggccacgtcgaccgcgcgggaccgttaaatttgaaacttggcggctaggggtgtgggcttgaggtggccggtttgttagggagtcgtgtgcgtgccttggtcgcttctgtagctccgagggcaggttgcggaagaaagcccaggcggtctgtggcccagaggaaaggcctgcagcaggacgaggacctgagccaggaatgcaggatggcggcggtgaagaaggaagggggtgctctgaggtaggtacgggagaaagctgctgggggctgggcctgagaggacacggcctggtaggtaatagaaggctccgctcggagcagtcgagggggagatcggcaccgtcagaacagaccccaccggagcctccttccttttggagtagaatgccggaggtggaggtgaaaacgcagtggactgagggcacgtgcgaatcctgccgcatccagcttcaaagcgaagaaggctgcgggaccccagcggaacaaagagtttggaagttgcaatgttgtctgtttgtaactcagctcagccacctgctagttgtttgaccttgggcaaatcgtttgtatggaaaatgctgatgttaatgctgccttacgtggttctgggggaattcaaagtatttgttaagtaactgcttccaaataagcgctcaacaaatggcaggtgctatgccaatagcacagagatctgaaagcctttagccaatatcatagagatctaaattatgccaataacatagagatctaaaagcctttttctgcatgtttgcggcttttccttgtattaaaaaaactatattgcagttctaggttggaaatctgtatgtgttttcactgtggtgcccgcaatacctagataagtgctatgtcatgggctctttcattcatgtaacaagtatttttttggctaagctctgagtgcagcaaatatacagacacaaaaatctcaaccctcatgaagcttaagttctggcatgggatgaaggtgggggagtcagacaataaagacaaactgttaggtggagatgtggtcagtactaaaaaaaataataaagcaactgggtgtagtgaatattgggggtggggattggtgcaatttaacttgaacactggagtctcactgaggagatgtcactttggtcaagacttgaaggaatctcaaaagctagaggttctatatctgaggagagtacaaaggctgagggtgagagctaggggaggaagttgcacctggcatgtccaaggccattgtcactggagcagaattaactagaagagtaaaaggatattatgtaaaaatggtgaagatgcagattgtaaggacttagcttttactctagttgtaatcaaaagtcattggaaggttttgagcaaaggaaagacataatctgacttgggtttaaatggggtcactttggctgtagtgttgaatacactaaaggcagcaaaggatggaagcaagggacaccagttaagaggttattgaaataattcagctcaaaagtgagttgagccaggtggaaaacagtggagatgatgataagtggttgatttctgtatatattttgaaggtagaaccagtaggacttgctgactgactgaggggtatgagaagggcatcaaagttggcactaagatttttggcttgggtaactgaagaatgggattgccatttatttgagaaagaggaagactgtgggaggagcaggtctgggaggaagtgggggcagtcttagctcaatttgggatatttaactgagatagtgtaattcactatttttaagagcaagagaagaaagttcagatgaattcaacaaacagggcataatagtgttatatctcgtattagatcatgggcatacaaaaataaatggcatagcccttacctttacagagttcacacaatatagagcaggtcctggtataacatcgtttcgttataatgttgatgagaaaaaaaatcaattcattgcggggctgctgtgtatgtggagttttcatgttttccgcatgtctgcatgggtttccttaggtactccagtttccttctacatcccaaagatgtgcctgttaattggcgtgtctaaatgatcccagtctgaatgggtgtgaatgtgatgctccctgtgatggagtggtgtcctgtccagggttggttcctctctgagttgctgagatgggctctggccaccctcaaccccgaactagaataagtgagttggaaaatgaatgaaggaatgaatacaaattactgtaaaataaaaatctgtaaaggctgggagcggtggctcacacctgtaatcccagcacttcgggaggctgaggcaacaggattgcttaagctcagcggttcaagaccagcctgggcaacatagtaaggcctgtctctatttaaaaagtttatataaagtgtgtatgataatcatataaatgcatgacaataaacaatgccttatgaaagtgcccagcatgcccactatagtgttactatttgttttttgaactttgtggtggtaggaggtacttcttgaaattttcactctcaaacatttattccttgagttaacccaccaacactatgactgcagtcattcactgattcgccaaaaattgggtaaatgattattttttgttttcattaaatgttcttaagtgtacggatagctcacatttagttcaatatttagtattaaaaatgtttgtttcgagtctttattcagaagtttggtgacgtttttgtgaccagaaatatgccataggaacttaacttttgtttatgtcgatcagcctgtggtaaaattggttttgttacatgtcattttgattaaagtcatagtttccaagaagctgtctccaacgagttttcagtgctcatctagactgaagtcacatataactttcactctatttcaaagattagtgccaatgtgtctctctttttgttttaagtccagaggtaatgtctcttagaaatagtcttctatctaaccattgcagggctctgaattgcagaatacgtaatgggaattacctccaaaacgtttcgggggttttctcagtaggcttgctagaattgggtgtgaggatgcagggaattgtgactagtaaactgtgtttgtttgcttctgcttttagctacttatatgtacaaacttcagttttgaatcatcattgaaacatgggacattagtctcacccacactttgctaattttaatgttttttttttgagacagggtcttgctctgttgcccaggctgcagtgcagtggtgtgatcatggctcactgcagcttcgacccctgaacccaagcaatgctcccacctcagtcttctaagtagccacgaccatgggcgtgtaccaccacgcctggctaatttttcactttttgtagagatgggggtcttcctatgttgcccagggtggtgttgaactcctgggctcaagcacttctcctgactcagcctcccaaagtggtaggattacaggcatgagctaccacatccggcactaattttaaattaaactagatgatgcattcaatggtaggcatagaattacttgttgcctttttgtctactttgccaaatttataacacttttgttcccttcttttctttctgccttaagccctattcatttttctttttttttttttttttaaagaaagaggcagggtcttgctatgttgcccaggctggtatcaaactcctggctcaagaaatcctcccacttcggcctcacaaagtggtgggattacaggtgtgagccaccgcacatagccatgccctattcttatagtactgtctacgatatccttgccaagttgtcttctatcaggcaatactgtagccataaacttgaaaaacagctaacaaagaagcttaggcatataataataataataattatgtgtcagtccactatattcaacccaagaccatgaataatcacctttcggaagacatttacaataatctagtgctataatagtcaatgttggtatgagatttacatttgtttccttcttcacagtgaagccatgtccctggagggagatgaatgggaactgagtaaagaaaatgtacaacctttaaggcaagggcggatcatgtccacgcttcagggagcactggcacaagaatctgcctgtaacaatactcttcagcagcagaaacggtgtgtagaatggctgagtctcaacctgtcgtcattcatcctaaatgttgtagataacgtgggtgtggatccatgagagatggcataatgagtacttttcaaaaattggtagtatgagaatctgttctctacctgctttcgtatcacatgacagctatctgaagatgtcctcaggtataattaagaacaagggctataggatttcatttcactgtggtgcagcgaaactctttttatcaatagaaatacattttatacagggggcagtgataagcatagtaaagcaagtattatattgcaatgcttcccaaaagtattatgttaggaacttatttttgagagtatgacaaaaaaagaagtggtctccaaagacatgtaaacctcagaacaattgaatttataccagaaagttctcaataattttaacaaactctggataaataaaagctgaaaaatactcttatgttattcaaatggacctgtggatctcctttaactaatacatgttttgataaatatgctttttaaaaaaaaaggtaaatcagagtatcagtttctaccttcaatctctgacaaaaagaaatactgccattactggcaaaatatcataatttgggattataatgcaatgactattcttattcatctctttggattttttttttttttttaatatgacagggtctccctctatcacccaggttggagtacagtggcctgatttcagctcactgcaacctctgcctcccggttttaagtgattctcccacctcagcctcccaaatagctgggattacaggcgtgcgccgccacgcctgggtaatttttgtatttttagtagagatgggtccttgccatgttggctgtgctggtcttgaactcctgagctcaagtgatccgcccaccttggcatcccaaagtgctgggattacaggcgtaagctaccgcactcagcctcattcatcatattttttcatgttacatgcatcagtagattgctctttttattgctgaataggatttcatttatttattcaccaattgatgaatatttagattcttccagttttgtgctttataaataatgttgctatggacattcttgaacaaggctttttgtagacataattttctctctctctcttttttttttttcttttagagacggagtctcgctctttcggccaggctggagtgcagtggcacgatcttggctcactggaagctctgcctcctgggttcacgccaatctcctgcctcagcctcctgagtagctgggactacaggtgcctgccaccacgcccagctaattttttctattttttagtagagacggggtttcaccgtgttagccaggatggtctcgatctcctgaccttgtgatccacccgcctcagcctcccaaagtgttgggattacaggcgtgagccaccgcgcccagcagtagacataattttcatttcccttggagtggaattgttggaccatagaatagatgtatgtttaactgttgaagaaactggtttaccaaggaggttgtgacattttacatttctaccagcaactcatgagagttcatttgtaccaaatccactccagtatttggtgttgtcgatctttttcgttttagccattctagttttgtggagttgtgtctcattactttgcatttccctggtgactaataatggtgaacgttttttcacatgctttttggccttttgtatatcttcttttgtggtgtatctgtttagatattttgcccagttttcaaattgtgttgtaggggttctttatttacttttcccaggagtatagattcaagtttccctgattcaagtttcaggagcatagattcaagattccctgaatctatgctcctcagtaggggttctttataaagtctctatactagtcttttatcaaatatatgtgttgcaaattttttttccctcacccatggctgtttattttctgggtgtttttttttttttaaactgcttagttttaaattttgatgaagttcaattaattagtatttttcttttatggttagcattttttgtgtcctcttcaggagacttttgcctaccccaaagtgacaaagttactctcttatgttttcttttactagcttcattttagctttttttttttttttttttttttttgagacggagtgttgctcttgttgcccaggctggagcgcaatctcagctcactgcaacctccgcctcccgggttcaagtgattctcctgcctcagcctcctgagtagctgggattacaggcacgcaccaccacgcctggctaattttttgtatttttagtagagatggggtttccccatggccaggctggtcttgaacttctgacctcaggtgatccgcccgcctcggcctcccagagtgctgggattacgggcatgagccactgcgtccagccaagcattattttagcttttatgtttaggtgtatgatttttcttaaatttttccttgtatatggtgtggggttggagtaaacaagtttttttcctctcatatgggttatctttctagttgttctgcctcatttgttagatttttttttttcctttcctcactgaattgcgttggggcccttttcaaaaatcatttgaccacatatgtgtgggttatttctggactctatattctgttccattgatcaaattgtctgtcctttcaccaataaaatacactgttttgattagttttacatagcaagtccagcagagtgagttctacagcttttgttcttttcaaaattgctttagttattcttggtcctttgcctttgcaaacaaattttgaaatcatcttgtcaatttctagaaaagagcctactgaaaaagaaaaaaaaaaaaaaaggctgggcacggtggctcaagcctgtaatcccagcactttaggaggccgaggcaggcggatcacctgaggtgaggagtttaagaccagcctgaccaacatggagaaaccctgtctcaactaaaaatacaaaattagccgggcgtggtggcgcatgcctgtaatcccagctactcgggaggctgaggtaggagaatcacttgaacctaggaggtggaggttgcagtgagccgagattgtgccattgcactctagcctgggtagcaacagcgaaattccgtctcaaaaaaaaaagaaaaggaaaaagagaaaagaaaagagcctactgggattttgattacattggtttgaatctatagatcaattggtaggattgctgatttttatcagtagtgccttagattttattgttttaccatttctgcagataatctcattatttcacactttaattgccatattagcctcataactgtggtcccttcttctaatgcctggctatccttataaagttgcttgattaatctttctgaaatcttatatttaagatgccctccaattaaagaaccaatagtggctggagtagatggaatccaaagtctttaaatttacatttaaagcatgtgcttcttacttctccaggggtctccatttgctctcggtactgactttatgttatagcttagggttcactcaccttcctttggatgagctcttccaccttcgtaattttattcaatattagtttccctctgtcttgaaaaaactgtttttctttcaaattccatggttctttcagagtctcaccttctgaggctgcttctgtgatacctccttttgacttaaagcctttactatccattcttggcaactgtaatttagtatcctgctttgtattactagttcatttttcatttgtgtactttgtttttcttattagagtataaattcccatgtgtcagggactaattatttttagatcaaacataactgcttatccaatttttattaatcattatccaaattctggcttattacctaattcttcccctctattctaactggtcagtcttaatttggtcttagccctctgcctttcccagctttttatagtcatattttaccctttttttgaggtattctccaaattatttatagtattattcttctctgaccaatgttacccatggaagttttttttgaactttaaaattcttatttatatatttgttcatgtgtgtaaaccctttacatttaagactagtcaacctaataagaaagtactattattatccccattttacaaatgaggaaactgaaaacagagttttaagtagcttgtccgtgttactcagcttgtgattggtggagctgaatttgaatctaggttgtcttgttccagagttcttaactgctgtgtagtattaatactacttttctgtatgttgtcttgaaatttgtttctctaatttctatatattttctctctcttcttatgttaagtagaatcttaattatttctattcttttttttttttttttttttttgagacagagtcttgctttgttgcccaggctggagtgcagtgctgcaatctctgctcactgcagcctctacttccaggttcaagtgctcttcccacctcagcctcccgagtagctgggattacaggtgcttggcaccacacccagctaatttttgtgtttttagtagagatgaggtttcaccatgttgcccaggctggtctcaaacttctaacctcaagtgatccaccccacttggcctcccaaagtgtcgggattacaggcatcagccaccatgcctggcctttttctattctataacaaacccataaactctagtgcaataatttagatcaatattacctacttattacatgaataaaaatggaagtgatacttgttcattggctgttgtcactattgcatatgctaactttttctgtttacatttcagggcatttgaatatgaaattcgattttacactggaaatgaccctctggatgtttgggataggtgggtctttttatttcacaaggacaatagaaacattaacagataagtccttatggccatgtttctcaaattggggtatatggagtgtgtgtcagagtagacagtggtgtcctgggggcacagagatccagaataatcataatatatcttcctgaggtgtttaagattcaagaaatttcaagtttatgatgtacaactttgaactacacccttctatccctatcctcagttttccccagaagcatgtactagagatactttggagaagtttgagggatacaggcttagggtatgtcattgaggacctcaaaagaaacatactttacttctgctaaaatccagaatgggtcttggagcaagaacaaaagtacatgttcaatttaaaatgtgttcttatctttttcctcccatttaggtatatcagctggacagagcagaactatcctcaaggtgggaaggagagtaatatgtcaacgttattagaaagagctgtagaagcactacaaggagaaaaacgatattatagtgatcctcgatttctcaatctctggcttaaattagtaagtctttctcaagtgccatctgagttttaaatattaaactaagagattttctctagaggtatctggtataccaaaaaaaaagtaaaacagccattttgaaccatttagtagattggaaacatttaataaatatgcaatacttcttaaattggttctacttaaaggtggacttaaatatagtataataaggtattttcgcccttttaagattgatcgcaaagtctgtagatctctcagtgagtatggattaataatttattttatattttgaaacaaggtctcactctgtcacccaggctggagtgcagtggctccatcatggctcactgcagtctaaacctcctgggctcaagcaatcctctcgcctcagcctcgtgagtagctgggactacaggtgctgtgccattacgtccagctaattttttaatttttaatagagatgacttctctctctgttacccaggctggtcttgaactcctgagctcaagccatcctcccaccttggcctcccaaagtgctgggattataggcgtgagccaacacccctagtccggattacttatttatttattctaaacataactgggtgcagtgtttcatgtctgtagtcccaacactttgagaggctgaggtgggctgatcgcttcagcccaggagttcaagactagtcagggcaaaattggtgagaccccatctcataaagtacagaaattaaccaggtgtggtggcacagcacctgtagtcccagctactcaggaggctgaggtgggagggtcgcttgagcccgggacgtccagactacagtgagctgagattgcaccactgtccgccagcccaagtgacagagcaagatcctgtctcaaaaaaacaaccaaaacagaaaaacataattgggccattcaactgtactggaggaggaggtgcaggagctaacatttggcagcagtgtggttgtttggggaaaaacttccctctgtgattctggtatccctttcactcctttatgaaagtcatcaacacaaagaagtgatattttagttttttattggtctttggacttttttcacctagtatattgctacagccaaaaatgtctgcctcagctgggcatggtggctcatgcctgtaatcccagcactactttgtactgtcttacttgacatgtaggaaaaacatattttttattaaaaaaatgaccaccgtttgttagacattaatattactgcttttattctaaaataaatttaaaaaaataaacaataaatatttggaattatttacaaccaccacaatatgatgaaatattgacattaaaactgataagatttcttactaaaataaatctcttggcattaaaactgataagatttcttaataaaataaagtaagaaataaatttcttactaaaataaagaaataaatttcttactaaaataaagtaataaagtaagaaataaatttcttactaaaagtaataaagtaagaaataaatttcttactaaaataaagtaataaagtaagaaataaatttcttactaaaataaagtaataaagtaagaaataaatttcttactaaagtcttaaggaggactgattttaaacttccaatacagttgacccttgaacaacacagggcttaggtgtgcccacccctcacccagttgaaagtctgcatataacttttggcccccaaaattattaatagcctactgttgaccagacgccttaccaataacataaagttgatgaacacatagtttgtatgccatatgtattatatctttttttttacaacaatcttagctagagaaaagaaaatgttattaagaaaattataaggaagagaatgtatatttaatagtcattaagtggatgattgtaaagatcttcatcctcgtcttcacattgagtaggctgcggaggaagaaaacgggttcgtcttgctgtctcacgggtggcagagatggaagaaaatctgtatatgtgaacctatgcagttcagacctgtgttgttcaagggtcaactgtagttacaagtatagaaaattaggtaaatcctgaagccatgaggtatcttgatttcctcaggacattcgacaaatatttttacatccttagtgaaaggttggagaaattaccctatggatattagttacagaaacttataatgaagaatggcacccaaagaatgctaaacagatttgttagcctggagtctgtggaccctggtggtgtaacaatggattttgtccttcatttgtcactagcctaaataatatctttacatgtaatttattataagattggagactgggtgtggtggctcccacctgtaatcccagcactttgggaggccaaggtaagtgtatcatctgaggttaggagttcgagaccaacctggccaacatggtgaaacctcatctctactaaaaatacaaaaaatgcaaaaattagccgcacgtggtggtgcgcacatgtaatcccagttactcgggaggctgaggcaggagaatcgcttgaacccaggagacagaggttgcatgaactgagatcatgccactgtactccagcctgggcgacagagcgagactcagtctcagaaaaaaagataaaaaaaaaaaaaaaaaaaaaagattggactagctgcacctctaaagtgacttttaatcccaggattctatgattatatttaattggagttgttaaaagtaacaattaattagaataatttatctgtttatttttgataacctggtgcttgtactgaagaagaataatatcatgaagtaaaaagcataatctagatcagtgctactgaaagaagggtttgcatactgtttgagataagttcaaaaattgaaagtgagcttttggaaactttggtaacaatttgatattgccgggacatccaagcacatcatcattctttgagtaacttctgtttttattgtactttatatcagtccataatggaacacacacatacacacaataaaactggccccttcgccacagattttttgagaagcacgggtatagacaaccatcaaattcaaatgatcagcactagaatgatcagcaataatctgaactttgtatgtggctaacgaggtacatattaaactattgctttttctttgtgggtctggtcaagaggagtaacagatgaattcttcacactactttctttcgctttgcagaaggatttctccagtcagttattttatgtgactcctacagtctagctaaggaaaaaattgtttctggaaaacttctggtatttttatttaaaggtataaaattattttagtttggcaatttaagggttaccaaaaaaaaggtttatttaacttttagatctattaatctaaccatatagtccttttatttatgttatttcttaagtgatcttattcagcactctgaataacctgatctttactggctgtcccacgcacaagaacaccagaaccattcagaaagctctcaaaatagtgaaatcaatgttaagctatatttatgtagtgacagatatcaaagactggatcttatgctggtagcacattcagagttataacttttcttgaaacaccaccacatatgagaaaacatcactaatttaaataagcaagaaaaatccatttactgaattactgcaaaattaaactataaaatactaattatttttgttaaagatataaataaaacattccatttatttagcatttgttgtactagaccatgattaagggctggcatatcatagcaatgtcttctgagtttgtagagcttagtttatctgaaagacaaatatgaagccattaattgtaactgtaacagagagaaaattacgagttctataggaacaaatacaagacggacttaacctgggctagacaattaggaacagataaataggagatatttggtaaagtaacaaatggtagcttctctagtagtaacagaactcctaactagaacattgaaatgctatttttgaccaggcatggtggctcacacctgtaatcccagcactttgggaggccgaggtgggtggatcaccaggtcaagagatggagaccatcctggccaatatggtgaaaccccatctctactaaaaatacaaaaattagccagccgtggtggcgggcgcctatagtcccagctactcgggaggctgaggcaggaggatcacttgaacctgggaggcggaagttgcagtgaggcgagatcgcgccgctgcactccagcctgggcgacagagtgagactctgtctcaaaaaaaaggaaaaaaaatgctatttttatgtgaatttagggattgtttttaatagcttctaatgctgattagagtctggtggaatgagtatttttgcgaattattaaattttagcattaacaatttttacaaccttctcagaaagcaatttgttaccttttaacatagttctaggaatttctcttaagggaataatgtaaaatgtgaaaggttgtatgcatgaagttattttttatagaattatttataattgggcaaaattagaagttgtttaaatatccagaagtagatgaacaattaaattatggaagctctattagatgaaacatgatgcattcatttaaaaataatagtgaaaagaattcgaggttgcagtgagctatgattgcgtcactgcagtccagcctgggcaacagagcaagaccttgtctgtagaaataaaaaaaaattaaaaataatggttaagtgtaagcagcagcgtggaaaagtgaatgatgcagtattatagtggaataaaagcaaattttattatgatcaaaactttataagataatacatatcctttcatccttaagggaaaaaagactgaaaaaatttatcaaaatgtttgtgatgtgaggtttttagtgatattttcctccctcttgctaatagaattatctacattgtatatggtctcataatgtcccttctaaaacacagatttgactatgtcattcctttgcttatcgctcacccaccctaacacatacaacaattactattaggcagattcaaaattgattagcttgatattcaagacctatcacagcctttttctccagacaactatctagcctggacccctacataacttttaattttctgtatctttgcttatgctattttctctggctgaaatacccttcccttcccattttccacctgataaaagtccatttctccttcagggctaagctcaaatgttaaccccttcctcccccctttttttaattttctttagagacagggtctcactctgtcacccaggctagaatgcagtggcaccatcatagttcactgcagcctcaaactcttgggctcaagtgattctcctgccccagcctcctgggtagctaggactacaggcgccttccaccatgcccagctaaagttttaaattttgttgtagagacagggtcttgttatgttgcccaggcttgtctcaaactcctaacctcaagcgatcctcctactcctacctcggcctcacaaagtgctgtaattacaggcagaagcgactgcacctggcttattactccttcttgaagcctttactctccaactcttcttacaaatcgctcagttttgcctcttttttaggtcctcccagtatggtccttatcacattgtaataatagatttttttttcaatacaggaattgcatgtagtatctccagtgattgtttggcaactaataggcattcaatacgtgagtagaaattggttaactgttaacacttctgttacaggggcgtttatgcaatgagcctttggatatgtacagttacttgcacaaccaagggattggtgtttcacttgctcagttctatatctcatgggcagaagaatatgaagctagagaaaactttaggaaagcagatgcgatatttcaggaagggattcaacagaaggctgaaccactagaaagactacagtcccagcaccggtaaactttctttggagcttgtcttaactctaaaaataatagaaataaattatctcttttttgcatctgaataaagtgctttctggtggattggcatgttaagtttacttagttactattcaatttttttaaagatatattttaaaaattttatttatcatagagtaaaatccactctttggtatatggtactaggagtaaaaagacttgtgatcatcatcattaacaagatacagaataatttcacaccccccaaaagaattccctttgtaattagtacctatgctgaacccaaacccctggcaaacactgatttattctccagcctgtggttttgccttttccagactgccatataaatggaatcgtataatatatagccttttgagtttggcctgtttgatttagcataatgcatttgagttgtaaaagttctttatagattgtaagtataagcctttgtcagatatgtgatttgaaaatattttctctcagcttaagcctggtctgttcattttcttaactgtcttttttagaacagaagtttttaattttaaagaagtctaatttacaagtttttcttgtatggatcgtgcttttgatgttgtgtctgagaattttttgtctagccaaagattgttacagagattttcatcttcaagttttcatcttcaagttttataatttcactttttacatttagatccctgatccattttgagttaatttttgtagaggatagaggttaaggttcttttttagcatattaatgttcatttgttccaatgccaattgttgaaaagactaacctttctccattgaattgcctttataccttgatttttaaaaaatcagttgatcatattcatgtaggtttatttctattattctattttttctaccgatgtacgtgtctatccattagtgtttaccatgctatctagattactataccttttatagtaagtctagaaatcagataaaatgagtcctctaactttattcttatatttaactctggtagttcatttgactttctatataagttttagaatcagctttctgggattttgattaggattatacaggaatatggtataattctccatttatttaggcttttttttttttaagtaaactttggtagatttttgtctttcaaggaattgatccattcatccaagttaatgagtttgtgggcatagagttgttcataatattcccttattatgcttttaatgtctgtaggttatatagtgattctccctttctcctgatactggtaatttatgtcttctcagtctggcttggatatcaattttactgattgttttagaaaaccagcttttgggttcatttcattgattttttttttttttctcttaatgattttctgttcttaattttatttctgcactttatttcttcccgcttgctttggatataacttgctcttctttttgtagtttaaggtgaaagcctagatcactgattctagacctttctctttttctaatataagcatttaatgctctaaattcccttctaagcactgctttagttgtatcccacaagttgtgatatactgtattttcattttaatttagttcaaaatattttctagcttaccccgtgtcttccttttgacccatgagttacttagaagtgtattacttcagttaggaagtgtttttggatttttcagatatctctgttattgatatctagtttaattccatagtggtcagagaacataaggtatatggtttcaagtcttaaatttgttaaggtttgttttatcacccagattatggtttatcttggtgaatgcttcatgtacacttgaaaaatatgtgtattctgttttttagagtgtaatattctgtaaatataatttagggcaagttgactggtagtctgttctggtcttctgtatcattgatgactttctgtctacttgttatatcaattactaagaagggttttgaagcctctttgtgattttgtctatttcttttagtcccatcagttttgcctaatatattttgaagttcttttagatgcataaacatttagaattgacccctgtatcattatataatgtctccctttatccctgataatactccttattcagaagtctacctggtctgatattagtacagctattccagcttcctttttgtttgcatgatacatcttttccctttctttactttttaaaaaccacattaaaaaaaaaccactcttagagttgtataatcatcattacaatctaattttagaacatttttaacaccctaaaatgaaccccatgcccattagcagtcactctccattcctacttacctcgctcctaggcaaccactactctgctttttgtctctatggatttgcttattctggacattttagttaaatggaatcctacaatacatggtcttttgtgattggcttcttttacttagcatactatttcctttttttttttccagggagggaagggtggaacagggattttcagcatactgttttcaaggttcatcataaatgaacatagttgtgacatgtatcagtactttattcctgtttattgccgaatgatattccatcatatgaatattatttatccattcatcagttagtgaacatttaggttgtttgcaccttctggctattacaaaataatactgttatatttgcgtaacaggtttttgtgtcattttctttttacccttttgttaagctagttgaatttagcagtggagggttatataccaactttagtgacacttatgttaattagcttctttaacttttaacctatgtctttatattttttaagtgggtttcttatacacagcaaatagttgggtcttgttttttctgtgaactctaacaatatcttttttgttatgttgagaccatttaatagaatttttaatattgttgggtttaggtctactattttattatttgttccatgccttttgttcctcttcagcctctttcctaccttcttttggattatctgagtgttttttagtatttcattttaatttgtgttattggctttttgcctcttacaactttaagtggttgctataaggtatataatatacctaaactttcacattctacttaatgttttaccatttaaagtaaaatacagaagctttataaccataaaagttcctttatattccctacccttttggtatacttgtcataggtattacatctatatgcattgaaaaccccaccagacaatattttgttttgctttcaaaagccatatatatatatatatatatctcttaaataacttaggaaaatagtctgttgtgtttacccttttttttgttgttgttttttcttcattcctgaagctccaagttcccttctagtatcatttcccttcagtctgaagaacttcttttagccactttcttttagagcaggtccgttgtcaattaattctcctagtttttcttcatctgagaatgtcttcatttcatcttctttcctgaaaaatatttttactggatatagaattctgggtcaacgtttcgtttcttttttttttttttttttttgagatggagtcttgctctgtcacccaggctggagtgcaatggatggcacgatttcagctcactgcaacccccacctcccaggctcaagtgattctcttgcctcagcctcccgagtagctgagtagctgggactataggcatgcgccaccacacccggctaatttttgtagttttagaagagatggggtttcatcacattggccaggctggtctcaaactcctgacctcaaatggtctgcccaccttggcctcccaaagtgctgggattacaggcatgagccactgtacccagccaacatttcttttctttcaccactttaatgatgttatcccactgtcttctggcctccttggtttcttttttctttttcttttttttttttttttttttttttgagacggagtctcgctctgtcgtccgggctacagtgcagtggcgcaatctcggctcactgcaagctccgcctcctgggattacgccattctcctgcctcagcctcccgagtagctgggactacaggtgcctgccaccacggctggctaatttttgtatttttagtagagatggggtttcaccatgttagccaggatggtctcaatctcctgatctcgtgatgagcctgcttcggcctcccaaagtgctgggattgcaggcatgagccactgcgcccggccctctctggtttctaataagaaatctgtagtcatttagtagttcctgacctatacataatgtgttgattttcctctggccttgtccaagattttttcttgtttagttttggttttcagaagtttgattgtgatgtgtctagatgtgatttttttttttttttttagacagagtctagctctgttgcctaggctggagtgcagtggcacgatctcagctcacagcaacctccacctcccgggttcaagtgatcctcctgcctcagcctcctgagtagctgggattacaggcatgcgccaccatacccagctaattttctatttttagtagagatggggtttctccatgttggtcaggctggtctccaactcccaatctcaggtgatccacccgcctcggcctcccaaagtgctgggattacaggcgtgaaccaccacgcctggcctagatgtggttttctttacatttaatctgggcttcactgggccttttgaatttgtaaatgtatgcctttcacaaaatttgacaagttttcagccgttatttttaaaatgattttttatacctattatctctttcttctttctctctctgagacttcagttgcacaaattttagaccatttcccccgactctgctaccaataatctgtccaaattaaaccttttgatatcattccataggtccctgaagctctgtttaaccatttttctttttgtttttcagattggcccatttttattgctctgtcttcaggttcacttattcttttctcttccatctccatcctgctattgaaaccattcaacataaattttttatttcagatactgtatttttcaattctaaaatttctgtttcattcttttttataatttctgtttctctgttgagaatttctgtctctccattcatttcaaatgtttttaccttcatctcatggaacatagttatattaggtactttaaaatctccaggctgggcacagtggctcacgcctgtaatcccaacacgctgggaggccaaggcgggggaatcacttgaggtcagcagtttgagaccagcctggccaatatggtgaaactctgtctctactaaaaatgcaaaaattagctgtgcatggttgtgggtgcctgcaatctcagctactcgggaggctgaagcaggagaatcgcttgaacccaggaggcagaggttgtagtgagccgagattgtgccactgtactccagcttgggtgacagaatgagactccatctcaaaaaacaaaataaaatctccatctgaaaactataccatctgggtcattttatgtttgcatttgcttattgttttttcctttgaaagttggtcacatttttctagttctttgtgtgtcaagtaattcttgtaccctggacatttatcctgaccatatgttataagactctgatcctgttggccaatattccctggagaatatctatgtttttgtcttagtagacaaccacacttcagatattacaagttctttgtcatcttgtgtggctgttggttccactgtcagttcagttttcaagacctttgctgtgttgctttgggtctgtcccatgcatgtcctgcttaagggttaatctggggcttgggcagtggtttatatcattgttcagttctcaaagccttttctgtgctgctttgaatctaccctgtgcatgcatagctcaagagggaacctaagatgtatgccaattcacatacagaattaggagatcctcttgttcagctcattcctttgcagttctcctcccatattctttggccttcagagtcctcttttcccagtcctcaggccagaaagatggggtttctctgagttttacattcacataccaccactgcaacagttcaaaaccacaagagaaaatagaagaataaaaaaacaggaaacaatcctgcgtgggttgtttcttcaagttttgacccctctccacagtctgcttgcttttgttgacttttcagagccctcagttagttgctttttttgtatattgtctatagtttttaattcctatcagtgagagaaagagaaaaggtacagtgggcatactccatcttggccaacacctgcaatttattctgggttttttggggttttttttacccttatgataatactttttaaggctagttaaatgaagcagtggtaggaatggagaatctcttctgataatacttaaaactgtggcagcagcataggaagtttacttttcaaacttctgccagctttgctaaagtacaatgtcatgtcatatgcaacttcatttcatataggtcaggagaaaccgtatatgtgtgtgcgtgcacgtgcgcgcatgcatgtgtatagaaaaagagacacagtgataaaatagatgtggcacagtgttaacaattggtgggtcaagttttctaataaaaagttagtgggaaaactctaatcttaataaactctgtgatcttagtcttaataaccctaacctgatcctcagatcaacttaatggtgattttcagaataatttaaattggtcaaacttgggcatttaaagggagagttaaataattctagccaaaacttttcatgatcttaaggtgactctctttacttctgagagaataaacatgttctttgggatatttctgcattcttcccccagcctgctcttctaatttgtttactttaacaaattggaaattttgagtctggtaaaatagtggtcacctcactaaaagttgtgcattctgctactttagacaattccaagctcgagtgtctcggcaaactctgttggcacttgagaaagaagaagaggaggaagtttttgagtcttctgtaccacaacgaagcacactagctgaactaaagagcaaagggaaaaagacagcaagagctccaatcatccgtgtaggaggtgctctcaagggtaagtttgttaaacgttatttcggaaaactgttagtttctagtggtaaaatcatgtaagaagataatacataaatatacctgtggacacttctagtttgctgaatactgagtagcaaaaagaaggaagtcaaaggagagctaatattacagtgtgcagtaaaatcaaaatgcatcagtaattttgtgtcttaattaagaaagacctaacatttaggaagcatcaagattttctgagtttgaattgttagttgaaagaagatatgtagtaacatagcaggtgttgttaaagtgaagcttacatataccaaagcctcagagaatgatactaatatggttaagaaccctgccttcagagccctttgggaccagaaattagactctctatatacccaaagatcagcaataattttttttaattaacatggactttttttttttttgagagataggttctcgctctgttgcctgaaacgtggtagtgcaatcatagctcaccgcagcttcaaactcctaggctcaagcagttcttttgcctcagcctcccaagtagctaggattataggtgtgagccactgcatctggacaacactgactattttttagagtagttttaggttcatagcaaaattgagcagaaggtacagagaataataagcttttatttactaaatttatagcagttagacatgtaaaccaggctgtttttttaatctcttatttctttcctggtatcaatttatcaataatcagaatgttacttggtggttctagaattaggatatagggagtgtatggtcccaaaggctatttcatccagatcatgatgaagcttggttaataaccagccccacaacagagaaaacccctaataaatgggttaattttgtattctctagttccagtatatctctgctgatttccattgagagaaaatttaaaactgaagaataaaacttaggttagtttctgataaaactagataatgttataatgatgactgaaggaagatgcagaatgtcttttttggaaatttgtgaataaaagatgtggggtgactggaggagggaaaagaaggcagaatataagtaacaaagaatggataaaacgattctatttttgatttattaatttttttaaagattatttttaaaatttctttttttttttctgttgtagtggaaatactgtccttgagttgaggaagaataggtatactttatctggcatctaagttaataatgaaacattttacatgaggttttaatatttttgctcctagctccaagccagaacagaggactccaaaatccatttcctcaacagatgcaaaataatagtagaattactgtttttgatgaaaatgctgatgaggcttctacagcagagttgtctaagcctacagtccagccatggatagcaccccccatgcccagggccaaagagaatgagctgcaagcaggcccttggaacacaggcaggtccttggaacacagggtaaggactcttagatccagtgctttgctgacacaacaaagacttcacatttagggtagagaagtatttttaccatctcttttaattcctcttgaatatttagccatggtctatatatgctgtctgagaacataaaactatggtaattttagttttcttcttcatctccagcctcgtggcaatacagcttcactgatagctgtacccgctgtgcttcccagtttcactccatatgtggaagagactgcacaacagccagttatgtgagtgtggtttttggatattttgaagtgggaattattaagggtgggcagaggcacctattctacttcccaaaggcagtttcttctttatgaagatgaaagtaaccaggccaggcgcagtagctcacacctgtaatcccagcacaggctgaggcaggaggatcccttgagcctaggtgttcaagaccagcctgggcagcctagtgagaccctgtctctatttattaaaaaaaaaagtaaccagacaaaattttgtatatcctttatgtttgtattcctttgagtatgttagggttaaaagaccatttgttaatattttattaaggaataaacattaattaggtttatattttcattactgaacattgctttaggaaaatcaatggtggctattctggaagatggattgaacatacataaataagctattggaatagttcaggcaaggatattaaggggcggtatttgggcagggtagtggtaatgaaaggagaagggagcttggatgggagaggcttcagcagtagagttagaagatttgtctgatgggataatggggatgtagggaaaagataatgtgatttaaatgagacgttctcattttgtcattgatagtaatgagaaattatgatagttttccctcttatcctgctttttccttctggacatatttttcctctttcttcctaatccttagcatttctgtttttaagaaaaagtatagtagctggtggttaaataaacaagccagcctgagatttagtctaatgcttaacattgcctagttctttttttttttttttttttttttttgagatggagtctcgctgtgtcgcccaggctggagtgtggagtgcagtggtgcgatctgggctcactggaagctctgcctcccaggttcacgccattctcctgccttagcctcccaagtagctggaactacaggcatctgccaccacgcccagctaatttttttttttttttagtggacacggggtttcaccgtgttagccaggatggtctcgatctcctgacctagtgatccgcccaccttggcctcccaaagtgctggaattacaggcgtgagccactgcgcccagccctagtcctaatactaggttgaattctgtcccagtgcaagagttacctcataactaatttataactcccactacatgctaggaatgcaaaaataataattaagattttgagcaaaaattctgcctaagtgctcaggacaaggggaaggctattttttttctttttttttttttctttttaaacagagtcttgctctgttgcccagcaggctgaagtgcagtggcaccatctcagctcaccgcaacctcgacctcctggttcaacgggcatggcagcccacgtttgccatcccagcactttgggaggccaaggtaggagaatcactccaggccaggagttcgagaccagcctgggcaacatagcaaaaacctgaccctacaaaacaaattttttttttttttgagacggagtcttgctctgttgcccaggctggagtgcagtggcatgatctcagctcactgcaagctctacctcccaggttcacgccattctcctgcctcagcctcctgagtatctgggactacaggcgcctgccaccacgcctggctaattttttctattttttagtagagacgggatttcaccgtgttagccaggatggtctcgatctcctgacctcatgatccgcccacctcagcctcccaaagtgctgggattacaggtgtgagccaccgcacccggtcaacaatttttttttaattagctgggtatggtggtgggtgcctgtagtcctaactactcgagtggctgaagcaggaggatcacttgagcccaagaatttgaagctacagtaagctatgatcatgccacagcactccagcctgggcaacagggcaagaacctatctctaaaaaataaatcaattataataataaagaaaaatcagcttggcatcatggctcatgcctgtaatttcagcactttgggaggctgaggtgaaaggatcgcttgagcccaggagttcaagaccagcctgggcaacacagggagaccctgtctccacaaaaaatttaaaaattagccaagtgcagtggcttgcacctgtggtcccagctacttgggaggctagggatcacttgagcccaggagtttgtggctacggtgagctgtgactgcaccactgcactctagcctgagtacagagtgagaccttgtctcaaaaataaataacgaaaataaaaaagaaaatcctatgagcctttatagaaattgataacatacatttgtagatgtctggtttttctaatgtttcaagtcattttgtagaaacatgacttatgttaaaattaatatggtacaggaaatattaaacttattatttttgagacggagtctcactctgttgcccaggctggagtgcagtggtgcaatcttggctcactgcaacctccacctcctaagttcaagcaattctcctgcctcagcctcctgagtagctgggattacaggttcgggccaccacgcccggctgatttttgtatttttagtagagacagggtttcaccatgttggtcaggctggtctcgaactgacctcgtgatctgcctgtctcggcctcccaaagtgctgggattacaggcatgagccaccatgcccgacctaaacttatttttattttaaattcttttccatggatgttttatttgacctctccacacatttttctttaggttgcgttttgcttagtgatgtatagaagctcttcatagatgaagaaaatcagctaaaaatctataatacgagttgcaaatattttccccctactttgtccttgtcttttggcttcatgtagcagtaaccattatgcttttaattatcatacagtcaaatttaagttttctttttttttttttttttcgagacagagtcttgctctgttacccaggctggagtgcagtggcgccgtctcagctcactgtaacctccgcctcccgggttcaagcaattctcctgcctcagccacccgagtagctggcattatagacgcccgccacgacgcccagctaatttttgtatttttagtagagccatggtttcaccatattggccaggctggtctcgaactcctgacctcgagatctgcccgccttagcctcccaaagtgccgggattacaggcatgagccactgcactcagccttttaaagcttttttttctttttttttctaaacttcatcgaaatataattccgtggcttttagtatgttcacagagttgtgcaacccttaccacaatcaattttagagcatttttatcactccagaaagaaccttgtacccatacctgtaagactcgattccccaccattaccccaatccccaccctagcaaccaactgtttttttctctatagataatttaccaattctagacatctcgtgtaaataatataatatgtggtctttgtttttttttgtttgtttgttttttgtgttttagacagagtcttgctctgtcgcccaggctggagtacattggtgcaatctctgctcactgcaaccttcgcctctccagttcaagcatttctcctgtctcagccttctgagtatctgggactacaggcatgtgccaccactcctggctaacttttgtattttcagtaaagacaggctttcaccacgttggccaggctggtctcaaactcctgacctcaagtggtccgcccacctcggcttcccagaccgctgggattataggcgtgagccactgcgtccgggcagtgtatggtcttttctaactggtttctttcacttagggtagtgttttcaaggttcatccacgttgtgacatgtatcagtacttcattattttttattgccaagtagtattccgttgtgtggcttcacaacattttatttaaccattcatcagttgatacaaattttaattgttttcattttttggctattatggataatgctgctgtgaataccgtgtatacatttttgtgtggacatgtgttttcgtttttcttggctgtatacctaggagaggaattgctggatcgtgtgattaactccatgtttaatattttgaggaactgtcaaattgttttccaaaaaagctgtaccattttaccttctcacattcccctaatgtacgagtactccaattccttcccaacacttgttattatgcttttttggttattgtcattctaacagagatgtgaagtggtatttcgctggttttgatttgcattttcctggtgactaatgatgttgagcctattttcataggtttattggccttttgtatatcttctttggagaaatgactgtttaaatccttggcctatttttcctttggattacagtagtccctccttatctgtaggggatacgttccaagactccagtggatgcccgaaacttgatagtaccaaaccatttatatactatgttttatcttatacatgcactgtggccataacttttgcagtttgaggtatgacagcaaaactaactttttttccttcttcacaatttcactgatagaagattcattcttactgtaaatcttatcaacttcagcatgtgatttattttttatttttattttattttttttagtgaaagttgaggctgggcatggtggctgatgcctttaatctcagcactttggctctgggaggctggggcaggaggattgcttgagaccaggagttcaagaccagcctgagcaatatagtgagaccccatctctactaaaaataaaaatacactggctgggcatagtggcacatgcctatggtttccgttactatggaggatgaggtgggaggattgtttgtgcccaggagtctacggctgcagtgagccagggtcacgccactgtactccaccctaggcaacagattcagatcctgtctctaaaaataaaataaaacaataaaataaaagttaagaactttcacctttggcatatccaaatcatcagcatcgctactcttgtgctttggggccattattaagtataataagggttacttgaacacaagaactgcaatgctgggacagctgatctgatacgagtcagctgctaagtgactaatatgtggatgctgaacaaaaggatgattcacatcctaggtggaacaaaatgggaatatatgggatttcatcaggatagtcagaacgccttgtaatttttttttttttttttgagaccgagtctcactctgttgcccattctggagtgcagtagtgccatcgtggctcactgcaacctcagcttcccgggttcaaccgattcttgtacctcagcctcccaagtagctgagattacaggcttgtgccatcacacccaggtaatttttgtgtttttagtagagacggggtttcgccatattgcccaggctggtctcgaactcttgggctcaagtgatccacccgactcagcatcccaaaatgctgggattacaggcatgagccactgcgcctggccagaatgacttgtaatttaaaactgatgaattatttctggaatttttcacttaatatttttggaccaccattgaccatagataactgaaactgctgaaaatgaaaccatgagtaaggggaaactactctatttggttttttattgttgagtttaagagtcttttatgtattctagatacaacttcttttcggatacatgatttgcaaatattttctcccattctgggttgtcattttattttctcaatgatctcttttgaagaccaaaagttatttaaaattttgatgaaatgcaatttatctgttttttaaaattttgtccctgagctttcactgtcatatctaagaaggctctgactaatccaaagtcatgaagatttgcttttatacattttcttctaggagttttatagttttagctcttatatttaggtctgtgatccattcttagctaatttttgtgtatggtataaggaaggagtccaaattcatttttcttcatgtggatatccagtggtcccagcaccacttgttgaagactactcttttgctattgaatggtcttggcactcttgttgaaatatcagttgaccaaaatgtatgaatttatttctagactcttaattctattccattgatctttttgtctatccttatgtcaataccacacagtcttttttttttcccctacacgatctcgattactgcagatttgtagtaacttttgaaattgagaaggatgaatccaactttgttcctctttttaaagattgttttgactattctgattctcttgtaattccttatacattttaagattagcctgtcaatttctgcagaaaagccagctggaattttgatagtgattctgttgaatctgtaggttaatttaatgatattgacatcttaaaaatattaagtcttctggtccatgaacataggatgtctttccagttatgtatgtctttgaattctttcagtgttttgtaggtttcagaatacaagttttgcacttctttttctttaattaatagactttattttttagggcagtgttagctttgcagaaaaatggagtagaaagtacagagagttcccacatactccatccccacccctcaaccctgtacacagtttttcctattactaacatcatgcatgagtgtggtacatttgttataattgatgaaccaatattgatacattattattggttaaagttctttgtttacattaggattcactctaatgtgttttacagttctgtgtgttttaacaaatacataatattatctatccatcattacggtgtcattcagaattgtttcattgtcccagaaatcccctttgctccatttgttcatccctttctctctctccccaaatcccctgtaactattgatcttttcattgtctttatagttctgccctttccagaaaatcatgtagctggaatcatagtatatgtagccttttcaatctggctccttccacttaacaataaggttcctctgcatcttcttctgacacaatacctcatttatagtgctgaatgatattccattgtatagatgtgccacgatttgtttatccattcgcccacaggaggtcattttggtgacttacaagttttagcaattatgaataaggttgcggtagacattcatgtgcaggtttgtttgttttaaatagtcttgttctttcacctacgctggagtacagtagcatgatcctggctcactgcagtcctgactcctggactcaagtgatcctcccacctcatcctccctagtagctgggactacaggtgcatgccaccatggctggcttattattttttttttttaaagatggggtctcactgtgttgcccagcctggtcttgaactcctgggatcaagtgatcttcctgcgtcagcctcccagagcactgggattacaagcatgagtcaccacacccagccaggttttggtgcagacataagttttcaactcatttggctggattgtataataagactaattttagccttgtaggaaagtgccaagttatttttcaaagtagctatactgttttgcattcctaccacccatcaatgagagcttctattgttccacatccttggcagcattcagtgttgtcaatattttagattttaaccactctaataggtgtgcagcagtatcttattgttttaatttgcaattccttaatgacatctgggaagcatcttttcatatgcttactaccatctttttttttttttatatgcttattaccacttttttttttttttttttttttttcccttagagacagtgtctcactctgttgcccaggctgggctcaagcaatcctcctgccttatccatcctggtagttgggactataggtgcatgacaccatgcctggctaattttttttttgaagacagggtctcagccgggcgtggtggctcatgcttgtaatcccagtactttggaaggtgaggcaggtggatcatgaggtcaggagttcgccaacatggcaaaaccccatctctactaaaaatacaaaaattagctgggcgtggtggcaggtgcctgtaatcccagctactcgggaggcggaggcaggagaatcgcttgaacctgagaggcggaggttgcagtgaactgcgatcatgccattgcactccagcctgggtgacaagagcaagattctgtctaaaaaaaaaaaaaaaaacagggtctcactgtattgcccaggctggtcttgaactcctggcctcaagtgatcctcctgcctcagcctcccaaagtgctggaattacaggccactgtgtccaacttccatctatatgtcttctctcacttccttattttaaatttattgtgaagtattttactatttttgaagctatagtaaatagaattgttttcttaatttcattttcttttttccccttttttacatgctgccttgagatgtgatttaattttattttcagattgttcattgcaaatgggtaaaataggttgattttgtatactgatcttgtattctttgactttgatgaactcgtttgttatctaagaccatatcttctgcaaaaagagatagttttgcttcttcctttcccatctggactccttttctttgtttctcttgcctaatagccttgactagaacttctagtacagtgttgtatagaagtgacaagaatggacatccttgtcttgttcctgatcttagggggaaagcatctagccttttaccatgaagtatgatgttagtgtgggtttttcatagatgtcctctagcaggttgagcaagttggggaaactttttaagcatgtaaatgcttggaccctaccattacagtttttgattcactgagtctgggaaggaccggtatctttagttgtacaaaggtatataagaaaataaaaggtatataagttattctgatccacagggttgaaaatacctgctatatcatggttgaggtatcttatacttcattcttttaaaagctatgctgccactctgattcttccccctcagctgagcaccttggacttaatattattaggttcctaatgctatattcttaactctaattcttttggatactaaaccatgaaaaatggattgtattgcataggttaatttctttttatatactggttatgatgaggatatggtattaagatttgctttcacctataagtaatataagctacttgattatcccacttatggctaatttccttccttatcatagcagaggtggtactcagaacataattttattttccttttttttacatttcaataggttttggggaacaggtggtgtttggttacacaaataagttacttagcggttatttctgaaattttggtgcacccgtcacctgagcagtgtacactgtacccgatgtgtagtcttttaacccttactccccccatcctttcccccaaatccccaaagtccattgtatcatttttatggctttgtgtccttatagcttagctcccacttataagtgagaacatatgatgtttggttttccattcctcagttacgtcacttagaataatggtctccaattccatccaggttgcttcaaatgccatttttttgttcctttttgtggctgagtagtatttcatggtagatatataccacattttctttatccatgcattgattgatgggcatttgggctggttccatatttttgcagttgtgaattatgctgctaaaatatgcatgtgcaagtatctttttcatataatgacttcttttcctctgggtagatacccaggagtgggattgctggatcaaatggtggatctacttttagttccttaaggaatctccgtactgttttccatagtggttgtacgagtttacattccccccaacagtgtaaacgtgttcccgtttcaccacatccatgccagtgtctattattttttgatttctttattatggccattctcacaggagtaaggggttattgcgttgtggttttgatttgcatttccctgataattagtgatgctgaacattttttcatatgctcgttggccatttgtttatcttttgaaaattgtctattcatgtccttagcccactttttgataggattgtttgtttttttcttgctgatttgtttgagttcctggtagattctggatattagtcctttgtcggatgcatagatcgtgaagattttctcccactctgtgggttgtctgtttactctgctgattattccttttgctgtgcagaagctttttagtttagtttagccccatctaattatctttgtttttgttgcgtttgcttttgggttcttggtcatgaagtctttaccgaagccaatgtctaggagggtttttccagtgttatcgtctagaatttttatggtttcagatcttagatttaattaagtctttgatccaccttgagttgattttttgtataaggtgagagaggaggatctagtttcattctcctacttgtgacttgccaattatcccagcaccatttgttgaatagagtatctttccccactttacacttttgtttgctttgtcaaagatcagttgactgtgagtatttggctttatttctgggctctctattctgttccattgatctatatgcctgtttttataccagtattatgctgttttggtgactatggccttacagcatagtttgaagtcaggtaatgtaaggcctccagatttgcagaacataattattgatggcccttgtaaattatttttagcttcttttatcaatcttattgattttttttattttgacccatatgaataatagtaattttgcttctttaggacaccatgtaaaattgaacctagtataaaccacatcctaagcaccagaaagcctggaaaggaagaaggagatcctctacaaagggttcagagccatcagcaagcgtctgaggagaagaaagagaagatgatgtattgtaaggagaagatttatgcaggagtaggggaattctcctttgaagaaattcgggctgaagttttccggaagaaattaaaagagcaaagggaaggtgtgtgtaattcaagtttgtgaagaggacttaacttagttgtgtgaaggttgagctgacctattaagtctgaagaaaactaaccttatagtttgtacctttgtatgatgtttctatggtagtactgtttctttctgtgtatcagccaaaatcccactgctgccttctatggttgtactgtttctgtgtatcagccaaactcccattgctgccttccatgaaaactccttggggtgtgggggcactgagtatgtttagaagtaaaggaagaagttctgaactgtatgaacaatttatattccccaatacaataagcaagcagctatgatccctgacatgcatatatgtacattccatgcatccctattaagtacttttcctaatgttattgcttgaaatatttcactttacctttgatactttgtctgaaatttctccaagggcttatttagattaacatagtaggtcatactgcagtgatttagattatagatattcgtattgttttttaaagacattatatttctaaattaaaggaaaaggtttaaaaattgagatatggggaatttttgggaaacaggaagcagttctgattctggagcctggagtacttgaaggcaagaggtagggcagaatgggctggaaagtagggaagtaaggcatatggggcttaaggcatgagaaggtgaaggagaataaagaagggtacagaaaatgaggtaggggagggtccacttccatttagacattttttattaggatctgtaaggagaaagtaatgtttcttttatacatccgtatccagaataacctactaatatagctcagctctcttaacaggatgtggtgtttgtggggttagctgggaaacttaaccatcacttatactttgaggagcaatcttttctgagttccaggtgacaacctggaagcaaactttggtaaagcagactgttagtaagtttgaaattgccttcatttgttacactaattagtgtcatccaagattgtcaaaagtgctctgggttcaaatggaacttgtgtgtctaggtagaagagagggatggttgcaaagcaaggtgttgagtaaggcttttaaaaaaggagaaccactccagcaaagaaataggctaggagggtggccaaatatgaaccagaaaaggaactaggtatctagataaaaactgtttcctaagggaaaagcttagtctgtaccagatatatagaaggaaaatgaaagtccattttagggccaggcacagtggctcacacctgtaatcccagcactttgggaaaaaaagaccagcctgggcaacatggtgaattctcatctctgtgggaaaaagaaaaggtacattttgttttcaactagccaaagaaggacctactctagattacatgggatttaattaggaataagaaggcattgacctctgagaattttttaatactcatttctattgtgttttttttttttttaaatagagagatgggatctccctgtgttgcccaggctggtctcaaactcctgggctcaagctatccttcccaccttggcctttcaaagtgctgggattataggcatgagccaccatgcagaccttaatgcttatttctaagctggtctctgaatctatttcatgaacttgtataaattcccatctgtgtataagtttgtacccttacataaatcctcatttcaataaatgtggtttctagttactgtcaaaaactgacttcaaagacttgccaactacttactctcagggaaaaatacaagaaaagaggaagccacaatcagggcctacacaaaggttgttttttctttgcgttgcacttccaaatcattttttccctcttctttcaaaaactttagcttctttcagatttctgtcctctaattcttttctatctcctgagcctccttagtgtactcacctcagacttttcagtcacactccatcattcattaattgactaataagcacatggcttactatctatgcctctttaccctaacctgcaaaaccctgcatggccaagcatggtagcatgtgcctgtagtcccagctactcaggagagtgaggcagaaggattgagcccacaagtttgagaccagcctgggcaatatagcaagaccccatctccaaaaacaaacaaaactccatgtggcttagcctttacctacctctccaaccccatctttttctattcaccctcttactatgctgcaactacactggacttcctttggattcttagacacagtggtcttttcctgcattggggcctttgtgccacctagtttgttagcctagaatctttccccagaactttggccccttatcatttaaattacagcttaatactgtcactttatcagaatgatcttccctgatcactggtcttaagtagccctcccttggcctccatctccctacccagtcaaacattctcacgtcacctattttattctttttcctaaactgattttcttgtgtgtgtgttgcccccaaatttgaatgttagtatcacataaccaaggactttgtattatgtaccactgaaacctaagtactcagagctgtgcttggcacatagtaggtattcaatgtttttttccttttagtagaaacctgtgttgttcaaaggtattctatttttttattgaatggataaagaatagaggcctagaccacaagttgaggaccttattccacttaaatcattttcatctgtattagtaacatatatgttgaggagatgagctccaaaggcagtttttgacagaatgagttactatgaggaataatacctcaagcaactttactgtttctagccgagctattgaccagtgcagagaagagagcagaaatgcagaaacagattgaagagatggagaagaagctaaaagaaatccaaactactcagcaagaaagaacaggtgatcaggtaatttttcttttttcatacacaaaactagaatttattgaaacaaatttaaacattataaaaatatagaaggttaaagtcctcccaacccccatttagagtttctggtagtttcttagctgttagtagccggaaagttgagcgggaaagtaatttaacaggtgacttcaaatggaatttgtggcatgtgaaataagtggtgcagtttattgacttcttagttatactccaaatcattatgttattaattctggcttaagctttttattctagctatgttccattaaaatgggattgcctaaagaaatttagtatatgcctggcactgctcagttgagtacaacagtactggtttagagtaggaataaaaattattggaaatgacttttgtggtacactcattttgtactgttagtggatgtctagggaaagagtacagtaaagctaatgttagaactagaaaatagcattttctggatgggagggacattgattttgtttatttaatgcaaacagcaagaagagacgatgcctacaaaggagacaactaaactgcaaattgcttccgagtctcagaaaataccaggaatgactctatccagttctgtttgtcaagtaaactgttgtgccaggtaagactacataggtggaagggacaatgcatataggagggcatttagaaccaacctttgactctctagtgccttgaagtctccttgacgtttacagtatcgagacatggtttttgtaagtctctgtcacaacataagctttgatgctgatgagggaggacagagcattgactattttccactgaagaaacatgtttcttatagaaacaaatacatatactgtttttaaaaaacaaaatcacccatttctaccactaagagatgattaccattaacactgttctgtctcttcttttgtgttgtatttttgttttgttttataaaaatggcagcttaccattttgtaatctgcttatactattaatgcaacttgacatctattatcaaatatatttctgcaacatttttgataaccaaagcttccatcttctttaagagaatttgaattgacagtaataatttatcttagagtaaatattatatttaatggaaaagcctcttggacttttaaaaattaaacagttctttctgtgggtattgagcacatgatttaaaacaagtttctttacagagaaacttcacttgcggagaacatttggcaggaacaacctcattctaaaggtgagttgtatttgacagccttgagaagaacttgctgataacaaatgtattatgtaataaatggtaaatatttttaattatgataaagggattgaaagacagggggactaggatactaggaatttagtataagcatatgctttatgataggaaagacatttgaaagagtatttttttaaagattcctcagtgcttcaaaatatttggtttaattgtaattttaaatttacactaaccaccaaatcttatactttagttactgtacactaaacagcaaagacactaagggaagtgtttcttttcagggaaaaaaaaatttaaagctattttatactcaaattggttttcttttcttcaaaatgtgttaaaagtggtgaaacatgaatatctacttgtaaatggtttggcaaaaataaaaataaaaaacattaaaatctaattaaacctctgtttctaaccgtcaatttattggaaatataaagcatggaggaacgttgttaaacaacacagcgggatggaattggcaaaatccagcattatggggctagcaacccagtttgttcaacaaaaattccccccaaaactctatagaataaaagagatttaagaggcatttgaacagtcacagtatacggatcttaactctgcattcccaattcaaacaaactttaaaaaaatttttttttatttattaatatttttttgagactgagtctcgctctgtcgcccaggctggagtgcggtggcgcgatctcagctcactacaagctctgcctcctgggttcatgccattctcttgcctcagcctcccgactagctgggactacaggcgcccaccaccacgcccggctaatttttttttgtatttttagtagagacggggtttcatcatgttagccaggatggtctcgatctcctgacctcgtgatccgcccaccatggcctcccaaagtgctgggattacaggtgtgagccaccacacccggccaaaacatttttttaattggtaaaatatgaaacttctcactggacatttgatattatatatatattcataaattgttcattttataggtaggtatcatgttttgggattgggatttttaaaaagcctcttttagaaatatatactgaaatatttgcagataaaatgacatgtctggaatttgctttaaaataatcctgttgggttgggtttggggagtagtgacagtggtagagaatctaaatggaacaagatcatctaagtttaggtaattggtaaattgtttaatgaccttttatatgtttgaagctttttgttattaaaaaaacaggttgccttcctgctttcaaacaacacaaaatattgattaatttatctggttgtcttgaagagtaaagcatttactcctagagtatgtatctagtctctctttctctaggtcccagtgtacctttctccatttttgatgagtttcttctttcagaaaagaagaataaaaggtacgttgtttttttgtttttttggtttttttttacttaagaattttctgttattataagtgaggataaattaggggttactgttatgaaaaaaattgctaagtgaggtatgtctttttccagtcctcctgcagatcccccacgagttttagctcaacgaagaccccttgcagttctcaaaacctcagaaagcatcacctcaaatgaagatgtgtctccagatgtttgtgtaaggagcagtatccttaagttaatgtaaatgggctagtggattgtttattcaaaaccacaaacgcttaaggttaaaattgaaaccactgacttgaattaagcacatgaaaagatgctcagcattactactcaacagggaaatgcaaatcaaaaccacagtgagatactaatttatatcctctaggatagctataataaaaaattacgcacagtaacaagtgttggcaaaattgtggagaaattagaacatacattactggtgggaatgtaaaatggtgtagccactttggaaaacagtttggcagctctttaaaatgttaaacacagttaccatatgatcctgcagatctctgcccaggtatatactcaaaataattgaaaacacatgttcatacaaaaaatttgtacacaaatgttcatagccgtattactcatgatagtggaaacaaccccaaatgtccatcaactgatgaatggataaacaaaatgttatgtatccataccatgaaatattatttggcaacaaaaaggaatgaagtactaatacctgtcacaacatagatgaaccttgaaaacgttatgtcaagtgaatgaagccagatacaaagaccacatactatatgatctaattttcatgaaatatccagaataggcaaaagtgtcatggattgaggttttccaggggattagagggtggtggagagtgactgctaatgggtatagggtttctttttggagtgatgaaagtattctggaattagatagtgatgatggttgtacaaccttgtgaatttactaaaaaccactgaaatatactttaaaagggtcaattttatggtatatgaattatatctcaatttttataagtagggaaaaatcactaattttaaagccttttgtacttttaattttttaaccaacatagcaaaagacatttgttcttttttatataaaataccttttttggcaatgcaaaagttatgtgggccaatcatttttcttcagtaatgttctatattaaccgctatagactaatgacataatacttaaggtaaaaagaccctgtgtagacatttaagtcaaaataaataacctgtatcattggcattttattaaagttttaaggaggaaaaatcattctcttcaaaccagcctctggaagcttgtcatgagactgaaaagaattgagtatgtttaatctgaagacttttaaggggtgatgtgcgcagtagctttagtaacttaaagcagtgttttccacatcctagggaatcatttggaggaagttttttaaaagcactttttcattttagtttcttctctgttgatgtatattttatatccagtaaactgcacaaatattgtacagctagatgaatttttccatgcaattttttcccatatcaagatacagaatatttccatcaactcagaagagactagcgagtcttttgtgactaacagtgcttaagccccattccatctaggtgccattggaatttccagggaagaagtccaagcatgtatttttgtctttttaaaaatactttctcagataattctgctacagttagtctactgactgctatgaaaagacagtgatgtaagagtaattaattacatattgtgttctggagtaaaccaccagagaacatgatgaacaggctagatttggatacagtggttctagattcagctgttcaaggatatgcttaattgttaaaggagtccaacttcatttacctttttttttttttaaccagtcttttacttgaattttgttaataagtacctaccagaattttcatcccctaaaaaaatcatatttaaaatgtctaagctaatatggccataagtagtatttgcataaaatgtatagattataaacatctattttactttaatcacatatataaatacatatatatgtatatatatatttttttctttttcttttttagacagggcctcgctctgtcacccaggctggagtacagtggcatgatctcagctcactgcagcctctgcctcctgtactcaagcattcctcccacctcagcctcccaattagctgggactacaggtgtgagccaccatgcctggctaattttttattttttggagagacagggttttgccatgttgcccaagctggtctcaaactcctgtgctcaagtgatcttcccacctcagcctgcctcccaaagtgttgggattacaggtgtgagcaaatgtacctggccaaatctttttttttttttttttttgagactgagtttcactcttgcactcaggctggagtgaagtggcgtgatctcggctcactgcagcctccgcctcctgggttcaagcaattctcctgcctcagcctcccgagtagctgggattacaggcgcccaccaccacgcccagctaatttttgtatttttagtagggacggggttttgccatgttggccaggctggtctcgagcgcctgacctcaggtgatccacccaactcagcgtcccaaagtgctgggattacaggcgtgagccactgcacccggcctataattttttttttaactatactttgtttcttccagatgtacctcccacctttagttactaagtcagaaattcaaagtatgtgtcaaattggtaatgatctagaaaattaatctctggtatccatatgggttaaatcaaataggcactatttgtatactacaggtaaatatgtaaagtggtataatctctctgaggacagctaagtaatatagataaagaactttagtgtttataaccttttgaccttacaattctacttttaggaattaatcctaagaaaattaaaggatttataaagatttatgtataaggataaagtagttttaaactagtaaaaaacagaataacctgaaagttggttaatttcttatagacccacaatgtggccattatgtttttaaagaatttttaatagcataggaaggaagaaatacaaaaagtatgagaaagagcaatacagagtatcatgaatgctacagtttcactggttgtaaaactgcttttcaaatgcatagaatatgctatgcatatatcctaccagacatacatgaattgtctttaagaaataaataaaaattaggtatgtagcatagaggaagaagacctaaaaactaggaggatagcaaatcattagaatatttactaagtgaaagcagaagaaaaatagtatttgtgctttagttcataggtgaaatttgttgaggaacaaaaccattgcccaatatttttctttgtatggagaatcttcctggtacattttttggatgaagtatagtttactgtgttcatgatataaaaacctttttatatttgcctagatattctgatatgctatttctgtaccctgtgtcactgagctaatatgtctctctcagtaaaaaagttcttcatgtattgaaatattttagctaaactttatatggtctttatttcaggatgaatttacaggaattgaacccttgagcgaggatgccattatcacaggcttcagaaatgtaacaatttgtcctaacccagaagacacttgtgactttgccagagcagctcgttttgtatccactccttttcatgagataatgtccttgaaggatctcccttctgatcctgagagactgttaccggaagaagatctagatgtaaagacctctgaggaccagcagacagcttgtggcactatctacagtcagactctcagcatcaagaagctgaggtgattggggatttacaggttttacaaaccagattgtttactctcttattctgcatgtgcttgtcagttacagtaatcagttatcaagttcttactaactgccaggtactgtgctaagtgctttacatgagagtagggctgccccagatgaagtgtcaatgggatttagtgattgatttggatgtgagggttaaaagtaaattttgatggtagagaaactaagtggtccgagaggagtatagtaccattgaggaaactttgcaaagtgtacatgactgacgaaaaggaggcatttagtttttctttaatattgagtttaaaatagtggtaggatagcttttgttaattttatgtatttatttatttattgaaatggagtctcactctgtcgcccaggctggagtgcagtggcactatcttagctcactgaaacctccgtctcccgggttcaagcgattctcctgcctcagcctcccaagtagctgggactacaggtgcgcaccatcatgcctggcttatttttatatttttagtagagacggggtttcgccatgttggccaggctggtctcaaactcctgacctcaggtgatccacccgcctcggcctctcaaagtgctgggattacaggagtgagccactgtgcctggccagcttatgtgaattttaaataggcaactagagatgtgttttttaaaaaactatcttttgatagagaggtggaaatgaactatggaatagatatgagggaatggcttatggccagggtctgacacttgttttaggtcagctaatttaactaattccagttttaggaattctttgtaattggcaaatttttgcttttaaagctacattttgagaggccagatgcagtggctcacctctgtaatcctggcactttgggaggctgagggaggcggatcatttcaggccaggagttgaagaccagcctggtcaacatggctgtactcaaaaaaacttttttttgaaactttttccctacaggcttttaagcacatttgctagcatgtattcacattgcatgatttgggtttctcttttctttgcctaaccttttcttcttgaagaaaaaaaagtccagagaaaggataaagaggaagaaagtgtcaatgttagtgtttctcaatattatggaatatagagtagatatttactataggtaaataaagcataaatccagaaatgtatgctggacatggcttattcaccaggtttagaggaggttacctagattctgatttggggaaataatggacttgaaaaatgagactattgctgagtgcattggctcttgcctgtaatcccagcactttgggaggctaaggtgggaggatcacttgaggccaggagtttaagaccagcctgggcaacaaagtgatgccttgtgtctaataaaaataaaaaaaaaaaatagctaggcatggtagcactcacccagctatcatttcctgggctcaagtgattctcccacctcagcctcccaagtagtcccagatattagcttttttgttttacaacctttcagctacttgggaggctgaggtgggaggatcacttgagcccaggaaatcaaggctgcagtgagccatgatcgcaccactgccctccagcctgggtgacggaatgagatcctgtctcaaaaataaaatgaaaagtaaaaaaaaaaaatgaggctatcaaataaattgataacaaattataaattatttaaacctaaattttattgtgttaaaaaataaaagaataacataaaattataaaatgtgtacattaaggccaggtgcagtggctcacgcctataatcccagcactttaggaggctgagacgggtggaccatctgaagtcaggagttcaagaccagtctggctaacatggtgaaaccctgtctctactaaaaatacaaaaatcagctgggcatggtggcaggtgcctgtaatcccagctactcaggaggctgagacaggagaatcacttgaacccgggaggcagaggttgcagtgagccaagatcatgcagttgtgctccagcctgggtgacaagagcaaaactccatctcaaaaaaaagaaaaatgtatacattaagaatttatgaaattataacaaagttgatatatattattcctataagaattaacttatttttgattcttttagcccaattattgaagacagtcgtgaagccacacactcctctggcttctctggttcttctgcctcggttgcaagcacctcctccatcaaatgtcttcaaattcctgagaaactagaacttactaatgagacttcaggtaggatatacatatcactatatccatgcctagtgaacacttgtttatctcagcaaactgagctgtatgtttttctttttttgagacagggtctcactctgtcacccaggatggagtgcagtggcacaatcaaactcactgggctcaggtgatcctcctacctcagcctcccgagtagctgggaccacaactgtgccaccaccaatttttgtattttttgtagaggtggggtttcgccatgttgcccaggctggtctcaaactcctggcctcaaaggatcctcccgcctcagcctcccactccctgggattataggtgtgagccaccatgcccagtctatgtgtttttccttcttaaagaagttgccggccgggtgcggtggctcacgcctgtaatcccagcactttgggaggccgaggcgggtggatcacgagggtcaggagatcgagaccatcctggctaacatggggaaaccccaactctactaaaaatacaaaaaaattagccgggcatggtggcgggtgtctgtagtcccagctactctggaggctgaggcaggagaatggcgtgaacccgggaggcggagcttgcagcagtgagccgagatggcgccactgcactccagcctgggcaacagagcgagactccgtctcaaagaagttgccataaattgtgaaatttctagagtagattagtacgaagtgaacacagtttcataaacacctgagacaggtgagtgtagttaaattaacagtgctgactgtgtaatcttgattttttttttcttctactctgttataatatccattttaagcattagggtttttttggtgatatattttcacctttccctcccactggcagaaaaccctactcagtcaccatggtgttcacagtatcgcagacagctactgaagtccctaccagagttaagtgcctctgcagagttgtgtatagaagacagaccaatgcctaagttggaaattgagaaggaaattgaattaggtaagtaccattgaactcatgtcctctggttcatgacagtatacaaataagtgattatttgtacttaagcttgatgcttgagcactgtaaatattcctagattgtattttttaaaaaagcaatatagaggatgacacatcagtaacttcatgtcctaataataggaattatgtcttctcctcttgcaatctttaacaaattatttttaaaagtattctagatactactaactggcaaatacaccagtgcctctatcccttaaaccaggaggtaaaagctacagggctgtatatgttcacagtgatttttaaatggaatcaaactttctcaacaggtaatgaggattactgcattaaacgagaatacctaatatgtgaagattacaagttattctgggtggcgccaagaaactctgcagaattaacagtaataaaggtgggactgattctttataatttcagttactttgtaaataatacggattggagcaataactgtcctcatgttaccatcaaatctttctaataatctctttcaatatgtccaaatatattaagtatcctttcagtttcattttttttaggaaatctctgctgatactttctggcctgctccaatctggacaagttatacattagctttcacacaatcaccacacacaatcaccttggaatttccatttattatcatcctaggtattcacattacctttgtcttatattggatacctagtttctttttatctttgttttttaaaggacacggtctctgtcatccaggctggagtacagtagcatgatcacggctcactgcagcctcaacctcttgagctcaagcaatcctcccacctcagcctctggaatagctgggaccgtaggtgcacgccaccactcccagctaattattttttgtagagacgggggcctctctgtgttgcctaggctggtcttgaattcatggctcaagcagtcctcccaccttggcctcccaaagaactggattacaggcatctaactttgcttttgaatttttttgccattctgagtctcaaagctttgtgtgaagttatttttccttctttctggatccttataggatcttattcttgtccccactattctgaaatgtcacaattacatgccttttcataagtttgttgtcacttatgtgctaggtactcaatggccatttcaatctgttaattccctcagttctgagaaattttcttcaatgggaaaattatttttcccctcagttttctctgttctcttattctctaattccttttattagaggtgtatatggcatctttggacagaacctctaaaaatttaactttttttctcctatattctctctttgtctttttactttactttctgagtatattatcagcttaatatttttggtctttttactaggtttttatttctatatttaattttcaagagctctttttaaaattttttacccctttgtcatctgtttcttcttgttttcttttttgtctgttttgatctctctcacactacaggctttcttcaagtctttggctctctattcgtatttaagtatgggacattgaaagctctgtgtatatggaaagaccttgacagctgtggacctcaatgtaggatgatctagtttggccattttattggaaaaccctccaatctttagatcctttctcttgacctgatcatagaagtcttctccctcagagaagacttctaattttctgcctggagcatataagcctggctgctagctttctgaaatctgagtgaggaaattggtctgaagaatagaagagcagggaggtgcatcttaactgctgcatatataacatctgatatatatactttttcctgttttctatgttatttctacccccctcagtggtgcctagtgccctctagtccagagcccttctgttttatactcactaggtaataaacttctggacttcgagaataggggagaggtagttgctgggctgggctatgggagcagaggagggaagctggggtctaccttcctgtttttttgtttttttttttcttcgagacggagttttgctcttgtcaccctggctggagtgcaatggcatgattttggctcactgcaacctctgcctcccagggtcaagcgattctcctgtctcagcctcccgcgtagctgggattacaggcacccgccaccaaaagcctagctaattttttgtatttttagcagagacggggtttcaccccttcataatcattggtcaggctggtcttgaacccctgatgtcaggtaatccacacgcctcagcctcccagagtgctgggattacaggcatgagccactgcactaggcctaccttcctcttaaatgggattcaatcactcctgtcttagctccaccctcagcctcacttccatgggtaattggtgctgccagttatatagtataggaaaatagccttgtagtgtaaatgtagctcagctttctcctctgccaaaatcagtttttattctaattggattgttacctcctgttctctttccagcttatcctctttccagaatttgttgttattgtgtcttttatagtagatttatgcctttaaaaatatctctttattatttctctatcagaagggctggaaggaatgtgtttcaacctgccagccataaccatagacttaactgaacttatttttaaaatacaatgtcttacaggtatcttctcaacctgtcccatgggacttttatatcaacctcaagttaaaggaacgtttaaatgaagattttgatcatttttgcagctgttatcaatatcaagatggctgtattgtttggcaccaatatataaactgcttcacccttcaggtctgtaatactaaaaacataatttaaagtcctgaagtagagagatttgtgctccatttagcaaaggaatttagtacaaaattcctgtcaatcttctagaaatagaccaattcaagtataagttagaagcattgataattttctcgttattttgaccaaagatctctttggtatttttttaactttttttggtccgttgtcaagcataaataaaagtagaattgtacaatgaactcccatgaactagtcatctatgataatcttagctcatggtcactcttgttttagctatactacccccactggatagtttttaaaacccagacacaatatgtcattttactcttcggtttgttcttaagaaggtttgctatggattttgatgataatatgaattctcaaaaatggttggaatgagggtattttaaatccatttattaagtacctattttgggccaggctcatgcttgatgcccttcatcattatgtcattaaatccttacaaacaatcttatgggagatggcagtgttattaaaactgggacatagactcagtctacagaggtgcctacgttccagtagagaacaaggaagactacaaaccatcagttttcaaggtattgagtataactacgatctgccaaacttgagaaatagtgagttttctgtccttcaatttccaggatcttctccaacacagtgaatatattacccatgaaataacagtgttgattatttataaccttttgacaatagtggagatgctacacaaagcagaaatagtccatggtgacttgagtccaaggtgtctgattctcagaaacaggttggtccttttcattcttataattctgccagctgtctcttaaaacatggatagttgccacttttttttttcttttttgaggcgagggtctcactctgtcacctaggttggagtacagtggcatgatcttggctcactgcagcctccatctcccaggttcaaacgattctcccatcttaaccttgctagtagctgggaccacaggcgcgcaccaccacacctggctaattttttgtattttttggtagagatgaggtttcaccatgttgcccaggctggtctcaaactcctggcctcaagtgatctgcccacctcagcctcccaaagtgctgggattataggcgtgagccactgcacccggccaagttgccaatttttaaagccttttgataaatgccatatcgaggaacatattatgttaagagagtatttacctaaaagtcaaaaatcattaagaatagtttaaaataattcaaagaaataaacacattgaggaaatagattaaatcagataaaagaattaatcactgagtattgtgatgatatatgtcaagatgagatataaaatatgaatattttgaggaatataaagtggattgtttagtcattctttgagtgggaccagtgccactctagcgaggatgccagcaaaatcaaggcactactcagtttcatagaccaaagcttaagtcaggcctaactgacctgttagccaagagaagtgggtaaaaccagagttcaaatacaaactatgccaaggaatggggtttagtgttcaaattaaacccagtgtgtccatcaggttcaaggggtgagcacagagcaggaaataataaatgaatactaaggactgagaaaatatagatcacgttcaggcattaactaggcaaaaacagtccaacatttttgctttgtgaaaagtactagaggactactatattcttttagtgatcattggtgttatagtatttgagtaaaagcagcctggtttaaagatgctgtgtctgcccaaccctgtgtcttgggtgaggtgttaactttgtttctgaggccactggtatacactaatagctggacttactctttacatttcttctgaatacttaatctatcagaagagattgaattagactctaaattatagttaacgtggaaattaaaagaaccctcaatgtgttcctgtgattgtaaccaaaagaaccagagaatcccaccttctcccctgagatagcagagtcaaaggctttcccagacataatgtagcagcatttctcatccagggcaccataggtattttgggtgagacaattctttgtgcaggtgtgttccaagcaatgcaggatgttttatattcctattcccccccacccacccaattaagtgcaagtaacaatcccctaagccgttgtgaccaccaaaaatccccccaaatttccaagtatgagaacccctggtatattttcactctacttaacattaaaatgacagtgctgaaattcccagggctatggaaattggaagcagaggttttttctaagccttttagaattggccatttgtggtctaatgaagtacgataacccttctctcagccactagaggctctaggaaagtccatagtattaaagaggcattgctttttactttgtcactgcttatcaaatttaatcagaaatttcacatagattcataaggaattaaaagccagaaaggggccgagcacagtggctcatgcctataatcaatcccagcacttttggaggctgaggcgggcagatcacctgaggttgggagttcaagaccagcctgaccaacatggagaaaccccatcctactaaaaatacaaaattagccaggtatggtggtgcatgcctgtaatcccagctacttgggaggctgaggaaggagaattgcttgaactcaggaggcagaggttgtggtgaactgagatcgcaccattgtactccagtctgggcaacaagagcaaaattctgtctcaaaaaaaaagccagaggccgggcgcagtagctcacgcctgtaatcccagcattttgggaggccgaggcgggcggatcacgaggtcaggagatcaagaccatcctggctaacacagtgaaaccctgtctctactaaaaatacaacaagatagccagccgtggtggcaggtgcctgtagtcccagctactcaggaggctgaggcaggagaatggcgtgaacccgggaggcagagcttgcagtgagccaagatcatgccactgcactccagcctgggtgacagagcgagactccatctcaaaacaaaacaacaacaaaagccagaaagggctggatgcagtggttcacatctgcaatcccagcactttgggaggcagaggcaggaggatctcttgaggccaggagttcaagaccagcctggtcaacatagcaagaccctgtctctacaaaaataaaataaaagccagaaagaaccttttgaaattgcttagtttagttgcttactttagtttctgcatattttttgtgaggaaaatgagatccaaaaaaatggaatgtcctacccaaagtaacagtgagtgagtagctgattagagggctaggacaccttcatgcatgcttctttttattaatctatgagacattttttccctatgcctccaaagttatataaatattttacaattacactgggcatggtgactcacatctgtaatcccagcactttgggagaccaaggcagaggatcacttgagcctaggagttcaagaccagtctgggcaatataatgagacctcatctctacaaaaaattaagaaattagccaggcatggtggcacacaccagtagtcccagctactcgggaggctgagatgggaggatcgcttgaacctaggaggcagagactgcactgagctgagatcgcaccactgtactccagcctcagtgacaagagtgtagaccttgtctaagaaaccaaacaaaacacacacatgcacacactttacatatatatataaaatacatatgtatattttatatatatcagaatccacgatccctataactatatatatactatatatatatatatatatatttttttttttttttttaattatagtatagttttatggtggccaaaaaaggttggctcttgtgccaaggaaaaatgagagcaattatcaattttaaagtaaaatacatagatcattctgtgccgtggaggtatgtaattggagtagttaaagactgtatttaggaatattgcaccaatatcaggagtttgagggaattaattgagaaaaacagacaaaaggaacacatgaaaacccactcttttcatttataaacagttcctatgtccccttggagaatagcattattgcataggatagataaacccaaggaaaacaaaattaattgataattaattagtattataaagatttttttagtaaataactggaattacaagtaagagtaagataaaatatggtgttttacaagaaattttacaatacagataggactttataaaacagacttgcattgttttccattaaactctggaaggaagaatctaaacaatacttggaaagcctatctggaatagtaaacaagaaaggctatgacacctataaaattttaatttcctccatcataattcctgtcagtgtataaatcattgcaattgtatgtgttaatgtgtacagtacagggaagaagcctgtgctctgcttccatacttactttatataatatggaagcttgataaatgtttaatggtggccatgcaccgtgattgaaatatactttgtgtcaccaaagtggtgacattccttccgcattgggtggacactgccactgctctgtcttacaggtgcattttcaaaattaaccactggagggagttgttggcatagctaagatgtacccaaggtaccttttttttttaaagaccagctatgcagcttctttcatggcctatttttattatctccttctcttaaatctgggctcagaatccacgatccctatgattgtaacaagaacaatcaagctttgaagatagtggacttttcctacagtgttgaccttagggtgcagctggatgtttttaccctcagcggctttcggactgtacagatcctggaaggacaaaagatcctggctaactgttcttctccctaccaggtaagtgtaaaacaagcctgagcaaatatggagagggtttcttaatctctttattatctagataagctataaaagctactgtttactgataccgactcctagaatagatgacctagttttcaaatatcaccaagtcaagtaaaatgtaacatttttgtgttacagcattgaagaatatacacatacatgtgcaaacacatgactaactctgtaaccgagtgccagggccactcctactgcctaccacccatgtaatcttttataagtcattttctgtgatcttctctgtaaaatagggataacagtctctgctatgtgtttatcagaattgttatgaggagtaaatgaagtaatgtatataaaaagaacattagcacaaatgtaaagtcttttgtatggtggcattatatgcagaaattccttctaactcagctttagacataagacatttgctgattgaatatgtagcacaaacctgaactaatcatgtggaccccatttagatcacagctggagttcatgcaaactcagtaggtctacaaatttgaatgtgatagtccaaatatttcatcttttgttcttaaggataattcctagaattggctctattgatcacttctttggagagcttctccctttactgtaagggtgaggaacagtctactaaaatgtatgtcataaaataaacttagttaagcactgtaatacctttcaacttcctaccgaaataagctgccatggtagaggcagagaattattttagctgatggtgctttttgtgatttcaggtagacctgtttggtatagcagatttagcacatttactattgttcaaggaacacctacaggtcttctgggatgggtccttctggaaacttagccaaaatatttctgagtaagtattgatgaatgtcagggtctctgcctgtcccaataattttctgtttctcttgggtgctatctctgctttggcagccttagttttttaatccaaatgccatggttccagtagtttcagccagttttcattagagtatcagcagagcagctagtgcaggaaaaaggaactgcttactaaaaataagattcaaaactattcagacttcaggacatcattctgaatctagctgtatcttccagactacagctatagtatggaagcttccctgtttagatatgtgaaaagaagcatttcatgagaataattttctaactaattggtgttagccttaaattcctttttctttatttatttattttttgagacggagtctcgctctgttgcccaggctggagtgcagtggcatgatctcggctcactgcaacctctgcctcccaggttcaagtgattctcctgcttcagcctcctgagtagctgggattacaggcgtgcgccaccatgcctggctcatttttgtatttttagtagagatgcggtttcactacgttggccaggctgatctcgaactcctgaccttgtgatccgcccgcctcggcctcccaaagtgctaggattacaggtgtgagccaccgtgtctggcctaaattcctttttaatagcaattattaccaaaagttaataagcatcctttgaaaagacttacatttctaaactatatgctaattttaggctattttttatttaataagtggatagaaccaaaccagataactgactctcctggagaagaagtaagtggtctcttaataagcactgcttggtctcagaaccttagtactccctcaagcctgctcataaaacttactaagtcagccgggcatggtggctcacacctgtaatcacagcactttgggaggccgaggcagattacctgaggtcaggagtttgagagcagcctgggcaacatggcgaaaccttgtctctactcaaaatacaagaaaattagctgggtgtggtggcacatgcctgtaatcctagctacttgggaagctgaggcacgggaatcacttgaacctgggaggcagaggttgcagtgagctgagatcgcgccactgcactccacccagggcaacagagtgagactccgtctcaaaaaaaacttaagtatctacgttccactttagcttatcttagcaaataagttcccagcctgtcacctattgttatattctttggttaaaaaaaaaaatgagtgttgaagatttaatgccccttctctattttcatctttgaataattgaattgtacttttctcttcatttaattcagaacttggccagtgttgtctcttacatgaacttttaaaaataggcttgaaatacaatgtaagacatataggatggatataggcatgtccacttggctatggtccaggcaggtctggctaacacaagcagaaacaagtggggtcagttggggtttcctaacagccctgccttatctaataagggaagtttctctgatcaaaagaaaataataagaagcaaaggtacaaacatattaagcagtagttagtttagtcaagcttacgattatcagagaattgtaaagaagatccactactggggtaggagaaaggagctgtagcctttttaatgacctagactctaggaaagttagaggaaataaaattcctttttcttctatttgtagaagaaaagtgctatgtcttagtacacagaggaaatttatagatttagatgagagatcttctttccctttatgtgcattgtatcttggcttttcccactatggtagcccttttttgtagttcttccctgggctttcaaaggactatttgaatgatctctaaccctagagttctaggtattaccttacaccattttggtgcataaatgtaccactgagttaaactaaaaggaattataattttcatatgcctaatcttgatggaaatggttttatatatttttaggctaaaagatggtgaattgtggaataaattctttgtgcggattctgaatgccaatgatgaggccacagtgtctgttcttggggagcttgcagcagaaatgaatggggtttttgacactacattccaaagtcacctgaacaaagccttatggaaggtagggaagttaactagtcctggggctttgctctttcagtgagctaggcaatcaagtctcacagattgctgcctcagagcaatggttgtattgtggaacactgaaactgtatgtgctgtaatttaatttaggacacatttagatgcactaccattgctgttctactttttggtacaggtatattttgacgtcactgatattttttatacagtgatatacttactcatggccttgtctaacttttgtgaagaactattttattctaaacagactcattacaaatggttaccttgttatttaacccatttgtctctacttttccctgtacttttcccatttgtaatttgtaaaatgttctcttatgatcaccatgtattttgtaaataataaaatagtatctgttaaatttgtgcttctaacatgtcatgtagtttttgcaaactaaaataacagatggcttaactttgcagagatgaactattttgccatggaaatttatatatcctagacttcgaattgttacaatagggttgtgatgagacagagtagccaactatttctttaggtgggtctgaccttccaataagtggtctagactgaaaagtaggtaagatgatatgcataagaccaaatatccttcaatttcaagtggcatgattgtatacatggcttatgttttaatgttttcacttttttggagacagggtgtcctctgttgcccaggctatagccttgatttcccaggctctggcaattttcccacctcagcctcccaagtagttgggagcacaggcgcacaccaccacatctggctaattttttgtatttttgtagagatgggatttcgccacagtgcccaggctggtctcaaactcctgggctcaagtgatctgcccacctcggctgcccaaagtgctgagattacaggcgtgagccaccatgcccggccctaatgctttcacttttatccaccaagctccttggtctatttatataatctagtggcactgctgctggggtcttttgattaggaatgtgactgttagaaagtaaaagcaaatgtgttaaacagggtttagcaacctttcagaaatggaataatcaccattctattacatgcagaatgacttggagggggcaagggtcagtgaaggaataaaaggaaattttgcttgaaagatttgaggaagcaggaggtcagaataaaacgataactttgaagtatgaaatagtttggaagagaataggcctagataaagtattggactcccaaagggaagcgtgaattacacctggcctcagggatagggaagaaaattggtagaaaaaggcaatgaaaattatccaactatcagccgggcaccgtgactcatgcctgtaatcccagcactttgggaggccaaggagggagattcatgtgagaccaggagtttgagagctgcccgggcaacaaagtgagccccatctctacaaaaaataaaaataaacataaattagttgggtgcagtggcacttgcctatagtcctagctgcttgggaagctgaggcgaaaggattgcttgagcctgggagttcaaggtttagtgagcatgattgcgccattgcactcttgctccgggcgacagaacaagactctgcctctaacaaaaaaaggaaagaaaattatctaattatctatttcatatctaaataccaaaattatctaatgttcctccttgctagtgccttattttttttttactctagttgtcactgttactgctctaagattgctggaaagcaaaaaatcctacgtatgtctcaactaaaaatatttaagcatatatagttgaagcactgcaacatgacttggatctgaaagataatcaacttagaaatatttgctcttaaccaaaatacagctctccaaacattctcacatttgcttcttatactgatgatgtaaaatgatatatctgtatcttttacataatcaagcccctctcctctctgctctcctcatttctcagttcactgtgttgacacatgaagttattactctgagactggacagaaaatttagatttattcttaatataggcttagctactatgtagtgaatagcaaccttgacagcaggctgctgtgaagtaaagctttgtttctggagtaggctgtgaggaaagggaggggaatctgaggaaactactttgttagagaacttgcatctgttttgccacccctcccttccattccaatctcttccaaccccagccctttgtagagaggagaaaagtttacctgaccatttaggacttacaattgtcttaggttttcagtttgcctaagcataaaaccacaaagtgagatcctttacatttcccttatattttatgcttatttgtcttgggagaaggaagcctttcctttttggcagaagtttcaaatggttcttatttcttgtctcactaaggcagtaatagcatagtgatggacctggttgggtagtgggggacagctgaaaaggcaggagttttacttttgtttgaaaagagaccacatcacatatagcatctcaccattcacaaagtgtacatccaccgatactactccactgttagagccttcgtcctcctatggcagtagtataagaaaccttccaccaagtcagagtgctctaactgatgccaaacctaaacctggaaataaagattttcctggagcagtaagacttcagactgttggttgagctattatctcaaggtagataagaaagcctttcagaaggtgagcacaaggttctttgaaataactcattggtgtctttaagctgaagcctttaagcaaagacagcaaagaaattgcatctgaaaatgaggaattcttccaactgcaccagttctttctaatgtgccaaaattagcttctaatttggctcctaaaataaaggtttccctagtgaggagaatgcatttaaaaaaattttttttgtaatatggcaaacttctaccttaacggggtccttggttctaccagagacataagaagctatgaatatttaataggacaaagatggcattttaagtcagtatgtgaaaagattatttaataactggtgttaaaacaatggattaggctgggtgtggtggctcgcacctgtaatcccaacactttgggaggctgaggcgggtggattacctgagtcaggagttcgtgaccagcctggccaacatagtgaaaccccgtctcttctaaaaatacaaaattagccatgcgtggtggtgcatgcctataatcccagctacttgggaggctgaggcaggagaatcgcttgaacccaggaggtggaggttgcagttagccaagatcatgccattgtactccaacctgggcaacaagagtgaaactctgtctcaaaaaaaaaaaaaaaaagaaaaaacaacccacaatggattaaagcttgaactctatctccattgacactactagttcatatagcaccttcgtgcaaattagaaaaggccccttcctttagtggattcagtacctcccaatgcaccataccttgactgaatttcagtccccacttaccccctcagcctggtacccttgtgcagcaaatacattgtgcagtcttatgcattgatcttgcctgtttcactgcttatccccaaaataattttggagaaatcagaaattttaatcaaaatacaatgtaatagatggttttgcaatcttttgcctgtgtgacataaaagcaagatataaaccagaagattgctattactatagtagataaaaaattaaatataggatggatacctatcctcccctccaaaaaaattaaaaccataaattcaaactaggaacatttactggcaacaaatatttacatctttttttgcctcgactcagggatcttgctttgtcgcccaggctgcaatgcagtggtaagaagatcaactcctggtttcaggcctcccaagtagctgggagtctcggtgcacgccaccacacctggctaatttttttaatctttagtagagacaaagtcttgctgtgttgtccaggcttgcatccactttcatctggtctcatgactctgttgttcctacccacctccagccaaatcagaaccctccaaagactttaccatggcctataagaccccaccctatctgaccccactctctctgacctcctcccggactcccctcttcctcacccacactgctgtaggcggcctccttgttgcttctcaaatgtgccaactaatttccctctccctctctttaaagccttttggcttttaaggccagttgttttttggccttgttttccttgatcttcatgtaaattactccctttcttcctttcaggtaggtgtcttctccaatctccactctatcagagaggctgtccctgaccattctgtacactgcacagaatagcatcccatcccacacacactgctatcactttctatccctttttaccctcctttatttttctattgcacctgtcaccgcctcgtgcgtgtgtctgtgttgtgtgtgtgcgtgtatacatacacttttttttctttatctctctactagaatttaaactccttaagggtggggattttctttgtttcctgtttgactgcactgtctagaacagtgcctgaatgaataaaactgttttacctaaagtacaaaaaactcttaaaaataaaaaattgataaaagaaacaaaggacatgaacaatccactaaaacattttaatggctcatatacatgagatgttcattcctaattaaataaaatgcaaaataaatgagaaattgtcatacactctaaatggttgaaaattgtatttgtaaggatgataagaaacaggcattcatatattattaattgggatgcagattggtacattattagaagttgatttggcaaaagtcacttaaatattccctttagctgagaaattttcctaagaatttatctcacaaaagcattgacacaggagctcagagaaagcactgtttctaacacttgtcctgtctgcttccaagactcgacagtccccagagggataatccacgtgacagaccccaggaaggtagtgcttgcactagtgcagaggcgctggcaagccatctctgtaggcttcagggtgcctcaccattggcagggaacgcccttccaatttgccatgagcccttgtagatggcagaacctgagagataggcagacattttcagcctatgtagggaaaaaagccgtggggaaaaagtgattgcctttggtggggagagtgtatgggagtggagagaggaaagaatgaaggctcttacttttcaatttgtacatttataagcattttgaattttctgaccatgtacatgaattgcttttttaaaaaatgtactgggttaatctaggctaagaaattataggccatgtttttgccatcttttccctcctctatgttgtaaaaactaagccttgttaagtgttcgttttttaaaaaactgggactttggaaagctttattatctaaacatgaaagcaaggttgatatggaattcaaatgaaagtaaaaataattttaaatcattgaagataatatatctgagcttttatttttagtatatgaaaattcatgtttaaatgttttatactgttctattagagatatgctttgtaacattaccatcttcctactattacaacttcctatgtctgtgaacaaattatgtatcaaattatgtaaagtccaactcttttcaacacaaaatacattttttatggctttcatataaaaacttgagttttcacaaagtgatgtatgtttaagaaaagaacaaacagtgatgaacttaggctaaacttctatagacatgtgctttttttccatcaaaacatattacttccaataatcttgctccttagaggcttgtgcggcaaacctttgacttatgaatagtatcatcctgtaaattcatgttagcctttccataggaaattgtggttgtcctgtcaaactgctagtttttaagccccttgtgagcaggggactatgtgtctattaattttatatactcccagaaatgagctcatggttcttaaaaataagtagtgaattaaaatattggaaaagagcagccacaagttcagaaagtagttacattggcaccttggtgagagggaaagatatctgagtgagtctctagatgtagctgaaggtgtaatctcactttcatttttagtatgccactttatacatgtttctttaacatgtaataattgactgctgaccttacattgcaatacacttcactgtcctgtttacacctttttcaattaaatgttattttcacaagtatattccactgaaatgtgtactgtatttcctattaaattgcatcagtcttgaaattaaagtgaggatggcatttcataaaaaaataccagttaaaatctgtggacaaaaagatatgcattttatttgttttcttttttaaaactttttttttttttttggcattttaaagcctagctgtcttcccacccccccgcatccccccaccaagagatggggtttcaccatgttgcccaggctggtctcgaactcctgagctcaagcagtttgcccaccttggcctcccgaaatgctgggactacaggcatgagccaccgtgcctggcccttatttgtttccttttgcattttaaacaaaattgaaaaatctgataaccctagaacaaagtgataacacaatttaaaaagatgacaagcatgaagcttcagtgatattgtctcattcaaggaaatgatagctaagggtgaatgagtgtgcagtgagtccagagtcccagcgagtccagggggtcaggctggcagaaatatgagtgaggcagagtagacaaaagctaactagcgtggccaggagagaccttttcagaccaactgtaccccatcactgaacagatataaaagccattgcttaggactcactcagaccggcatgttcaatatcctagcatatggaccagtggttgaggttccatggtataggccattgggggcagctgcatagctcctccctgtaccattcctctgctacattttattatgtattgcgttggacttgtctctatgtatggccttacctctccaactcatatgagtttgttgggggcaagttttttttttttttttttttgagatggagtttcactcttgttgcccaggctggagtgcaatggcgcaatctcggttcactgcaacctccgccttctaggttcaagtgattctcctgcctcagcctcctgagcagctgggattataggcatccaccaacatgcccaactaattttgtatttttagtagaggcagggttctccacattggtcaggctggtcttgaactcccgacctcaagtgatccacccccgtcagcctcccaaagtgctgggattacaggcgtgagccactgcacccggccagcaagttctctttttatgccctggttaggacttcagtatagtgctcacattataaggggttgactttacaggcccaaggtctgcttagaaccttctcagcattgagatggctctctgcctatggtaccaaagcaaacactagcatggtggctagaaattctgcctttagccagaatatctggacttgaatcctagctgtgtagcagtggacaagttaacctctctgagccagtgtcatctataaaatgaggataactgaagtgcctactttacggagtattgagaactgaagctttaagtacgcatacttgtagatgtttgtattgatttagttctaatgtttaatggcctaaggttctctggaaacctctcaagtaatttgagatctcagctggttgatcggagccttactatcttttgacttaatgtgcacagtgtagctaaacctgtgatataataaaggtaagtgaaacatgtagtattctgtaatttagagataagggaaaattagttgtttctatcaggataagtttcagggaaccaaatatttgtacttaaagagatagtccttaagatcagccaaataccaaggtatcaggaaagtccatccagtccccattctcattccacaaggccgtttcagcccagaggacctctggcttgcagctgggctgcttctgtgccatgttcagagtgcagagatctttaaaaggctgacttgggtcctgtttgctccaaggtaccaggcagggtcttgctgcccaccagccacttacaggtgcatctcagtcttcccctctccaaccaggagaaatggctttctagcttaggggcatggcctactgatcccatttaaggcatctagtcccttcctgagactcttgttgctagagcatctagccacacaacaatgttgcggtcaacagtgaacctcatatctgactgtggtctcataagatataataccaaaaatttactgtaccttttctatgtttaaatatgtttactttttacttttattattttttgagacaaggtctcactctgttgcaggctggagtgtggtgacatgatcagagctcacttcagctccatcttctaggcttaagcgattctcccacctaagcctcccaagtagctgggactacaggtgtgtgctaccacacctggctaactttctttttttaaaattagagacggtgtttcacaatgttgcctaggcgggtctcaaactcctgaactcaagggatcctcccacctcggcctcccaaagtgctggtattacaggtatgagcaactgcctgcagcctaaatatgtttagatacacaaatgcatacctttgtgtcacaactgcctactgtattcagtacagtaacgtgctgtgcaggttgtagcctaggggcaagaggctacaccatatagtctaggtgtgtagtaggtttagaccatctaagtttgtgtaactacactctgatgtttgcacaatgaaactacctaacaacgcatttctcagaatgtatctctctcattaagctagtatctgtcattaagcaatgcacgactgtatttctattttatgctctcctacatccctcacctgagccaatgaataaaaggcgatcacttgcttaataggaaaaaggaaaggggaaaataataggaagccctgtgaactcaattcaggaactggaaaacctgggctcaacagctgcttagattaggtcactgcctttgcttgcccatctaaactattactgatggctcctaccccaaagggttcttatgagaatgaacacaagacaggaggtgagcatggaagttccttggcttagaacaagcagtgtctgcttccccagcatccagcccagggcaaggcacatgggaggcagtaggagctggtgcaaaccactggtgaatctaagccactgttgagagagatgcctgacattcttattcactcaggcctgcagctgcaacctgttgactcctgttttactctttgttgaacacagaaatgtgttcatttttgccctccagggcagcaaataatatcttggaatgtggcaaaaaagataagcccctatatattaagttttactgtggcctccacagtgatgatggataccacgaagaatataacaaaatgtaaggcatgctcactcccttcagagagcttataatttggagaaacaggccacaacactttttttttttttttttttttttttttttttgagacggagtctcgctctgtcgcccaggctggagtgcagtggcgcgatctcggctcactgcaagctccgcctcccgggttcacgccattctcctgcctcagcctcccaagtagctgggactacaggcgcccgccactacgcccggctaattttttgtatttttagtagagacggggtttcaccgttttagccgggatggtctcgatctcctgacctcgtgatccgcccgcctcggcctcccaaagtgctgggattacaggcgtgagccaccgcgcccggcccaggccacaacacttaaaagccaagataatatatgagagaaataagtcagtcaaaaacggacatctcgagggaagccatgagcagtagctgatggagtggagcggtgtatatgttagactgaactaagggctagtgtggcatgataggggctggagctggcttatattaggtagttttcagctgcagaaaaacccagaagaacaaccaaaatatcttaagtggtaagaatatctgttatttcacataacagcaaacctggagctcagaagttcatgcggggcccaagttgtttccacctgcctattcctccgtcctcagcatgctggcttttgtcctcgagctggttcccttgtgggtctcagttggctaccacagttccaagttcctcaacaacttggagcagcataagaaaactttctcccaaaacc

SEQ ID NO: 655 - DNA, 3714 bp, Homo sapiens
accgttaaatttgaaacttggcggctaggggtgtgggcttgaggtggccggtttgttagggagtcgtgtgcgtgccttggtcgcttctgtagctccgagggcaggttgcggaagaaagcccaggcggtctgtggcccagaggaaaggcctgcagcaggacgaggacctgagccaggaatgcaggatggcggcggtgaagaaggaagggggtgctctgagtgaagccatgtccctggagggagatgaatgggaactgagtaaagaaaatgtacaacctttaaggcaagggcggatcatgtccacgcttcagggagcactggcacaagaatctgcctgtaacaatactcttcagcagcagaaacgggcatttgaatatgaaattcgattttacactggaaatgaccctctggatgtttgggataggtatatcagctggacagagcagaactatcctcaaggtgggaaggagagtaatatgtcaacgttattagaaagagctgtagaagcactacaaggagaaaaacgatattatagtgatcctcgatttctcaatctctggcttaaattagggcgtttatgcaatgagcctttggatatgtacagttacttgcacaaccaagggattggtgtttcacttgctcagttctatatctcatgggcagaagaatatgaagctagagaaaactttaggaaagcagatgcgatatttcaggaagggattcaacagaaggctgaaccactagaaagactacagtcccagcaccgacaattccaagctcgagtgtctcggcaaactctgttggcacttgagaaagaagaagaggaggaagtttttgagtcttctgtaccacaacgaagcacactagctgaactaaagagcaaagggaaaaagacagcaagagctccaatcatccgtgtaggaggtgctctcaaggctccaagccagaacagaggactccaaaatccatttcctcaacagatgcaaaataatagtagaattactgtttttgatgaaaatgctgatgaggcttctacagcagagttgtctaagcctacagtccagccatggatagcaccccccatgcccagggccaaagagaatgagctgcaagcaggcccttggaacacaggcaggtccttggaacacaggcctcgtggcaatacagcttcactgatagctgtacccgctgtgcttcccagtttcactccatatgtggaagagactgcacaacagccagttatgacaccatgtaaaattgaacctagtataaaccacatcctaagcaccagaaagcctggaaaggaagaaggagatcctctacaaagggttcagagccatcagcaagcgtctgaggagaagaaagagaagatgatgtattgtaaggagaagatttatgcaggagtaggggaattctcctttgaagaaattcgggctgaagttttccggaagaaattaaaagagcaaagggaagccgagctattgaccagtgcagagaagagagcagaaatgcagaaacagattgaagagatggagaagaagctaaaagaaatccaaactactcagcaagaaagaacaggtgatcagcaagaagagacgatgcctacaaaggagacaactaaactgcaaattgcttccgagtctcagaaaataccaggaatgactctatccagttctgtttgtcaagtaaactgttgtgccagagaaacttcacttgcggagaacatttggcaggaacaacctcattctaaaggtcccagtgtacctttctccatttttgatgagtttcttctttcagaaaagaagaataaaagtcctcctgcagatcccccacgagttttagctcaacgaagaccccttgcagttctcaaaacctcagaaagcatcacctcaaatgaagatgtgtctccagatgtttgtgatgaatttacaggaattgaacccttgagcgaggatgccattatcacaggcttcagaaatgtaacaatttgtcctaacccagaagacacttgtgactttgccagagcagctcgttttgtatccactccttttcatgagataatgtccttgaaggatctcccttctgatcctgagagactgttaccggaagaagatctagatgtaaagacctctgaggaccagcagacagcttgtggcactatctacagtcagactctcagcatcaagaagctgagcccaattattgaagacagtcgtgaagccacacactcctctggcttctctggttcttctgcctcggttgcaagcacctcctccatcaaatgtcttcaaattcctgagaaactagaacttactaatgagacttcagaaaaccctactcagtcaccatggtgttcacagtatcgcagacagctactgaagtccctaccagagttaagtgcctctgcagagttgtgtatagaagacagaccaatgcctaagttggaaattgagaaggaaattgaattaggtaatgaggattactgcattaaacgagaatacctaatatgtgaagattacaagttattctgggtggcgccaagaaactctgcagaattaacagtaataaaggtatcttctcaacctgtcccatgggacttttatatcaacctcaagttaaaggaacgtttaaatgaagattttgatcatttttgcagctgttatcaatatcaagatggctgtattgtttggcaccaatatataaactgcttcacccttcaggatcttctccaacacagtgaatatattacccatgaaataacagtgttgattatttataaccttttgacaatagtggagatgctacacaaagcagaaatagtccatggtgacttgagtccaaggtgtctgattctcagaaacagaatccacgatccctatgattgtaacaagaacaatcaagctttgaagatagtggacttttcctacagtgttgaccttagggtgcagctggatgtttttaccctcagcggctttcggactgtacagatcctggaaggacaaaagatcctggctaactgttcttctccctaccaggtagacctgtttggtatagcagatttagcacatttactattgttcaaggaacacctacaggtcttctgggatgggtccttctggaaacttagccaaaatatttctgagctaaaagatggtgaattgtggaataaattctttgtgcggattctgaatgccaatgatgaggccacagtgtctgttcttggggagcttgcagcagaaatgaatggggtttttgacactacattccaaagtcacctgaacaaagccttatggaaggtagggaagttaactagtcctggggctttgctctttcagtgagctaggcaatcaagtctcacagattgctgcctcagagcaatggttgtattgtggaacactgaaactgtatgtgctgtaatttaatttaggacacatttagatgcactaccattgctgttctactttttggtacaggtatattttgacgtcactgatattttttatacagtgatatacttactcatggccttgtctaacttttgtgaagaactattttattctaaacagactcattacaaatggttaccttgttatttaacccatttgtctctacttttccctgtacttttcccatttgtaatttgtaaaatgttctcttatgatcaccatgtattttgtaaataataaaatagtatctgttaaatttgtgcttctaa

SEQ ID NO: 656 - protein, 1046 aa, Homo sapiens
MAAVKKEGGALSEAMSLEGDEWELSKENVQPLRQGRIMSTLQGAQESACNNTLQQQKRAFEYEIRFYTGNDPLDVWDRYISWTEQNYPQGGKESNMSTLLERAVEALQGEKRYYSDPRFLNLWLKLGRLCNEPLDMYSYLHNQGIGVSLAQFYISWAEEYEARENFRKADAIFQEGIQQKAEPLERLQSQHRQFQARVSRQTLLALEKEEEEEVFESSVPQRSTLAELKSKGKKTARAPIIRVGGALKAPSQNRGLQNPFPQQMQNNSRITVFDENADEASTAELSKPTVQPWIAPPMPRAKENELQAGPWNTGRSLEHRPRGNTASLIAVPAVLPSFTPYVEETAQQPVMTPCKIEPSINHILSTRKPGKEEGDPLQRVQSHQQASEEKKEKMMYCKEKIYAGVGEFSFEEIRAEVFRKKLKEQREAELLTSAEKRAEMQKQIEEMEKKLKEIQTTQQERTGDQQEETMPTKETTKLQIASESQKIPGMTLSSSVCQVNCCARETSLAENIWQEQPHSKGPSVPFSIFDEFLLSEKKNKSPPADPPRVLAQRRPLAVLKTSESITSNEDVSPDVCDEFTGIEPLSEDAIITGFRNVTICPNPEDTCDFARAARFVSTPFHEIMSLKDLPSDPERLLPEEDLDVKTSEDQQTACGTIYSQTLSIKKLSPIIEDSREATHSSGFSGSSASVASTSSIKCLQIPEKLELTNETSENPTQSPWCSQYRRQLLKSLPELSASAELCIEDRPMPKLEIEKEIELGNEDYCIKREYLICEDYKLFWVAPRNSAELTVIKVSSQPVPWDFYINLKLKERLNEDFDHFCSCYQYQDGCIVWHQYINCFTLQDLLQHSEYITHEITVLIIYNLLTIVEMLHKAEIVHGDLSPRCLILRNRIHDPYDCNKNNQALKIVDFSYSVDLRVQLDVFTLSGFRTVQIGQKILANCSSPYQVDLFGIADLAHLLLFKEHLQVFWDGSFWKLSQNISELKDGELWNKFFVRILNANDEATVSVLGELAAEMNGVFDTTFQSHLNKALWKVGKLTSPGALLFQ

SEQ ID NO: 657 - DNA, 83103 bp, Mus musculus
  misc_feature (1)...(83103): n = A,T,C or G
cgtggcgtgatgtatcaggcgtggcgtgaggcacctttaaagtcagagctggtagctgacagtttccactagtaacactagtttccaaaagaagccagaaggagcctgagctcactggctgctgttgagcaaccaagtttagttgcatccactgtgcctgcagtgggagcctagggaagtggcctcctaagagactgaaggttcacatcccagtgtggtaagtgggtagatatcccaggtagaggccactgtcccttactggagaatgtttatgagaggaactctgcagtggtacctgctactctcaacgctgtttcttgttgccatccccacagaagcagagagcatcctgatctgcagctatggtgccagccctggaaacagcactcgggggagggaagagcacatcccagacacatccacatcacagacgccaggagcgaggagtccccaagctatagaactttgaatggggcggtggagaagccatcgcccctgccccgatctgtggaggagtcttacatcaccagtgagcattgctaccagaaacctcgcgcctattatcccgctgtggagcagaggctggtcgtggagacgagaggctctgcccttgatgctgcagtcagccccctctgtgagaacggcgacgactccctctcccctcgcctaggctggcccatcgaccaagacaggagcagaggcgacatagatcccaaacccagctccccaaaggtaggtgtttgcctgtacttactccttccttgatggctgtgctgctgagtcctgggccaacctcctgtggaagacatttcttcatagacatattaaacttgctcatcagagagagggcttttggtttttgtttgtttttgttttaaggttaagatgtgtacaaagttaagggacctcctttagtcccaggaaatttcacaaaatggcacaattgcagggtcaggaacagagagaggagaagcttagaagttgattcaaacttggaaaaactataaggaaatttttttctttaatatcatttacatcgtaattgtacctaggtgctaaattattagcatgaacttaagtcaagtatgttgttagataacaatgtttttaagaaaattttattttttttcccagacccgtcattaaagtctttgctactctgagcattttccccaggatctagccttatgtttggtttgttatttagtttctgtcattattaagtaactctgttctgaatgctaggtagcatgccagagtctccatttttacttcttcatgagtgccactgtgcctctcttctgtgcaagaggccttgtgtggtttcaggtctctgcccctgtcatccctactttcttccactttagcctatggattgattggcctcagcagcttaagtgcactgctgtgtcttgccaagaggcggcatcccagctctgctcccagggtgtggtctgcacctgcagcttctgtccttgccagtgtctatggaagtctacttagggtgtgaggatagcctttttgtagcagattagtttcaagtctaggttcagtcactttggttttggctttcctcatcagatccaaggaagctttcaggacattgctttgtacacaggaagccctaaatgttaccatgaattgttatcatcctaaataaatgaataaaagtttgagatctgaaactatagtaaaaggctagcagtcctgtggaaacacaatgtaaaatctccaagttctttttcttatcaagggaaccccctggtaagctgactgtataccagcaccatagtttcatcctaatgttacctgggaaaactgtatccttgttgccgataggggaactacctcaccaaggccacatattcactagagacagccaggcctcactaactgactctaataacctaaccatcactagcactgctctgggcagcccttgggcttctgagaggcctgcttcaggccgggcgctgggccagccagaggaagcatctgagcccatgggtgctgtggtgcctgagccccatgggtgctgtgctggcctgaggctgtactgtgagtggcagctggaggttgggcgcacaactgctttttcagagggttataatgctgactagttggagaaaagctggctggctgcccaatgatgtacacatcactgcatgcccccccccccccaggtgagagagtacatttccaagaatgtcttgccagaagagacgcctgcaaggaagctgctggacagaggtggagaagggctggtgagctctcagcaccagtggcagttcaacctgctcacacatgtggagtccctgcaggatgaggtgacgcaccggatggactccattgagaaggagctggacggtaggtttcctttcttgaaatcagtcttgagcttccctctgaagccttctgaagttcacagccttgctgtccaaggacagctgtttttttgcctcttcagccccatctggactagttctcccctcagtgaggacaaatgtaactttgaaaatgtttagtttcttacaaagtctggggctctcaggggtcttgcttcacatgtccagtccgtctgcagtgggaactctgcagggctaagctaagtagagcttagtggccaagagcaagcttagcctcagcaccccacggacgaagcatagcgcctttacaacctgagcacatttttcttaagttctgagggaactacactgttatggagagatagagttgaagcaaaggctcagaggttaagagtactgtggtctagaggacttgggttcaattcccagcacccccagggcagctcacatgcccagcctttcaggttttttaatgtgcattctggggatcaagttcagatttacacaaggcagtgatttcatggctgaggcatctcttctagttttgagttaaaaccctttcatgatggtttacttactgttcttggttatttgtttccattggaaaggtgggctccaggcctagagcgctgtccacaagtaaaagctgcttcctctaagcctgacggccccatccctgagctccatacaggcacaaaataaataaaatggaatttaaaatttttaatggaccaaatttgtaagtctgtgtttgaggattctgtgaattacagtcaagctctgaagcctgtaactacggctatggaaagctcacaccggaagtcactcttaagacaagggccttgttttacaagcttcagtcatgtggcctggctagcgttcctttgtggttggggccatcctgaggcagagaccatgccaaacatgtgtttctcttgcctataatcctagcacttaagaaactgaggcaggactgagttcaaagccaacctgagcaacatacaagagtgctgttcaaagaaagaaaaactaatgctttttctgttggagaggggctgatgagagttctgaagtgacagtaaatggagttgccctgttggcagatgaagggagggacagacccactgacatccagcttgtatgaggccccatggcttttattatgtatgtgagtgctctatccatatgtaccagaagagggcactagatcccattacagatagctatgagccaccatatggttgctgggggttgaactgagtacctctagaagagcagacagtgctcttaaccatccaccttctctccagcccacctgaggctcctccttgctctgtgtggaatgttctgtggttgcccgaggagttcttcctcaggagagaagtctgagccgtcacagatcttacctccgtgttgcctgggctctctgagtggccagtggttgaggtgggaagccaggctgtcttggctccccagaggacctcacatgtatccttctgatttgcagctcaccttccccccatggcttgaagaggtgccaagaaaacttaaaagtgaaggatgaagtttaaagctttcatttaggaagtagattagttttgagacaggatctgtgtgggctaggctagtctcaaattcaagagaccccacctgattgctggaacaaaagctagtatgggcttacactaacttcttaaagggagaaaataagtatatttcatgctgctgataattgtgtatcaagaattaatatgaagcaaatcagaattgacagtgacttaaaaaaccaaaaaccagaccttttcaaagtccctatagattttctagcagcccaacaactatttacagtgggaaagatttgtcttcagagccttctgggctttgctgtggcagaatagcagctagctaacacaattaaagcaaatgcaattcagatgagttttttagttgcattggcccctcagagcataacagccggatctgatctggctggtggccactgactgtattggagaggacagacatagatcattcaatcactaactaggacatcttcaggactgcactattgtgaagcatttatattgtcattgctgtaaccaaatacctgacagaaacaacttgaagggaaattggcttaagtagtttataatctcagagttgtcatggtggcgggagcacatgtcgaggtacccatctataccatggtggtcagggagctggtaaacgtctcaaaggcgggcccttagtgacctacctactcctccccagatagcatcaccagctgaagaccaggtatccaacagaagcctgcggagggtagttcacactgcagaccttagcattagggttttgtgccctggagcagtgctttgtggggtgcccgtgttgaagaagcctggcttaaactggctgagctaaggttggggtgaatcaggttctgagcactcactggatctccccccccctctcacctgcagtgctggagagctggctggactacactggggagctggagcccccagagccactggccaggcttccgcagctcaagcactgcatcaagcagctgctgactgacctgggcaaggtgcagcagatcgccctctgctgctcgacatgaaattggccactcaagacatttggagcacaggcctggcacctctgccaggggagcttcgcatatttaagtaaataaacttagcatgctggatgcacgtgacactgactgacttcagggatttggccaggagtgtgatggacatggggacaaagagaccattttggctgctggaggacagggctctcttgatctggaagccaactgcaaaggcagcacatagtcttagaatcccattctgtgcacatcgttgaacgaagcaagtctttgcacatcttcaattggaatcgtgccactgatgataaacaaaatgagagccaaaaaaaataaaaacctagtaggaaacagttgtaaattcgatttgcagtttatttaattgacttttgagtcaggtagaggcatgtgccaacccctccggtttctctgcctggtgtgtcgtgtgggcagcaggcacccaccgctttcatcccttagcctcactggaatgctgggacttcactgtgccgtgcagttttttgaaggctgggtccttactgctctgcttcctcaagacttccattttctcacctcgtctcttgcatggcttcacggtaccagggacaaggttttatgttttcactccagagtcagctgggctgtacagggcttcagcagccaagtgaaactgctaaaggaggagctagaatcttgatgtaatgagaatctacaaggaattccaggaggaagcagtcaggggctggaacccaaaggacagcattttctacccacttactaatttcaactgcttcccagttctatttaaagttatgaaaaaaagtttcccaaaattttcgaactcttttactgtaaagatttgttacaaagaaggtgggaattaccttactttatgtctcatccgcaaacttgcaactctgttgcttgtttccctcctccctggaggctggggtagcagtcgccactccagccactccactctttcaattccccgtctgtgttactttatgagatgaaggtaattatgctgcttatggtccaggtacaacctctttgtaccttcacagagatgtttgtgttgtttcttgtttcgcaggttctggttccatgtgtcattgctatgttgtttgcttggttttatcttattaggtgaaatgtaaaaggttccgtgctgtgaggacttcattttcaccagtttttgtatcactaacggtaaactttgtttgatttattcatcaacatccacagattcattatcagttttgtaatctgtaatgttctaggctgcaaatatttactatgtaaacattaaggagccaatgtcggtagctaccaacagcagcacctctcgctgccttaggaatggttaagtttcaggcctaacaggccatcatggccataaattcaggcttgtgtacagagaagcttcagggaatgaatgcccttatctaaagatctgttcaccatctgatacaaaatgtgctgtggagcaagcatgaggtgacctggcatagcttagggaatgtgtgatgtgtaattaagccaacacagtcccttacaagaggctgcttcccactgctcacattgatgtcttcttgtgggaagaagtgctccaagagtacacatgccatcacggttctggataatttatcatagagctacattttgagacttgtatgatgattgtctgaaagggaaagaaacaagatacttaaagctacaactgtgtgaggtatgatgattgttagatactaatttggggccatcaaagtggcttagttgggagaggtgcttgccaccaagcctgctgacctgagttcaagacccaggaccgaatagagagaattgacaccttcaagttgttctgtgacacacatacacacaaatgtaataaaggattttaaattgaggtttttctttttatgtaactactcttaagtatcacatctggggaagctgtaaccttgaaggcagtcagttttgtgtggttcaaagaaggaagcagaaactgaatgatgctaatcttgccgtgtggtccttactgggtttatcatttaggttttgtaaaggacataatctggtttcattattacttgtttttagggaaacaaagcagaaaccccatattctgataacctcagttcttccctaacttaaagccatgttgaggggctccactcccagttcctgggtcaaagtgaattcacccctaagttggagcactggaatctgttgcaaacaatgttatcatttagaaagatgtgcactacctatgttctgtctgttaaaaaaacctatccacctatagaaagtcaccttgacaaaacagttctggtttgatcagtcattctttagtatgtatgcaaggtggatcctggctgagccaacattgcactgtggatacgtatctgtgtttacacgctattagacagaaggcactgtacatatgagtgttgctttcaagcaatatttgcaaaacatgcaaacttctgtatctggaaaaataaaaacaggttcttgttgctatgtgtcagtcacattactgaagtataaaaggttgtgggctttgttggtttagtttagtctcactatatagccctgactggcctagaactcccagaaatcccgtctctgttccaagtgctggttttaaagtcctgtaccaccacacctggttgttctttaaacaaagtcttgcaatgtagtccaggctggccttgagcttatgcaacccaaagttgggcttcaaacttaaaatgatcctgtcttggtctccgagtataccaccataacccagcaaggattaaatgttttatgcattatggtgagcttgaggccagcctggtctacagagcgagttcggagacagccagggctacatagagaaaccctgtcttaaaaaataaagtgccgggggctggagagatggctcagcggttaagagcactgactgctcttctgaaggtcctgagttcaagtgtggctcacacattgcagtggaagctgcaggtttactgcatttttggttgctggacacagtgcaaggcaggacaggctgtttccctagactgagacttacctactgcgttcaacaaacccaggcttcctatagacctgaactacccctcaactaacacccatgcctgggcagaatcctcaaaactggttgtcttcatttcattgcaaaattcaaacaggagcctcacagtaagttcgtattactcatgcattccaggctcatcccgggggaaaccattgagcaggtggaacattggagattgaggagtttactcattggtttaaaaaatggggcagagagggaagtcttgctcacaagtgtgcctcactccagggagttctctcacagaggaagttcatgagaggctgataaaggagaggaatgggcatcggtgtcaaggagtccgaagtccgaggcgtcttttcatgatacacatttccgtcatggccattggtttgtttttaaggtcatgaacgctaaatagttttatgcaaaacatttctcaaatgaccaacacgtgtatatagaaagacaggaggccctgacccatataggttaaggcaaggaaacatgccgagccttctcagtccctgtcacaggacactggatactctgtgtgtgtgtctaacaaatgtgaaagtagaggtcatatgagatggagaagttaagtggaaattatgtaaagtacacatcaacttctcaaaagaaaaactgagaaaagctgttttcaaaaaaaaaacttaccaggtaaccgttggaagaagaggctatttccaacaagattactgggaaaacactgttgtccagttgtactgattccagttactgatctttaagcataaagtgaaacgagagttcgctttccttggcaatatcagttctgttgcttgagtttgtttttgagagggtctacatagccctggctggaacacactatgtaaaaaccaggctggcctcagagaccctcctgcctctgcttcctgagtgctgaggtttaaagtatgagtcacaacaaccaactaaataaagcatttaatagggccagttattttactgctcagcttcgaaaccgctgtgtactgccatctgctgaagctcggatactagatagtgtgaggcagaggggagaatagaaggctagaaaactgaaacctcattaacatggccttttgcaaaacaaaactcatgcaggtttagaaaaactgaatgtggtctagatctaggtagatttcctgcctaagggcacagcttcgcgcaaatgcagtggtccaggaatagctaatcaaaagccttaatcttacaggttcccagaatcctctagctatcagctggaaaggtgggcaacaagttcgtaaaataaacccaataaataaagaacgaacgcaagacacagcagacatgggagctgtcaaaattcaacttttattaactcaggggtagggtgtcagtccagggagccccaggctccgccgctcagccggtgatgcgcacgtccgcgcggcgccgcagccgccgagcccgggccgcctccggtagaatggcctgcagctgctcctgcaccagcatctccacgatctgctccttggtgcggatgtccggccgcagccactggcgggacagctcccgcagctgccggaaggcttcccggggcccggccgcgtcctggtagcgaaactgccggaagcgctggcgaaaggtctcggggccgggccgagaggctccgggccgcagggcggcgtcagcgtagggcgccgtgttcaaagctgcgggcgcgccggggagctccggggccggggagctcccggaatcgggcgacggggccgcacagtcgccggctccttcctgctgctcgggaggcgccgcggggctttgggggtcctggctgggctgcggcgccgccatgactacggctgttggcgtccccctttgtttcgcagtccggcgcctcgcctgcgtctgcaccggaaggaggtaacagagggccgctgaagggcagggcccgggcaccccagcgggacgcggactcaggacaggctgcgggcaagcccagcttacctcgacccgcgaagctcctcggtggccggaaatgaaccgatccgcgaatccggaagccgcctcctctaccagtcacgtgaagtttgatctggggaagtccgtagacatcagctctactgacactaaggatggcggcactgcaaggtccccattggagccggcggacaagtcggacacgacagagtcgaaatctgagtcgggatcggattccagatcagaggaagacaaggagagtccggcctcgattaaggagataaaggcggagacaccccaaccgaaggaccgccctggcgtgcaggtgacctgcgcctcctagggtagatgctggtccctacttgaccaggcaggatctgggggtagcgctgacagtcctgggtaaaggagggtgatggttggctaggggattgtcggagcttgggcggatgccctgggtgggacagcgggacaggggctccaattacttttaaaaagatctctcaagcccgtaatcctagagctaaaggacacctcctgagctataaattgagctgagaatctcattaaacacacacacacacacacacacacacacacacacacacacacacacacacacatatactgtcgcctgcataggtgcaattgatttcactttattttgagaaggacaaagtatttgggcaagagtcttcagactttcctgcccccaaacaagtgctcagggcttctttgtcattgtttttgcttgtcctcgaaaaccaagagaaagagattcagtgggtactactttaactttaagattaataagtggggggctggagagatggctcagtagttaagagcactgactcctcttccagaggtcctgagttcaattcccagcaaccacatggtggcttacatctacaatgggctctgatgccctcttctggtgtgtctgaaaagaacagcggtgaatacataaaataagtaaatacatctttgaaaaaagtttaataagtaaactgtaattaacgatgtcccagatggtggccattagcttcttgtatttactgaatctttgaaaggtaaataccccgaaattgagatgtattaaaatgtagaattacgcatgtgtctgtaggaaaagaaaaatattttgtatttattacatatttgagtatgttatgtaattttgtatatatgggggtcaaataaactatattattaaattttacctgtgtctttttacttttaaaatacaactactttgaaatttttaaattacacatacagtttatagtatatctttgttgactagctgctgtctagagtgtcggaatcaggtgtcaggaaacatcttttctttgctttaacacccccagcaataaatagtgcctgcctcacagttgtcaggtggagtaaatcaagctctggaaaagacagagctttcagagctagggagatggagcggttggtaaggatgcttgggatgatgggatgagatgagcgtggtacccaagcattgtgagtccacagctctgggcagcccacgaagttctaggcttctatcctcctccggacaactaagtcttccagaatgaccgggttcattcagcttctcttggcttctgactgaattgctctgcttggcctcatactaannnnnnnnnnnnnnnnnnnnnnnnnnnnnnnnnnnnnnnnnnnnnnnnnnnnnnnnnnnnnnnnnnnnnnnnnnnnnnnnnnnntccccctctcccctcctcctcctcctcctcctcctcctccttcttcttcttttcttgagacagggtttctctgtatagccctggttgtcctggaacacactctgtagaccaggctggccttgaactcagaaatccacctgcctctgcctcccaagtgctgggattaaaggcgtgagccaccacacccggctcttggcactctgttctaatcttctggctcattctgtcttcacctatgtctgtcaaactgtcctgttaaactgccaaaaacccaacacaccaccacacctttttttccctctctgctcttaagtagtctcttttccagtgctgctctcctgtgagttgggcatgtccaatctctgactcatcctgtcaaatctttctctgattcaacactttgtctgccccttaattttagatgtcactttcagaccaacctgcttccttctataaactaaccttccttaccatcattgttaagagattaaggtatgtactaagggattaaaggaatgtcattccagccggatcacatagacctagaaggcctttggatgtgatccctcgctggagcagccatgttgctggattaaaattctacaggtgcttgctgtgtaagcatgagggcttgaatctccctgtgcccatgaaaaagccaggcatggctgagctggcctacaccttaacgttgggcccaggtagagatcaaaagaactgcgtggttagcctatccaatacgtacttctaaattcaacttgagaccctatctcaaggcaatgaggagagtaatagagtagagcgccctcttctggcatcttcatacctgtacactcgcatggatcacacacacacacacacacacacacacacacacacacacacacacacacacacacgttttcattaggtcaggtccattgccttcagcctcttgagctacaggtgttgctgttttaatctataaaataaaaaatctgaatgcaagaacttgagtggaaaagaggaataaaaagaaaagaacatgactgtggttcctaggcacagtggaggggaaggtctagtatagataacagggaaagcatggccacagtcagagaccctgagggaggccagaggggacatcatcctgagccatgaggagagagaggagggggaaggcagaaccaggtaccacagccagaaagcccaaaggtccgaagccagcaggtaaccaaaatggctgtatgatacagggaagagcctctgggggaagggcagccttccccgactgggctgtagagttcggggtaggggtcagggtatacaagccaggaggactgtaataggcagggctgagggatgctgggtggacctggtggccaggttctctttgacatgttaaataggcaactcaaccatctgtcctgggtttgagactttcagaactaacctcatggaagtttctatgaaaattcagatggtgccagcaaaagtataatctctgatgcccccttggcaggtggtatattctgtttgactcccaaaaaagttttgtatctccgttttccagaaagggacaggggcttagtcagggtttctgtagctgtgacaaaaaaatcaacaccaataagcaactcggagaagaaagggtttattcagcttacacttccacattactgtccatcaccaaagttaggacaggaattcaaacagggcaggaacctggaggcaggagctgatgcagaggccacggaggggtgctgcttactaccttgcttcccttaagcttgctcaccctgctttcttatagaatccaggactaccagaacaaggatagcaccacccaccatgggctgggccctcctccattgatcactagttgagaaaatgccttacagttggatctcatggaggcatttcctcacctgaggctccttcctttctgaagactctagtgtcagattgacacaaaaccaaccagctcaggcccaagatgataggactttggtcatccctgctgttcctttgggttctgcgcagggattgtgtaacagccaggtaaccattgttaggacagatttctgacgatcaccttgcccatccttgaggatgtctcccgtggaggtatgaaagatgaccttgagaggcaccacaaggacccctcagtgggttttgtagttgctggcctgtaagcttgggaaacttcatgggccaatccggacttgaagctttttcttgctggcccctcggcatctgcatttctgttagtcagttgttcagcttcctttcacaaatactctgtccttctcgtccccattctctgaagtagaatgggatttgcatttgctgttgcccaagttattttcctttcctcttttcagaagtggaaagggtggaggctcttgtgtttgatagacctagtggtttcacatttccttctgcctggttccctggtttactactctatattaattaacaacagtcttattccctgtggtggcaggcatgttcaggactaaaacagcctgtctgggtcagggtttgtattcctgcacaaaacatgaccaagaagcaagttggggaggaaggggtcctccaagagattggtgtctccaactctccccactgtagcacacactttgtcttttggctccagctgcctgtacttcactgctgctgttcttggtggtcatctcatggagctggcatctccaaacactgctgtcttccactgcaactaagatttactaatagcctctcataggttctcttcatggcgccaaacctcagctccttagcgtgacccctttagtcctggcccatcaattgcaactgagactgtaccttcaccaatggccttccatggcctctcacagtgccgagcctcagctgctctgcgtgaccccttcatgccttcaaaaccagtaccacctgggtgacccttacacattaccaagtacagaggcagcacaaggtacaaccttgttggttgtgctttgtgctatcaggttctttgtgctctcagaaaacacttaccagatttcacctcagtgatgctggtctcttcttaatcaccacaaatttcttagctccagctaaccagcatcatattgtcccagtaatgcagaagttttgctttggtagttctggtatcttgttaatcacagctgattcgtcagatccagctaaccagaaccacagaatcttcacaatcaaaacagcaatggccctgataagaatctttaaccttccctctgaaatctcacaagccaggcctccatcttctgcactgttctcaacattatcttccaagctccgacaggacatcccacagagctcttaacactgaatggctcttctagcccgaagttccagagtccttccacagtcctcccccaaacatggtcagttgtcacaggaataccccactaggctggtaccaatcaatttgtcttagtcagggtttctattcctgcacaaaacattatgaccaagaagcaagttggggaggaaagggtttattcagcttatatttctacattgctgttcatcccaaaggaagtcagaactggaacttggagacaggagctgatgcagaggccatggaggggtgttgcttactgccttgctttcctgggtttgctttcttatagaacccaagactattagcctagggatggcaccacccacaatggactaggccctcccctcttgatcactaattgagaaaatgccttacaaatggatctcatggaggcatttcctcaagggagactcctttctctgtgataactccagcttgtgtcaggttgacacacaaaaccagccagtacacagcccaaccaactgcaataaggaaggggagaggagccatgaatgggtttactgcagaggaaaatacaagcttcccggagctagagagatggttggtcaagggggagtgggcgcacacctttagtccaagccctcgggaggcaaaggcagatagatcgcttgagtttgaggccagcctggtgtacagagcaagttccaggacagctaggactacacagagaaaacctgtctcaaaccaaacaaacaaaaacagtacatggtatggttgctatagtggccagttctttcatcccaggacttgacagaggcaggtggatctctgggagtttgagactgtatataggtctatatacagattctaggccagccagaggtacatggtgaaaccctgtctcctttattttcctatagtaattgtttcagagtcttcctgcctccatttgttaacctaggcccagtcctggaagctcctagcctctgtacaatcttatgtaggcttaggatattttctgcctctgagacttcctgctgaatgagttcaccctttctagtaccttctgaactcagtttggttcatctcagctgttctggctcaacctcttctccaagctgactgattgattcatcctggcttctctctcagcctctgactttttgttctgcttggcctcaaacctagttttggcaaaatgttctagtcttctggctccttgtcattctctggctcattctgtcttcatttatgactagcttattatccctctgcaacctgtttctgtacaactgtcccagtgaaacctgcctccttcctctctctgtgctgccccttaagtagcttccctttcctctctctctttgtgagagttgagcagctcctattttgtcaaatctttctctgatccatcacattagatattgctttcaaacatgggtgcttccttctacaaactaactttaccttcaccttctttgtttgggatatctatatctatctatctatctctatctatctatctatacacacacacacacacacacatacacacannnnnnnnnnnnnnnnnnnnnnnnnnnnnnnnnnnnnnnnnnnnnnnnnnnnnnnnnnnnnnnnnnnnnnnnnnnnnnnnnnnnnnnnnnnnnnnnnnnnnnnnnnnnnnnnnnnnnnacacacacacacacacacacacacacacacacacatatttctgaattttgcagattgggaggtaggcacccccaaaggtgcaaagttgaagactatcaaaaccatagtaggtaggtccgtcaggtgtagtgcacacacctttacgctttgcccctgaaggcagaggcaggacggtctctataggcttgaggccagtctgatctacatagacagatctttctaaaaagaatgatgagtatgggtattttaccagcaagttttgttggtgcactatctgcttatacggcctctggaagagggcatcaggttccctgcaactggagttactgatgtttgaaagcatcaccatatggattctgggaattgaactcaggtcctctatatcttaactcctaagttatctctccagcccctaggttaccccccccccttacagggcaccagctgtgatctagccatctcccaagcttccttctttttctcatctaaagcaaacttagctcatcaaacagtagcttcctgtctaaactaatgattctattgatgtgaagagacaccatgaccatggcagctcttataaaggaaagcctttaactggggccggcttccagggttagagactgagcccattatcatcatggggagaagcatggcggcacttgggccgacatggggctggagaaggagcactctacacctggatccacaggcagcaagaagacttaagcttttgagacctcaaagcccatgctctagtgacacacttccttcaacaaggccacccctcctcgtagtactactccccgtgagctaagcattcaaacgtataagcctgtggggaccatttctattcaaaccatcacatgcctcactcatatattcagaaatgaatacataactgcgtacgtatatatttacgaacattctgttctggatttttgcagattaagctctcatggtcacagaagataaagagctggacagcaaaaaagaaaagagtaagtgtttttattctaaaacttgattcccacgtcatgaacatatcagttattcttaccctttgactcttgtggataaaattgctgtgatattggtgtttgaatttccacttttttagttgagttatgtacctataggtgaaattgctgcgtcagataataattctgtatttacctttgtgagaagcaatcataccatttcgcacagtgggtctatctctgtgactctgaggtcggcctggtctacggagggagtttctggatggccagagctacacacagaaaccctgtcttgaaaaaacaaacaaacagcatattccctatgaggggtaggagagatggctcgatggttaagagcaccagctattcttccagaggacccaggtttaagtcccaacacccacctgttgtttaacaaccatcagtccagttccaggggatgtgatggcgtctcctttgtcaccaggctcacacagacatatgtaacacatgcaagcatatggtggtttgaatgagaatggcccccagtagattcacgtgtctgaatgcctggtccctagttaacagaactgtttgggaaggataaagagggtgtggccttgttggaggaggcatgtcactggggagtgggctttgaggtttcaaaagcccctgccaagcccagtgtggtcctctctggctgctgtctgaggaacaggatgtagctctgagctacttctccagcgccatgcctaaccgcaggctaacacagtccccactaggatgatcatagactaacccttggaagctgtaaacaagcccctaattaaacgagttataagtgtccttggtcatggcatcttttcatggctatgaaatagtaactagggctggtgagatggctcagtgagtaagagcacccgactgctcttccgaaggtccagagttcaaatcccagcaaccacatggtggctcacaaccatccgcaacaagatctgactccctcttctggagtgtctgaagacagctacagtgtacttacatatattaataaaataaatctttaaaataataaaaaaaagaaatagtaactaagacaaagcagggaaataaaaaaaaattccctaggagattacattttctgcttttcctccctccttagtgctggagatggaacccgcacctgtgtatactaggcaggtgtctcatcgctcagctataatacccagcctcgtgcgtgcgtgcgtgcgttcgtgcctgcatgcggggggggggggggggagatcctaggttaaccttaggtgtcattcctcaggagccatccatcttgttactgttgctgtttttaagattcatttttattttatgggtctgggttttccacctgcgtgtacttctgtgtatcatgcagaggccggagggcataagatctcctggaactggatttcatagatggttgtcaaaccatcatgtgggtgctatatgggaaatgaacctatgttctctggaagagcagtcagtgctcttaatcactgagccgtctctccagtcacccatcttgtttcttgagacaaagtctcatttgcttggcgctcactgcataggctaggtaggttaggttgcctgacctgcaagccccgagggtccatctctctgtgcctgggattgctaggactgctgtcatgtgctcccacacccggctttttatgtaggtggatcaagctcaaatccctgtacttgttgggcaagcacttgactgagctccctcaatgagctcgtggctgcatcccaaaggcaacatcaaaaccaaaatgatacaaaataacccaaagaatacacattcctgcatctccctcctctctctctctctctcccataaccttgcgcatggggcaggctgcctacacatgtgaaacttcccaagctcctgtcagtctttctcatttatatctggctccagcttgttcttcacagacttctcttttgttgtcaacaaggctcctgtagtatattttgtctctgaactgacattctcttctcaaaagcctgtatcccttctcagacccctccctctgagacaggccttctctataatagccttgactgtcctggaactcactttgtagaccaggctggtcctgaactcagagatccagctgccctgccctgtgagagagttgctggggacaaaggcatgtgcaaccacaccaacttgatctcatttaaaaatgtgtcaataacaagctctgaagttgtaagagttgtaaataaagcttctgttgttcaataaaataaaataaaataaaataaaataaaataaaataaaataaaatgtgtcaagcgcttgggttccggcgacatgactaaacgcaccaagaaggtcggcatcgtcagcaagtacgggacccgctatggtgcatccctccggaaaatggtgaagaaaattgaaatcagccagcacaccaagtatacttgctccttctgtggcaagaccaagatgaagagacgagccgtcggcatctggcactgtggttcctgcataaaaacagtggccggcggggcctagacctacaacaccacctctgcagtcacagtgaagtctgccatcagaagactgaaggaactgaaagaccagtagaagccctgctgtctgagacttgcctagcctgcaataaatgggctatttacgtaaaaaaaaaatgtgtcaagccttttgaggtttttggttgttcatgattaacgtctatttcctgttatttatttttctctctcctattttgtgcctctcatctgacatttaattttttttttttgcatccttatgtttttttcttattttgtaatgtttttttttctttttgttttttagccatacctgttctttttgtatttctgtgtatgtgtgcaaacctgtatgagtatatatgtaccttgtgtgtgcagaagcacatagaggccagaagaggggtgtggcatccccaggaactggagttacaggttgtgagctgctgtgtgggtgctgggaaccaaacccagatgcaagagcagcaagtgctgttacgtgctgcggcattgctccagtcccactggagctgctgcagatgggacagttagactcataggaaggtgtaaagcaagcacagcgaagacaggtctggtatccctcacctagttttctccaatagtagaaatatctcacatgattcagtccagtagcaaatccaggaacatgtgtataagtctacagaccttattctaatgatttcttagttttccatgcatgcatgttagaacatggtgtgtgtgtggggggggggtgcgggtgtgtatatgtgaatgcacttgggtgtgtggtgtgtgtgtgtgtgtgtatgtgtgtgtgtgtgtgtgtatgtgtatgtgtgtgtgtgtgtatctgtgtgtgtgtgtgtgtgtgtatgtgtgtgtgtgtggagtgtgtgtgtatctgtgtgtatgtgtgtgtgtagaatgaataaggtctactgtgactcctttagatgcattctcagcagatgctctgtccggggcgtgcctccagctctccagtccaggcctctattctgtcttccctacttttcagtactcttgatttcctctagtggttgggggttggccgcagatagacctaggaaggaaggggtatcctgtgatacttgcagtcccagtttttcactgaggatcttgatacaaatccgaattgaggtaatagttgttgtcatgggagtgcagctccctgggagagctttggacggtaactgctgtccttttctgctctgctttgaggacacacacagtgtcatttgcttttccagctttgagcgtgtgcttgcagctgactgaaggatgccgacagtactgatttgatgtgatttgtgggacaaagccgtggcccgctgcatggtgtctcaaacctcagagtaaccctggtctgaggtgctgagtgtcctaatctgtagctggacgccttttactttctttaagtcggttcaatgtctctggcagtcatttagccactttgagccccagtatctttataaagagggttgaaattaaggcccctcataggtttcgagcatagtgcccgtgttagctcagtagatagtagatagagtctgatactgtgtcattgccttctctccagagctttcgcttgtgcaatcagtagattctcagagtaaggtttttcttggaagcaggcttccagcagctgttggcggggtgtaaggagtgaaggaagcggtttgtttccacattgactgataagggaagattacttgtcctcccacacgaaagacagaaggctcagttgtgccatttgccaatttaggaaccatggggagaaatggggtgtgtcataactggcaggtctgggggaggggactcctgagcagaagatttgaaagaggaagatgcaggcctgggagaggcttcgggggggaggggaggaatagtggtctctctggacctctcagattcacagcttgacccacagaaaaaaaggtccagagaggctcaggactgaattatgatgcctgctctgtagcctccacccccacccccgggtgagctctgagatcatgttcttacccattctttctggaacagagaggaaaaaaaacgaggcagggcagcaaaggataggaaaacttattcttgacttactctttttgcacctacccatagcaggacattcgtgtagatgcaaacatcactgctctttacagaggagaaaaacagtaccacagacccagttacaagtgaaggtcacatgactggtaggtggcgtgcatccggttggataatcatagcactccagtggcaggaaagtcttccctcccctgattggattccctctgtaaactttgtaaaccctcaaggcagaagcctggccaggccgagcctgaggagctccagcagccaggcccctccccccaggcctccctaactgtcagaacagcagtttcagcctctgtgactgtcgcaaagatcatctccagcccctcaacaggactctcccgggattatgctagttttaggttaaaaagtctgaacaagagccaggcatggtggcgcatacctctattcccagcacttgggaggcagaggcaggcggatttctgagttcaaggccagcctgggctacagagtgagttctagaacagccagggctacacagagaaaccctgtctcaaaaaataaataaataagtaagtaagtaagtaagtaagtaaataaataaataaataaataaataaataaatagggctggagagacggctcagtggtttgaagcactggctgctcttccagaggtccagagctcaatcccagctctcccacggtggctcagaaccatcgcatagcagtagatccgcgggaccttctaccctcttctgatgtgcagaggaacatgcagacaaaacatccatgcacataaaatatagaaacaaaatgaatcttaaaataaattaaaacattaaaaagttgccactgtatctatgtgcacatgtatgtgcatgtatgtcatatggagggagaagggttcatgtcatgtggtggtgtggtggacagaggacaactttatggggtttcacctcctccaacctttgtgggttcccagaactggattccagacaccaggctttttggccaagcacattttacctgctgatccaactgactggttcacagattgcatatttttatgaaagttaaaaataaagacactaggactggagagatggctcagtggttaagagcaccgactgttcttccagaggtcctgagttcaaatcccagcaaccacatggtggctcacaaccatctgtaattggatctgatgccctcttctggtgtgtgaagtgtactcacatacatgaaataaataaaaaaaataaagacattagctgtgtgatggtggcatatacttttaatcccggcactcaggaggcagaggcaggcaaatctctaagttcaaagtcagcctggtctatagagcaagttctaggatagccagggatacacagagaaactctgtcttgagaaaaaccaatcaatccatcaatccgtatagccagagtaccattataacagtaaagaaatgttaaaatgtactcagtgaccagggcacttatctagtgtgcatgagaccttgggttagatccctagagtcatataaactaggactggtgacacacacctgtaatccaagcactcaggagatggagataggaggattggaagttcaaggtccagcctgggctacatgaaaccctgcttagaaaaatatataaaggaagaaaatgctaaacttacaaaaatcatgtatactctagtcttattttccttatttgtcttttaaaatatcttttttatagttgttattactgtttatttttatttctgagacaggctggaactccctgtgtagcgaaacatgaccttgaacacctggtcctcgtgtgtctaccttccatgggtgtatgtggcagggggtgagtgggagtggaaaggtacctcagtgattaagagcactggctactcttctagaagattccaatcacctacagaagatctcacaaccatctgtaattccagtcccaggggagtcttacaccatcttctggcttctgtaggcacaagccacagatacagcatgcaggaaaaacacccttatgcataaaataaataaaaattttaaagtatgttgtataggctaggtgtggtattgtgtgcttttaatcctactatttgggaagtagagtgagaagatctctgtaagtttgaggccagcctgatctacatagcaagttcaaggaaagttgggtctatatagtgagatccattcttttttcaaaaaaaaaatgttggagtgggtgcatttgtgtatgtgtgcagaggtcataggtaaacctaaggtattgttcctaaagcagtgtgcactgtgtgtgtgtgtgtgtgtgtgtgtgtgtgtgtgtgacatgtgtgtgtgacatgtgtgacatggactttcactggcctggaatgtgccaagttggctggccagtaaggcccaggatctacctatgtacgttcctctctgctggtatcacagcacgtgccagcacacccagtttttttatatggctttttgttttgttttgttttgttttaaattctcaggtttgtgtgtgtctcagcttttactgagtgtctctctgggctttctgtggtttgccatcatggactcaaaggctcaataaatgtcccttgaatttttcccctaaattttagaatcctaacacccccgcccattcctttttctcctcaagagattgactttttcaagacatgaaagtcttacttggcttttagattgttaaattctggatttcttcactatcctacatatttgcttggctagtagaagatgtctgccctgacatccaaattcagtttggcgtggatggcctgtttgtcctcagtcaaattccacgtccccagagaaatgacaggtggctcattttagattaggtattatcgcttcccttcctattgttggcataacacaccaccacagtttaacatttagtctacttctatctatttgtgtgtttatattcctatgtacgccttgttgcccatgtagagctcagaggacaagtctccttttagcctgtgagtcccgcttttctggccagtcacatttcttctgtgacttttccctccatgctcaaaacagtaatggatctttttttttttttttttaaccactttcccttcaggtccacttgactcacctctgccacagcacacgcaagctctcttgtggacacgcacagtcacatgcacacagagttacttggttttcttttccacaaaagaaaaaaaaaaaaccagtgcactggcaagtttttagctggaagaatgctctgaatgtctgtcagctgtccctagtccaggctggcttaaatgtcagctgtccctagtccaggctggcttaaagctaccaacaacaaaatttcaactggttttcaaattccccgagagaatggagttgtagccaaggaccagagcttatgtctagcatgctcaaggtactaggctcaacccccagtaccccgaaaccagcaccacaaccctgcagcatcccaaccctccccctaagaacaagactcctgactgtgtaagcactgtcctaacacaccactgcatctcattccatctggttccgccctgtttagagctgccgggcctgagggtgaatggcttctattgacctggttcactctgcttccagaaactgtaccagctcgtcatagacatcatcatgatgaaccgagtgtgtaagatgttccgtcaaggcctcaggggatttcgggaatatcagatcattgagcctgttcacaagaagcatcctgacttctccttctgggatgtaagtcgcctagccaagcaggggtgctgggacttcacaggtgcagcacatttcccagtcctcacattgggtagaaggggacatcattaggcaagtaggtttcgtaagaatgaaccctgaattagacggcctttcacggcctgccctggcagtgctggctggggcaggcgtctggtgcagaacggtagcagaacagagagtaggggagcaaaggggcactcctggccgggttctccttccagagtttgttcagagaaggaagcagaggccagaagtgttctgcttacatgtctgcccatgtggactgaaacaacagccctgagggaggcatggtccgctttccaactgtaatcacagcagcctgaaggagtcggggccacaacagaaccaggatttttctgagtgttttaagctgtgtgcactttgttttcttttctactatcttcactaaaagaaaggggacattttcagggccttgtttgctgtaaggaccccaagataaagaaggtcccagcttaaaagattttatcccaacagtaaatcctgagccctttttgtcttagaaatagtgattggctgtccattgtcttgtgtttgtattgttgtgataagatacaatgaccaaggcaacttacagaagaatttatttgaggcttaggttagaccgatgaccatcatggcagagagcagtgtatcaggcaggcaggcatagtgctggagcagatgctgagagttcatatctgatccacagtaggaagcagagacagagccctggaaatctcaggagtctttccaaaacctcaaagcctgctctcagggacacgcctcctccaacaaggccacacctcctaagccttcccaaacagttccaccaactggggaccaagtattcatatgagtttgtgggggaattctcattccaattactgcagtccccattctgctagtatgttcctgttcccgaaagatattattggtactctgtgtctccaccccagcccagggtatttccctgtagcatgtaattattaaaaaacaatccatgctaaagctggctacatgatctcccctcccctactgggagctgcaagtcatggtctgtccagtttcccaaagttaacctgatgccaaaccactccgcactcccatgccatctgtcctctgcggcttgtctgtctagacttgctcactggctctaaacccctagtctcgtataatggaaactcagaggcttataatttaccagccagatttataacagtaaatcttcaacctccaaatgcccacacagagaactcaaaactcaactgatacagatgcaagctatacacttagattggacaaatgtgccctacattattctattgcccttctatgagatccatagttactggtggctatttcaggccacatggatcggctatatcttcttcctccatcttctctctctcccttctctgtccacccttctgtctctgtctcctctctcaacctttcagctctgccttgtttttccacaagctctagccttatctgactaattaagatttcacctgacctcacttgcatacagacaacaatccacattttcccagctcagtatgcagactggccatgaccattttcctcttgggccacgagtgattagacccaaccctctgccttctgcatctaacatctttttttttttttttttttttttttttgagacagggtttctctgtatagatctggctgtcctggaactcactttgtagaccaggctgtcctcaaactcagaaatctgcctgcctttgcctcccaagtgctgggattaaaggcatgcgccaccacgcccggctagcatttaacatctcattccaagaaatttcccagaatgatttctgaaggacagaggctgaagaaagggaaagtggaggataggaaggtggacttccaccttttgtttatttttttgagacagtaatctaattagtaagttaagcctttttacaaaatatttatttattattatactgtatacagtatactgtagccatctttagacacaccagaagagggtcagatctcattacagatggttgtgagccaccatgtgggtgctgggatttgaactcaggaccttcagaagagcagtcagtgctcttaaccactgagctatctctccagcccagtaagttaagccttagcaggaggtggaaccagtgtacaggctggagaggcagaactcacatatcctagagattttccaaagcactcattctctgccagtgatgttcaaacccaacatgtcttcagctgacccatgagatgacagagaaataggctagacctgtagtctgtgacatttggctttgctttcaaggatatcctatttcacaaggtggcaacggaagagagagaggcttatgtatgggcaatgggaaacacatgacccagagtgaggggtgacatcaggggagtgtgaggtcaaaccttatcacagtgcccagtcagagtggtctccaggagagaagaaactttgcaatggcaacatggcaacatggcaactatgggtgtgtgtgtgtgtgtgtgtgtgtgtgtgtgtgtgtgtgtgtgtgatgtgactgtcaactgaagagcagagctggaacttgggggaccaggtggaggctagtttttcatggactgtgtgaatctgtatttccaagcacccccctctcttcctttgagagcttctctgaggagcaccacttggattgagaaatgacaaggtgatggggtgaaggcagcgttgtgtatactcttcctggggcgatgccaacaaatgtccacccactccagataggataccaatgacagagcaaagtagactccactcagtggtagctcggagaaccactgagcttattgggctttacttaaagaagcacaggtgagggactatatgggagcgtaggtatatacccctcaacagccgcattgttgaaaagcccaccccagctggatagacggagccccttccacagtccctctgctctggcaccctggagaccatgtccaggtggaacagaatactttgagctggcatgaggtacaagtgaggagctgaaatctcctgaggtctaagactctctctaggagggacccgcacaggcccagtctggagggtccctggggagtagtcacagctgttctcatggaggtagaaatggctgtcatgctcagaggacggcatttccacagcagctgaggggtcagccaggctccagggaaccgtcagaggcattctctggagaataaatgggcttcttggtttggcaatgtttcttctacattgccttttcctgtgtgtcctcttccctttgtgttcttcgcacatctggtcagagaccagcaccctggctgtgctccagcctggccactttctatgtggggtggttgctggggtatgggggcgaggagggcttccctagcaagttgttgacagggtggcctacggaggaggagtgagccaggcagttgtcaagagaatcttgcagctctgactgactagcaatccagtgcttctttatttagagaggtttcacagagtaaagacagactgatggttatccaagaagtatagattataagctgggcgtggtggcgcacgcctttaatcccagcacttggaaggcagaggcaggcggatttctgagttcaaggacagcctggtctacaaagtgagttccaggacagccagggctatacagagaaacccttctcgaaaaacaaaacaaaaacaaaaacaaaacaaaaaccaaaaaagaaaagtatagattatgtatttgagtcttcattacgtctccagggttacaagttcagtcacaattagaaaatacaaacagaacagattttatttttatcatcagccctataattccaatttaaagaatctaaagaatatcccctccaaagcaaacacagttattatatgaacagcctggcttttagggctggcagaatttgcagttttaaagtacctcagacaaacagtgaatatctggacaggccttttcatgaatagcaaatctcaatactttaccctgttgtttcatcctctctgctataaagtcgagaaagtttattttagagaatcgatttggtttcctgaattctattcctcctggggctgtaccctgtatgaccccctatctttaaactacatattcagagaaccctaagaaggacataaaggggggggggcttgaatctgtaacctggttgcctggctggtcagagtttgtcagttgtttctgtttaccctgcactgattttactgtttgagtttatttgggggcagacaagatttctggggtaatggcctcatttaggagtcccatcgcagcttactggtgcttccctgtatctaattatctccagggcataaagacttccaaacagggccagagaaagctagaagcagcagcttaagtaggtgtaagacttttcctagaaaaacccaggcacagttttcttgggaaaagacataaaatgaatcccaatacagaaagtccccaagaacgcaccacgcagaggctttagacagaaggacagcgacggcagcgtctggctcagctacgctggaactttgtcagacagctgggctggctttgtgactcttgctgtttctagtgggcatgactgtgccagcccagccgaccgttgtatgggacttgataaaaccaattttgttctgttgacggagtagagcaatagatcgaagatgggccgtgtttgacttgctatcgaaacttaaccaagcttgacttcacccatccactctgggtccctcctttccccgcctcggcgctatccggtctgtccgcttctttctcctcctccttttccccctttttcttctttccctgctgccatttccttctctctaccacgtgccaccgcctccatagtatgttgttgatgctagcatagggcagagctggggttttcgagaggaggtgataacaaaacggctctgggagatgcgccacaggtggactcagcagagtggcctgggtcgatagaagggcttccgatgtagaactccaggggcatttttactgattttcctttctccgggtcctttctttcagaaaaagaagcaaggccgtatctcgtttgttaccgaggactttgctgcacaggaggtatgtggagcgctaacttttcctggtgtgtgtgtgtgtgtgtgtgtgtgtgtgtgtgtgtgtgtgtgtgtgtgtgtgtgtgtgtgtgtgtgtccgggtggctctgctcatctgtctacttcagcctgaagaagcactggacatagctggtttcagttcggattctgccagcaccaggggcactatgaagtggccacttagttctaatcacagtgatcctgccccttgtccctgacatatcaactgttaccactgtttcactgagaagagccaatctaagagtttctgggcttggacttatgggaaaacagcagaaagcaaaacagaggacacaggatgcccagccagaggagaagaaagccagatggtgggaaaccccttggcctgttggtgagttctggtttggccctgaactctctgagggatgtcagtatacatggccctctatgttggatgctctttaagctgcagtcccactctgacatgagaagggctttatctggatgggtcttttggcccgtgtgatgtgtgcggtctttcaactccagcaccattacttccttcctctcttctgaccaccaaatcctggatattaaatccttatttaatatccaactttaaagttaaaggggcctgtctatttataggagtcagtcacagtctaactctctcagacctgacgccaccctggtctcacccatttgggctcttctctgaggaaagagggagaacagaactttgtaatcagtactaacaacactgtgcttgttccactgctccaccctaccccttggaggtgtgggtcctcttacgtggctctcctggatttgaccttcatgtcccttcattagtgaagcgtatgccgggcgtggtggtgcacgcctttaatcccagcacttgggaggcagaggcaggcggatctctgagtttgaggccagcctggtctacagagtgagttccagaacagccaaggctacacagagaaactctgtctcaaaaaaaaaaaaaaaaaaaaacattagtgaagcgtagcgagggaaatcttctgaattcttcagtttttcagagcagccgatgcctaatgctagatatgaaaggttgccagaattttaccctgattatcccaggggaaaccagggacctgtctaagcaccagaggattctagaactaaggggcgggacattctgtgcacaggagttgagaaaagcaagaaggcttcagaagggatatctacagtgactggcacagcctgtagacagtgtcagtccaatgagccgggcccaactggcccctacacagaagagcatgctagccgagacaaggacagctctccctcagtttaagtgtgtctgtgctcgggggactgtgaggtcctggtgcaggatagccccataccctgcttttgcttttggcataccctgctttctgagttccttcatccatatggaaatgattctcctgctggatgaagatgttgtgagatgggtgtgtaagatgctcactctgatggttggcacccaacccttagtccgtgtcagctcttcccgtgagtagaatgggtgagcgtgaaagcaacaatatggagagtcgcctgctggagtcctctggccatgtcttcccagggtcacttccctccgagggccatttctatcacacagaagaagccatcctggaggacccaccaggagatccaagacctctgcaatattcttcaggctctagattgctaccgcagctacacagagtctctacagctgctcctggccaaggtcatacgctttgaaaggtcagtgaggggaacagcccctgcttcagagactcggggaccctggaggggaaagacacagcagattacccaagtgcttcctgggaagggtagcagcacagcttagtcacttactgagagtcctcctcagatgacagtcctggaatccgagatgatcagacaggcgctctgaccctatctagtctagttcacatacttttcaagtgttactctgggtagcccttattgtcttagaattcactctgtagatcaggatctcaactcaaagatctgcttgtctctgcctcccaaatgctggggttaaaggcgtgtacaaataaacctagcttaaatttatctatctatctatctatctatctatctatctatctatctatctatctatctatctatctctatctatctatctatttgtttatttgtttgtttgtttattctgtgtggaggtcacaggacagtgcacagatgtacaggagtcatttcccttctaccatgcgtgtttctgataccaaacttggtggcaagtgcctttacccactgaaccagcctgttaaagggctcatagcatacaatatcatgtaaatatcttgtactggagaagtcatggatgtattatggagctatgccttgagaagccatctcaggggcttcttgggggcaccctaggaaattgaggttaggcccattttgagaacccagggtatgaagtcactaggtttgtatgttgctgatcctagggaccgcgtgtactgctatctgtagatctagactccttttggctgatgcacgatcccttgtgacaagggcaggataactccttgggcaagatggcttggtcatcagccttacagagaagacggtattacatggcttagtgtgtaaagtgcttgctcctggtctgacaaactgagttcaatcccttgggcccacaaggtgaaggatagtcagctcatgtgagctatcctcctgcctccactcaaatatacactaatgcaataattataaaattaacttaaagagtggacagatttaactgtggaattgtcgaccaggacattccaacagagaggactatttgctttattcacatccaggggagaagaagagcagtttactcttttctctaacggttccacatcaagctggacatggtggcgcacacctttaatcccagcacttgggaggcagaggcaggcagatttctgagttagaggccagcctggtctacagagtgagttccaggacagcctgggttacacagagaaaccctatctcgaaaaaaaaaaaaaaaagaaagaaagaaagaaagaagaaaaaaaaagaaaagaaaaagattccacatcaaaagaacaagaggaggaggaaagaaaggcaagctagcagctcggtgtccaaagcatccgcggtgtcctggaggaaaaagaaaatcatggagcaagcagctaaatgccacatttgttccagtgtgactccgagctggccacttaacctttagagctttggaattttcattagtgaaataatgccagtgttgactgaatttcagatagatgtgggggcagcttaggcaaagagataatccttaaagccctctgctaattgttactcatccctgggactaggaattagcattttagacagaggtctttagctataaagaaaacccatccctagatcccctgaaaagtctgtgtcagtgtgagcagggccagtctgccccgtgtctgtctcagtgtcagtgtgagcagggccagtctgtcccatgtctgtctcagtgtcagtgtgagcagggccagtctgtcccgtgtctgtctcagtgtcagtgtgagcagggccagtctgtcccgtgtctgtctcagtgtcagtgtgagcagggccagtctgccccgtgttcgtcttctagcactgggattgagtgcagacttcttgctctcttgcactcagcttgtcgtagaagcaacccccagtcccttttcacattttgttgttgttgtttttttttgttttgttttgtttttgttttttttttttcgagacagggtttctctggaactcactttgtagaccaggctggcctcgaactcagaaatctgcctgcctctgcctcccaagtgctgggattaaatgtgtgtgccaccacacccggcattgttgttttgagataatcttactaaattgttctggatagcctcaaattcaccccgtagcccaggcaagccccaggctgaagatcttcttgtcttaacctctcagctgagatgccaggcccaggtcccccggcccccaagcctagtctccctcctcatagtgctaaaatagttgccatagctcctaatggccccttcagactgactccagagggaaagattatctcatgggtcagccttggcatttttctccttttttttttttttcttttttccttcttcctcctttaattccatccattggattggcttcatctggagtcatcggtggggtctgggtttaagaactgttaaagaatcctattagcattaggcttgggtatgcgtgtcctaagtggcatacagagctactagagagatggtgtccctcctctcttatcgttcatttgggaggggcatgtgcagcatctccacggaggtcagagaacaacttgaggggatgagttctctcctcccaccacatgggtcctgatgacaaacttgggtcatcaggcttggcatctagtacctcctctggcccctttctctgccttctcctaagcatgtcatctagagttccgacaagagaaacagcttcaaagagatgacctgtttatagtcacaaggccaagtacagaaccaggatttggtccaggtgtggctctaaagccagtgcttgccactgctcaatttctctatgtccccatggccttgggcacctctggtcatgtactgtcagtcaaacacacatggatgctaagcttaaccaacagtgaagccaaactgaagcagctgctgcttcctctgaggcaggagactggctacgtgtgagtgaagggccctgcctgacagacaggggatgggctggtctgaagtctcttctatctactctaaggttgtgccctcatgtccctgagcacacaacgctgagtctggaatactttagaagtaaacgctgtccctccacaaccttccccaggttcggtcgccggcgcgtcatcgtcaagaaggggcagatgggcaatagcttttatttcatctacctgggcacagtggccataactgaggacgaggatgggagcagtgctttcctggaccctcacccaacactgctgcacaggggtggctccttcggggtaagccacggggaagggcctctgcttctggggcttggggttgggggatgaggggacgcctgcttcaacctcttacccaggccctgactgctttgtcctctgtgcaagtcactggcccacataggccccaaggcctttccttacctgtcagatgccgatgagtaggactacacacatctcctcacccgtgtttgccttttcaccgttcatagacacttggatgccagagactccaccgaggcctctccactccctctgctctagcctgttcagacctgttgtctctttcccatatacaaataaagggtgggagggtgaaggggagggggccagaggcagggaagatggatgcaggactgagtgtggagtcacacctgcccttgtccttgcttcccccaggaaatgggccttctaagcaccacagtaaggagtgccacggtggtctgcatggaggagacagagttcctggtggtcgacagagaggatttcgttgcaaataagctgggtgacgaagttcagaaggaaactcagtatcggtacaacttttttaggtaaccccgcctcattggatgtcttttccctttccctggccgtggctttgccttcgattggaaatgtgctggtggttgctattggccttgggtggaaatctccgtccccatccagcttctctatctagccacactccaaacgttgccttcagccgggcagtggtggcacatgcctttaatcccagcacttgggaggcagaggcaggcagatttctgagttcgaggccagcctggtctacagagtgagttccaggacagccaggtttacacagagaaaccctgtcttgaaaaaccaaaccaaaccaaaccaaccaaccaaccaaacaaacacacaaaaaatccccccaaaaccaagtgttgccttcatagctcagctcgaatatctcttcctttggagagtagctgacagaggctgagtgcatcctgggccaggcagggactaagtcctttgtaccagcattgtattcatctcatatccaatcgtgtgaggctgtccctttgatttccctcagtgtgtagatgagggtacggggatgatgacatgtcatatctaattaaaaaaataacaaggtctgggtggtggtggcggcacacacctttcatcccagcccttgggaggcagaggcaggcagatctctgtgagttcaaggataccctggtctatagagtgagttccagaacagccacggctacacagcaaaacctgtcttcaaacaaacaaacaaacaaacaaacaaacccaaaccaaaccaaggtcccagtgttctatttcacttaatgtacctcacctattgttgctttagaatagatagggcgccccatttacagtgcttttgtaccctgtattccttgaaaaccctccccataccatgactctccattgtgtagtaattgtttcatagtttgcatgccatatctgacagtaccgtgccaacaggggccagtatggcctctccaccactgttatcttcctgttgtcatagtgccaaatgcacttgatgttcagtgctgactaaatgaagctgtactggagggcggcatctagccctgtgtctggcctggacggtagcatcactgagtgcatggagcctgaaaatgggtagagagggtgtctgggaggagtggaaacagtggggaaaggggtctcacaccaaacctcagctcctaggctcactaagaggaaagttccatggactaattacgtttagtggagcttattctgagaatcacagccagtggcacagagacactgagaggacatgaaggagaagttggttgctacagccgagttaacggtgtgctatggtttggctggttagtagttcagcagcttgagtgtatagaaggttcaccagcctcagctccatgctgcgactggatcagttgttcctgagcccaggacatgggcccagcccaaatccacagcctcaggtctaaggcaactcggggtaaggctttaactcttgggttttagtctcttgcttcatgaaatggggtggtgagagctctcttccaagatgtaatgatgggatgaagtgatagaggggagggcccggtacatggcacatagtaggatgctcttctgggatgttcttcttcctcctctctagacagccctctggggtcagggtatggccctgtatgacctgttcctatgtcttgctcagaaatgaactcagcatgtttgatgcccatgtaaacttgagttaaccagctcagccaacctgggtccattgagttttgagcccatcacatgttagcactaagggaaatgtgtcactgttagcagccccttggagccaacaaccagagagacacagcttctgactcaaggtccaagaggttaggggaagagatggcctctttggagtggacctttaaacaactccaaaagactccagacatcttgactttcctcgggatcagagcaaaatgattgaagttcacaggcctgaggctgctagaggatggtttaagctccaagaccagaggcagggcaggaccgagtagccagtgcactgaagtaagaaacctcacctgagctgacattccttggcatggggtgagcttgtcaagctggagctgtaaagagtagcagaggagatttggaagaagattcctggatatagaatcagagtggggtactgcgcaaccccagagtttgagcagcaacagggaggggccctcagctgaagaggaggccttgaagaaatgggtgaccacagactgggtgaggtacctgcatgtgtcctggcaaaatcttacaccccaggcattttcccaagagccaaagttctaataggcttctctctcccccaggaacttggacatattccagtcttggtctgaagagaagctctggaagctggtggccttggggaggatagagaggttctcatacggacagatggtgtctaaagactttatgaattcggcattcatcacatttatctgccaggtgaggtctgatctgggagcaaagctgggaagagcaggtctcatctaaagccctcgggccaggcagacatatttgagcctgttctgcagtatacacagcacgtgtatttttctgaccttccttgttctggcttcatgcctccggggcaaagcacagagagcgtgtctcagtgggtcactgtgcctcagagggtcactgtgtctcagtgggtcactgtgcctcagtgggtcgggatgtacagtgcacccctgttagtggaggtggggatgggagtgcatttcgaatgttggaaaatgagcgtaggacctaactctatgaactacatcttttgctgcatacacccctataattcagcttcataacttagacacagcaggagactaagtcatcataaagcagctgttaaatacggaagaaccatatcctcacctttttttttctaatagcctaagatgaaatttatagaaattgtatttctatcacaaaataaaccacaatttgtgtgttctggggccactgtgaggtaaaacagtcacctgatgtttgcacagtggagctgttaactgagggatttaacaggcctcccaggtagacggtgcatatgccatggacacactggtcatggctcatgtcccaggcatgacagaaaagggtggcaagaaatagattcgtggtactcagaaaggtgcacaacttcaggcttacgatctgtgcgcttctaaagcttcccagttaatattcacacttaggaagactatgggtagctataaccacagatgagttcgtttaggtttcacaactcccgtctcattttggcctcacactagcctcccagaggttggtagggcactcgctctcttctgacagagaataaccaaggtacaagaatatggctgtctacggtcatggagtggaagggagggggcaaggttcaacccagctctgtctgactccaaagctcttctagagaactgggactgaagttgaccggccagttccttacactgcacatcaccaaagacatttggtgcattttggccaaccttatgctggtccagggtatgaacggaggcaaagatggggaaggctcattttctccgtctcgtccactggacctgcagcatagtcaaagctgacaatgccaagtgccagggatatttataagtggtttccagggactgggaggactgctgcaaggctggaggctttgaaggaacttcctgaaggagccgagaggaagatgagacccgtagatccaaggtatacacaggactgacatgctctggaattggcttgtgtgggcatccccagctgagtgttacatatcagccattttatgagttggtaacacaatacttttttttgttgtttaacttataactttgttgataataatcacatgtaaagatattttagaacactcatataggagacacgggataacaatgggagctctttgggattcatgtaactcctgcaggcaactctagaggctttctcagtcaagagcagaggcccaaaactggccagattcattttgtggaaccaaccgcacgccgtgcactgacttcctgtccgagccttgagtttactgtggaagatagtgacagagagcctcagtatgctgcagtgccacaacatgaaaccaacccatttgtcgtcctcaagcagacagtgtcaccgcaggataggggaccaagtgcggttgcttgcctctgggaggagtgctccctgagcctgcctttggagcaggaaaagacataaaagctcatctcaatggggactagaaaatcaggatgagggagggtgagacccccaggagctcactgtaaattggaagtataactggatcgcaactgacacttcctcccccactcccctccgcttctgagctgcagccatgatgtaacaacagacagatttgggaaagggactccagaaaacatttccattccgttgtgacttcacaaacatcaaatggaaatgacagagacccctcccaccagtggagtgattaagaaaagggcgggacaggacacttaatgaatactaattaaatgcatactatttcaagtgtctgctgcataccaagtggtcatcctctgaagacccggtaggaaaacgcttgctcgacagggcagagagtgtgagaggagacaaatgaaccagatcttttggagatcaatagggggaggtcaaaacaggccggtgggccgggtgtggtggcgcacgcctttaatcccagcactccgaaggcagaggcaggcggatttctgagtttgaggccagcctggtctacaaagtgagttccaggacagccagggctacacagagaaacactgcctcaaaaacaaaacaaacaaacaaaaaaacccgaaaaacaaacaaaaaacaaaaaacaaacaaacaaaaaaaaaaccaggccggtgggacaaaccaggaattcctgagcttggaaagttctcttgcctaaaatctaaaaaatgattcgtgccttcagtaacctggggccatggtgttctatgaggaaaaaatcaaatacaaaaaggatcttggggccagcaatatgattcagtgagcaaaggagcttgccgccaagcctgatgacctgagttcaatccctgggattcattgacacggtggatgttgagaaccaatcccaagctgtcctctggcctccacatccatgctgtggcatgaggccctctcaagaggaagcctcatgtgagactgagagatggcttttgggatttttttaaaactcactagggaatttctaataagtgtgcgtattttattcaatatgagtagtgttggcaccccctatttttgtcatgccaaggattgaaccacgggtgtatttaccactgagatacacccccatgcccccttaaaagatagtttatattaattatacattttctaacatctgccagtcttattttggagacagggcatctatttgtagcccaaggtggccttgaactcttcatcctcctgtctccactgttgagaattcctatgccccatgcgggggcctaatgcaccccttatgtggtaacatttgtgtgcctggggaaagtgcacgtttctccattgttaaacttatcagcaccactggggggagtgttgttcttcccgggccaggcccctctcccaaagggattaaggctggctatcaccagagcaaaaggggatttatctcaggcctgttagttaagtaggtagcagattggtggagggctggaggggtggggaaagctgccgaggcagattctgaactgcaaatgcccgatactcaggcgaaggaggaagccactctcacagcccttgcccacagtaaacaagcagctaaccagcacttcccagcctgtgggaaccagcacatccaccagtgggacccaaagagccccagcacctttgctgcaagagcaggaattgaaatgattggcttccggactctacaggttcgggggactgactatgctaaacttcatgttctctgcctcaggcttggaaggctgaggttacaggaccacccagggccactggaatggctttcattctgttctcacctccattattcatctgtaaaatgggaccactcacggccgggcgtggtggcacacgcctttaatctcaggcactcgggaggcagaggcaggcagaactctgagttcagcctggtctacagagtgagtttcaggatagccaggtctacacagagaaaccctgtctggttaaaacaaaacaaaacaaaacaaaacaaaaacaaacaaacaaaaaatgggaccactcattcaaaaagtcttgcaatagtttaatgttcaaaatcttttttttttttttaattttaaagaaggtgtgtgagccgggcatggtggtgcacgcctttaatcccagcactcgggaggcagaggcaggcagatttctgagttcgaggccagcctggtctatagagtgagttccaggacagccagggctacacagagaaaccctgcctcgaaaaaccaaaaaaagaaaaaaaaaaaaaaaaaaacagaaggtgtgttagagagatggttcggctattaagaacatgtactgttcttatgaaggctaccaaccacctgtaactccagctccagggtatgtgatacattcttctagcctcagatggcaactgaattcacacacaaacacacacacactcacacacacacacctttgcacaagtgcatctgtgtgcaatcaaaaaataataagtcttttaaaaaaataactttttttaaagcatccttggttaatgttcatctgccaccccagggcttctaaacagggcccagcccagccggcagccatagttgggagctcatgagacacaagttctgtcaggtacagtggccgctctatgtaatcctaccatccggaggtagacacaggggttcagcgtcatccttagctatctagggagttgggagtcatcgttggctatgagacatggcctcaaaaaacaaaacaaaacaaaacaaaacaaaacaaaacaaaacaaaacaaaaacaaaaacaaaaaaccccaataaatcagagtctcatccaggtgcagtggtgtatgtctgtgctcttgcagtccaagcacctgagacactgacatcagaagattgattcaaaactgaggccagcctgggctatatagcgcattccaggacaccctcctggtgttggacagcctatgggtattggcaagtatcaacctagtgtgatatataataactgtactgtcctaaagccacccagttccacctatgcctaccccaccttccagccagaatcataggtctgtttttttgtttttgttttttttttttttggttttggttttgggtttttttttgtttttgttttttcttttcttttcttttctttttttttgtttttggaattctcgttcctttattttttgataaactgctagtaagctcccattagaagatctttaacattataccaagttgtcttggtcttctgatcatatatacacacacacatatatatatgcatcttttttcaagtaaagaaatgtttaacagatgtaaactatttattgaatatttgccaccaaatattgttaaatacattatcttgcagcatatcactttcaagttaaaatgtcagaaacaaacaccaatatttacagttcttgtaaggaatgttatataatgacacattaaggcgtaaattcttttggcttataattcttaaaagaatgataatagcaaaagtgatgcaaaatcttcagtgtgagattatgattaagctacattttacaaaaatatggtgtaagatggcaataatcccattcaacatcctggattaggtccctcgggagggactgataatttatacagtcaaactttaaaatttacagataaatgcagtttaatactgccactgagaagtacatctcttaacatatacaactttcaggccacagttttgaaggtctgaagtatcaagttggtttgatgaattagccggttggcacttatgaacacatttattgccttgccatctttaaaataagtctttagagtgtcactgaaacttttggagtattttacaaattctttcttttggtgttcaagtgccctgcggttctggtactgatattttttgaagacattattcactgtatcaagtagttcttttattgcactagctatatccttgattgtctgcagaaacctcactctgtcattgatctcatcgggaatcttactgagaatctgtttaagtgcccgtgccttttcatttaggtcctggaattctggctctggccgctcaatcatgtactcttctacgtcatcagctgccatacgaaggagggactcagtgaagttaacttctacactttttttctctaatattttcataatgatgtcttgtgtgaggcctggattttccttttcagccttaatgaaagcggctctcagagtctgagctgcagacaaatttactcgttctagctcattaaacacaggatacatgactgcatagagaggcatagaaaccatggaagtgatctcagcttcattcttcatctcttccattgtcatcctcattcaaaagccaactacagtagaaaaagcaatgctaaaatgcagaggaatcttcattcactgccgaatttcttcccttttttatgtgtatgtgataaagactggtacacaaagaagaacagcaatcggcaactgaggcacggacttcacttcccacctttggagccctcttcaactcccggatcaattcactcaggcgacgccggaaggacccctgtttttgttttttcaagacagggtttctctgtgtagccctggttgtcctagaactcactctgtagacctgtatgtatgtatgtatgtatgtatatatatatatatatatatatatattgcaaattctcagacccaagagctattaaatccaaaagtccaggagggagggcttgttaacaaagctccaagaattctgaagcacactagagtagttttgttttgttttttgttttttgagatagggtttctctgtgtagccctggctgtcctggaactcactttgtagaccaggttggcctcgaactcagaaatctgcctgcctctgcctccggagtgctgggatcaaaggtgtgcgccaccacgcccggctactagagtagtttttaaaaatctattttacttattcactttacaccctgctcccggttgtcgccccctccagtcttcaccccccttctcctctgagcaggtgggggcccctcccaccctggcacttcaagcctctgtgaagctaggctcttcctctcccacagaggccagacaaggcagcccagctagtagaacatatcccacatacaggcagcagcttttgggacagcctctgttccagttgtttggaacccacatgaagaccaagctgtacatctgctacatatatatggagaaggctgggtccagcctctgtatgttcttttgtgggtggttcagactctgagagccccaaggatccaggttagttgattctgttggtcttcctgtggagttcctatcccctccagggcccacaatctgtcctcctgttcttccataagagtccccaagctccatctactgtttggctgtgggtgttcgtatttgtctgagtcagcccttgggtggagcctctcagaggataccatgctcctgtctgcaagcataacagagtatcagttatagtgttggggattggtgctcacccatgggatgggtctcgagctgggctggttattggttggccattccttcagtctctgctccatccctagagtactttttaaaagggaaattcctgtctctccctacagattggttcattgcaaaacctgtgtggcagttacgtgccacacaagcgattccaggaaagttggggctcctgaggaaggaatgtggaggccacagtgtgggtgcaggtagggcacccctgggccagcagtgagtggagctaggtttgttccttatagtgctttactaaaatctagactttaacattaaggtttatatggcagtcctcctctgtggcttcgagaattcagagcaggccacggcatgccagatccggtgtgtcctctagctggaactgagatgcccctgctctttggaagggacagctctcttgtctcacttgtgtttgctgtgtagctggctctttgcctgttcagacttcctcagcatcctgactcctgtgttcctgtcactagaggctgaagccagcaaccagcagctgctttctcctaagggggtcttggggaatagcattcctactgggatctcaaactcagttactggccataattgatccattctgagccacttggggacacatggttggacctctctgtgcaagtaccagatgcaataaagggctgtaagagactttcccaagaggaatccttgctctctcatctgcccttattgggtgagaagaatttgttgaatgaatgctgaatagagccccaaggacagggcctggcatacagcatcggcttatgagatgtctgttcccttgccaatagtaggctgccttctggctcaatccttctgtgtctctcagagattctattaagaagtataagatccctgaagctggagagatggctcagtggttaggagtactagtgttccagaggaccctggttcagttcccaggacccacatggcagctctcaactgtctgttactctagttccaaaagatctgtgagagtttacaacaatacatataaaataaaatataaatatatttttaaaaaggataagatttctataaagataggacataaaaggagcttagaattttttttttcttgctgctgggatttaagcccagggcctcgaatatgctaggattgctttgtaattgtttcttttaaaagcagtgtctctctgtgtagcccatgctggccctaaacttgaaatcctcctgccttagcctttgttgtgctgagactacggcctgtgcctccacacttggcctggagacttgatccaaactcccacgatccgaagagcaggagttagagactggcctttaaactttccatccacaccatcacaagcctcttctctaaggaaactgaccaaagcaaataaggaggctgtgcccaagaagaaccgtcccactgatggcctaggggagaacgtcagcatttgggagctgactcggtggcctctatagaatgaaaagatgcctggcagtggtggcccacacctttaatcccagcactcaggagacagaggcaggtcagcctctaagttcaaggcaatcctggtctacagagttccaggacagtaaaggctatgtagtgagaccctgtctcaaaacaaacaaactaaaaaaaaattaaaggcgcgtgtaagagtgcttgctgtgcagggcatagaaaaccactataaggtccttttctcatgtcatctagaagtaagcataagtctatgattgaacagggttaaaataggagacgaggaaagacagtagctttcctagtgttatccagcactttctactcggtcttcattacccagaattgagtcactgtcaccctgagaataggggactttggaaaggtagacggtggttttgttctgtcttaaacaaaatagggaatgatgacaaattagaaatggccaaatctgaatctcttaaaaaatgctttctggggtgtggagagatggctctgtggttaagcactgcagaggacctgagttcagttcccagaagccacttcaggcagctcagaactacccacaattccttccaagaaatccaagagcatcatctgagtctcctggggtacctgcatgcgtgtggtgcatatacagacaagcaaacacacgtaaaattaaatgtaaaagctattcttgatgtataacagtataatgtatgcaatggaatttccaatctgaaccgtttctcttgatggattctacacctatcagctgtcaccacatcaacatattgaacattcccagcctccagaagacagccttgtgctttttctcaaacaaactttccccaaaggcgctcctaatattgccaaaggctactttggagatttatttttgtgtatatgggcgtttcgcctgcatgtgtgtctgtgcgacacatgtgtgcagtgcctgtggaggtcagaagagggcgctggatcccctggaactggagttacagatggctgtcagtggccaagtgggagcggcaattgaatccatgtcctctggaaaagcagttggtgtttctaacttctaagctacctctccagtcctaccacagagcacttttaccagcctctgagcctcgttataaatggaataatattagtacatacatctgattttttttaactcaactgtatgttgagacagagacaggaagatgccctgggctccctgatcaaggaatgtaatgaatctgagagctccaagttcaaagcaccgactgttcttccagaggtcctgagttcaattcccagcaaccacatggtggctcacaaccatctgtaaatgggactggatgccctcttctggcgtgtctgaagacagctacagtatatttatataaataaaataaataaataaaattttaaaaataaggtagagaaggatcgaggaagatacatgatgctatcctctggcagacacacacacacacgcacacatggcccatggggcacacatacaaacatgtacacacatacaaagaaaagcaatagcatagaataatatctggcctgaagtataactgatgtttctttttgtttgtcttttgaagcaaaatttctctatgtagccctggctgccttgagatttgtcatgtagagcaggctggccttgaacttatagagagctgcctgcctctacctcctaagtgctggtattaagggtatgctaccgtactcccctccttctccctcttccccttcttcccctcttgtcctccctcctcccctcctcctttcttcttcctccttctcctccttctcctcctccccctcctcctcctcttctgcttttctgttaacacacatttgcatcctctgctgtcccctgacatgtgagcgtgtgagcgagtgtcgtctgttgttcttgctttccttgggaacctaggtgattttttgcttttttaaaaaaggtgttttgttttgttttgttttgttttctatataaggacattttgcctgcacgtatataagtgcaacacgtgtgtgcctgctgtctgaagaggccagaagagagtgtccgatcccttagaatgcgagttgcaactgcttgtgagctgtgtggttgctggtggccacgcctgtctggaagagcagctggtgctctagaccactgagccatctctccagccccataggtcatcatgtctaagactagaaattaacaggctggagagatggctcagtggttaagagcactgactactcttccagaggtcctgagttcaattcccagtaaccacgtggtggctcacaaccatctgtaatgggatctgatgtcctcttctggtgtgtgtgaagaaagcaatggtgtagtcatataaataaaataaataaatctaaaaaaaagaaaaaaattaactacaatataattatagaagtcagggaatgtatgtatcaacgggatgtgtaacctgcagttcacagcgccaccaagtgtccccttccatccttgatggtaaccttagtcagtgtcagtactatgtttagtttttatgctgctgtaggtgtttgaattgtttatgtggagataacatttttatcaaggagaacaaacactgagcaaataaaacaaaacaggatgaggtgaggtcaaaacctggccttgcctggggtgtccagatctaactaaccctttgcttgtgtcccttgatgtgtccagggcaactgtgaaatcctgcgattggtagccctgggcgactgcagtgcctattacaagtgggtctggcagcaactggagctgctggatcacaaacctctgagaattcatgacaatggtaagtcacatggccacatctgccagttgacagcacagctggctggggaaacatgtgtcccctgggtcctttcctggctccagtgcccagtgcacttgtggacatttttttctgctttgaccattcttttctaagaactgaagagtccttcctgcctgctggcctggctgccccctccctctcgctgggttcgtttatggaagcctttcctcctgctttccacgcccctaccctgtctttccccagctctgtctactcctccctcacatcttaccaaagaatctttattcagagacggctcccagacttctcatgctgacgcagcgcttccctcagctctcactatatcccatttgcgtctgctgaatttgtcttctgccatgtctgtcccattgaaatcatacactgaatctgaattggttgttaaatagctgtctccctagaatttaagctccagttccccgggcctgtggccatcccaggcatcttgtgtgtattcagagtgactcacaggatcaaaagacatttgtgtcttttgctcctgtggatggttttaggtgtgtccttaagatatgattgtaagctgggcgtggtggcgcacgcctttaaccccagcagaggcaggcagatttctgaattcaaggccagcctggtctacagagtgagttccaggacagccagagctacacagagaaaccgtgtctcgaaaaaacaaaaaccaagcaaacaaacaaacaaaaaagatatgattgtaagatgggcgtgctgccgcacgcctttaaccccagcagaggcaggcagatttctgagttcaaggccagnnnnnnnnnnnnnnnnnnnntctgaattggttgttaaatagctgtctccctagaatttaagctccagttccccgggcctgtggccatcccaggcatcttgtgtgtattcagagtgactcacaggatcaaaagacatttgtgtcttttgctcctgtggatggttttaggtgtgtccttaagatatgattgtaagctgggcgtggtggcgcacgcctttaaccccagcagaggcaggcagatttctgaattcaaggccagcctggtctacagagtgagttccaggacagccagagctacacagagaaaccgtgtctcgaaaaaacaaaacaaaaaagatatgcttgtatctgtgtattctctggtgcccatctaagttcatatcgatgccatgtgtagctgctatcattcattgaattctgcatatatacccagtagtttggctgtttatacataagtgtaattcgtataaaggatatattagtcagggttctctagagtaacagaaattatagaatgaatctctctacatatttagaaaggagatttattagaatggctcacaagctgtgatctagctagtccaacaatgactgccgatgaacagaaggtccaagaattcagcagctgttaagtccacaaggctgggtgtctccgctggactcacaaagaagtaggctcaaatgtcggtgaagggttgaatggtcttgctagtgccgtgagaggaagcaggaggagaacaagcttccttccttcaggtccttagatagagcttagccagcagaaggtgtggcccagattacaggttgctttttccctctctaaagatctgaatcaaaggtgtgtgttcctactgaaaagatctggattagaagtggatcttcctcattcaaattaagcaaaaatccctcacttgtgtgcccctccttttgggaattttagataattccagattatagtcaagttggcaactaagaattgctacactacagagtttcaataagatacaattatgtctccatttcagatacagaaagtgaggctcagagaggcaagactcttgtctaagggtcatacagaagctaagaatggagacctgcacaacacaggcccatcttactgagagaaaaccaagagctttcatgtttgtcaaaggcccccgtcttgctcctgactcaggggtcatgttggttctgttcacaagcaacctgtgtgtgtgtgtgtgtgtgtgtgtgtgtgtgtgtgagagagagagagagagagagagagagaagagatgtttgtgtgtgtgtttgtgtgctatgtgtatgtgtgtgtgtgaggagagtgtgtaatgtgtgtgagtgtgtgtgtgtgtgtgtgtgtgtgtgtgtgtgtgtgtgtgtgtgtaaagaggcctcagccctcatcagacatccctcagggatctctttccacatcttaccaagtatcagctctgaactccctcctagcaatccttgcgtctccaagagtcacttggaggatgtggccagttgttcttcgatcacagctgaagctaacatggatgggtgggtgagcaggagagaaaagtgcatgtggggtgtggcaaagagaattttggagtttgacagaccaaggtttgcctcacacagtagtggctgtcggttagcacttcaagtctttaggcttcccctttatagacagtatcagcactaagagcctactgagccgggcagtggtggcacacgcctttaatcccagcacttgggaggcagaggcaggcggatctctgagagttcaaggttagcctggtctacagagtgagttccaggtcagccagggttatacagagaaaccctgtctcaaaaaaacagtaataacccaaccaaccaaactaaaaggagctgaggctcagaccacagggtcctgtgtgacactggacaaatggttgtctccttgtacatccatgtccttgggtccggtaaaatgtaaattatgttccatatatcatagctttacttggatattaaacaaatgaatatataaaactcatagaccactccctagatgagtgaataaaggattactaggtgacaggcagaccaaaagggatgtcacctctcacatcagtgttaacccatagatataaggctgtactgaacaaatttagatatgctatgtttctgttatggtccagttcaaaatacgtttaaatttctctttggatttcttctttgccccactgaatattaatgagggtgttatttagttcccaaagatttggggaccatccagctctctttgctatttattatttctatgataaaatattcagtacagtttgaatcccctcaaatgtgttgaaactcgttttatggcccagaaagcaatctatcttggtaaatgctccatttgcatctgaaaagaatatgctgttatgtggtgctgcgtgccgcgcatgttagtcagctgggacgggggatgttagccaagtggcctgtggccttcctgattctctgccctgctcagtcagctgttaactcagagctgagaaaatctgcagctactgtgttctctccctctccccaccccctctttattgtcacctgatgttgacttcaaggtcctagggagccacagaattgacctcttcaagacaagaaaaatgaacttttttttttgaggtgttagactttgaaccccagactgcacagaccaggaggtctgccacgagctacgttcttggcctaaaatgaacttctttgtctctagtagcattctttactctaaatctcctttcctttttcttttttgttgtttgtttgtttgtttgttttccggagacagggtttctctgtgtagccctggctgtcctggtgaaagacccccgaggtgggtggtcaatcaatctgaggagaccctcccaaggatcagcgagaccacgattcggatgtaatcagcaagaggctttattgggaacacgggtacccgggcgactcagtctgtcggaggactggcgcgccgagtgtggagttcttaccctttttatagggctggggctggggagcaaaaagcgcgggtacagaagcgagaagcgagctgagtggttagttcaaatcaaggcttggggtatttcctggtcatttggggaacctgaaactgaggtgggactttttcagaaactgttgctggttccgctttatctgggtaccatcggttcttggcccttgtcctagtattattcagccttgatttgtaactgttaatctttaactgaacttccttgtaacttttgagaactcagctctggtactttttcatgccttgcaaaatggcgttactgcagctagcttgctaagccttatggtggggtctttcattcccccctctttctggaaactgaataaaatcttttattcacgtgattccactgcttctggatctattgatttgagttggtgatactgttgagtcagaaccagggcctgcaccaccgaaattctgtcttttacaaactggaccaagcggttgagaatacagggtccgaagagtaggattaataaaagtactatcagagggcccataatggtggatatcagggtcgtgaaccatggggacctgttaaacagtccctcaaaccacccttgtcctgattcgaacaatttttgtctctggtttagtctctctcttagcttagccatgctatcccttactacgccagtgtggtccgcgtagaaacagcattcttcttttagggcagcacataatcctccctcttttaggaacagcagatctaatcctctccggttctgtaggaccacctcagacaacgaggtcagagacttttctagggcactgactgatttttctaaggccccaaggtctgtatgtatggctgcctggagctgctcgaattgtttggtggccactagggctgtagtccctgttcctactcctgcagctatgccgcccatagtaagtcctcccaacagcagggccagagttaatgacaccggctcccttttatatttggtttttttctcaaactggccataaacataaccaggggagtggtaggtcacctttggccagagctcaaccaggacacagtaatcggtggtgaggttgagtacagtagtagataggcagggagtgagcccggtgttgcaagcccagatggtcccggcgggagcagccagatagtaggacccgtcgctcgtcttctgggtggtattacacagggcctgatgggttttgggaactgctcctacgcagagtccctgtccggtcacttcggacagggtcagcttgtgttgggaggccacggagcagttagctggggcagaggtatggttggagtaggtacctaggacggcaacccnnnnnnnnnnnnnnnnnnnnnnnnnnnnnnnnnnnnnnnnnnnnnnnnnnnnnnnnnnnnnnnnnnnnnnnnnnnnnnnnnnntagtttagggaaggtgtcagtcatcgtccccaggagggaggtggcgttagctgtttgtcctgtcattaggttggtaactctccaagtaacattgaagatctggtgagggctgtcacgttgtaccgaggctcctgccctcaccaagatccccataactattagggggccccacgggttaatcttatctttaaggggttttgagaacgctggacctttcatgctgttccggctggaggagttgtcgccgcctttacgtgagcggcgtgtatccacgcagagatgccgtctactttgagagcggtgggggtggtcagcaggacggtgtagggtcctttccagcggggttctaagttcttagtctggtgccggcgtacccacacggcgtcaccgacacggaaggggtgtggtatcactggctgatccagctggtcctgataagcagcggccagtggcttccagacctctcgttgtactgcttggagggcctgtaagtgagcttggagagagggactattagttaactttgacatttcaggatcatgaaaattgacgaggggcgggggtgccccatacaggatttcatacggagtaagtccatgggggcccggagtattccgggctcggtagagggccagggggagtaggagtacccagtctctagtgccagctgcaagcgttaatttggttaaagtctccttgatggttctattcattctctctacctgacctgaactctggggtctataagcacaatgtaacttccaatcaatccccagtaaatcggccaccgaatgacttacctgggagacgaaggcaggcccattgtcagaacccagtacctgtggcatcccgaatcttgggaatatttcttctaatagcttcttggttaccaccttggcggtttcacgtttagttgggaaggcttctacccagccagagaaggtgtccacgaacactaggaggtacttgtacccgtacagtcctggcttaacttcagtaaagtcaatttcccaatgggtacctggtcgatgtccgcgtactcgtacccctgccccgatcttggctttactagcattcacttgagcacaagctgtgcatgattctgccacatactggagagttctgtctctgtttaacatgtagtaggggctttcttctctgtcaaggagtgccttcatcttttgagggctgaggtgagtgagcctgtgtaaggagtctaatagttcaaacacaaactgatcgggcattaccggcttgccttgtaggacccaatatccttttatctgattataggtggctcccagttctcgtaatctctttagatctgtttcagtgtagtggaaatgggagggcgtatacggggtcgagtcctctatgaggagggtggaagtttctggagatgtccttatggctgcctctcgggccgcttggtctgccatacggttgcccctggcttcagcactgtttcccttttgatgcccggggcagtgaattatactgagtcttttaggcaggaaaagagctttcagtaaagccaggatctcgctcttgtttttgatttctctgccctctgaggtcagcaaccctcgcctcctatagatttctccatggacatgggccgtggcgaaagcatatcggctgtcagtgtaaacatttagcttcttaccttctgccattttcagggcttgggtgagtgcgatcagttcggctcgctgggctgacgttccagctggcagggccctcgcccagattacctcggtctctgtcgtcactgctgccccagcttttcgctgtccttcttgcaaaaagctgctcccatcggtataccaggtgtggtcggcgtctgggatgggctggtcggtgaggtccggtctggttccatgcgtttcagccaagatctcgaggcaatcatggggggctcctttctccggtagagggagcaaggtggcaggattgagggccaccactggtccgaactgaactcggtcagtgtctaggagcattgcctggtagtgggtcatgcgggcattggatagccagcggtcagggggttgcttgaccagtgcctctactgcatggggggccaggattttgggtcagcacggagtgttgggccccagtatctaccaggaaggtgacgggttgccccccgactttgagggttatcctgggttcaggggggggctcctgaccctgacctccctagtcacctaaggtcaggagggaggtctggggcctcggtcctcggggccctcgtggcttctttgggcagtccttagcccagtgtcccttttctttgcagtaggcgcattggtccttatcaagttggggcctcctccgctctcccccctgtctatcctgtctctgaccaataactacagtggccaagagcttgctcatctctctatgtcttctgcggtccctttctttctctctctgctcatcctctgccctacggcgttcttctttttcctctgtttctctcctgatacgttcctctctttcttccggggtttctcgcttattaaagatcctttcagcttccctcactaagtctcctaaggtcttgctctttaaatcttctaaccgctctaactttcgcccgatatccggggcagactgccagatgaatgacatagacacattggtttcttgccctgggtcctcagggtcataaggagtgtacctgcgataggcctccttgagtctctctaaaaaggctgagggagactcattaggtccctgggttatcccttttaccttggccaaattggtggggcttctgcccgcgttttggagacccgctaagagcaactggcgatagaggactaggtggttcctaccttctgtagtggtgtaatcccaatcggggcgttcaaggggaaaagcagcattgacttcattaggcaactgagtggggcgtccatcattgccccggactgcctttctagcctctaggagcacccgctgcttttcttctccggtcagcagggtccccaacaactgctgacagtcgtcccaggtgggctggtgggtgatgaggacggactcaatcaaggccgtcaatttacctgggtcttcagaaaaggaagggttattatttttccaattgtataagtccgaggaggaaaacggccaatactgaagctggccatctccccccatgcggagtgggaatgcctgggaggaggtggagtccgctgcgggagggtccctccttccccgcagtcgagacaccatgggagaagggggggaaacctcggaggtggcggccgcctcttcttcatcgttccctctggcagaggaggaaggttgtgctccgtacggcggggggtcctctgtgagaaggtcaatgagaggtccgccgttatcagggagaacctggggcttaggaggtttgggctttatagagggggtaagggcagggtaaagggcagatcgggacggaggttgcgcagaaggaccgggcgggaggacgggagctgtcggtaaaggagggggttttggagagacaaacggtttgacccacggaggggggtcataggcaagtgcctcccaggtgacaatgtatgggacctgatccgggtgtccgtggggaccgggagagaacaccttagatttaacctgtaaaataatgtccaaattaaaagtaccatcttgcggccaccccacatcgaaagttggccactcggcagagcagaaggtgacccaacgtctcttcttgacgtccacggactggttggacgcaatgcgctggacgtctccccagtgttctagggtcagactcaaaggagtggttacggtctgtcccatatttttagaaacggtccaaaacaataacgaaccgacaaatgacaaaacaacacagagacagacaagacgcgcggcgcggtttcggcggaaaaccgaaagcaaaaattcagatgggggagaggagcgtttcggcccctcgccgcccaacagaaccacgtatccctcggtcaaaggagaggctccaaggagtccgagacgggtcgggttctcagatacagattgggccacaaagatggcccccgatgcctctgagacgtctcccagggctgcggccgggaatatgaactcgtcagttcttccacggaaccgccagattcagatctagttagccaactagtacagacgcaggcgcaaacattagatgccggcacgaacacgcacggagacagagacagacacgaaacgaccgctggccagcttacctcccggcgggggtcggtggtccctgggcaggggtctcctaatctcggtggaacctccaaatgaaagacccccgaggtgggtggtcaatcaatctgaggagaccctcccaaggatcagcgagaccacgattcggatgtaatcagcaagaggctttattgggaacacgggtacccgggcgactcagtctgtcggaggactggcgcgccgagtgtggagttcttaccctttttatagggctggggctggggagcaaaaagcgcgggtacagaagcgagaagcgagctgagtggttagttcaaatcaaggcttggggtatttcctggtcatttggggaacctgaaactgaggtgggactttttcagaaactgttgctggttccgctttatctgggtaccatcggttcttggcccttgtcctagtattattcagccttgatttgtaactgttaatctttaactgaacttccttgtaacttttgagaactcagctctggtactttttcatgccttgcaaaatggcgttactgcagctagcttgctaagccttatggtggggtctttcactggaactcactctgtagaccaggctggcctcgaactcagaaatctgcctgcctctgcctcccgagtgcattaaaggcatgcgccaccacgcccggcctcagccaagtgttcttatcacagcattaaaaattagtcaatacaatatggaattccaagtgaagggtttgtgtttgtgtcctttgtacatgtgaaggtcagaggacaacttctggaagttggttctgtccttccaccagggattgaactcaggccatccagcttgacagcaagtgcctttaaccactgagccatcccactggccctctttcagacatgtgtatagcgggagtctctatgagagtgcatataggcatgtatgtacacgtagtgtgcacgtggaggccaggggtcagcatcaggtgtctttttctattgtttgacatcctagtttttgagacaagatctctccctgaacctggctaccagaccccaggaatcctcccattcccacaccagtgctgagagtatgggcatgctgacataagcacacatgtatgtttgtgtatgtgaatgtgggcgtacacgtgtcacatgtggaagtcacaggacagtctcagttaccgtcccccttgtttgctcaagggactctggtttaatccatgagcatgccagactagctgtcccttgcttggtttctagttccatctgtttggaatgcttctccttccttctttggttgcctctatccttgatagtgaggtccatttcctgtgggggtgggtggtcatcaaatagatgccgtttacttttttaattcaatctactagtctatgtctttttttttaattgaagaatggatgtccttgagctccagagttgttacagacaggtgtatgctaactcctgtgttgctgttgattttcgtagtgtttagtgttctcctgttcctcttgggcatagtcactgttctagcatgttttgttttttgtggctccctagatgtgtctactttttgttttggtttggtttttgtttttttttttttagttgttgttgttgttttttgttttttgttttttgtttttttccttcgagacagtgtttctctgtatagccctggctgtcctggaactcactttgtagaccaggctggcctcgaactcagaaatccgcctgcctctgcctcccaagtgctgggattaaaggcgtgcgccaccacgcctggtgatgtgtctacctttttttttaaaaaggggggatataacccagtgctaccagtgagggcagtttatggaagctgctttcttcttcttcctctccctccttttccctcctcctcttcgtcactggctctgtagtcttggctagcctagaagactctcctcccacattcttcccaagtgctggggttacagtacggccccacacctcctccttaccttcctccacgcaccagatcttaggcaggtatctctggtgctcccaggctacatgaggcccattggcgtgttcttctgtgctttctcttaatagaaatatctccaaaggagagatttaaggaactccagatcaaatcctatcctctgcaggatttcacgtatttgaaacttctgcgtctccagaaagccagagagcaacagggaatagacttccacggcaagatcaacaaagtagaaaacactctccccaagttgctgggcccaaagatcaagtaagctgaagtcttagctagtaggacgtcggtcagatgtgggtgtgcaggaggcagagatgctggggaggggtagaggtcagaaggtcaaccctagattctgggtgttggggtaaggcagcccagggaaggcctgagtttggtatctgggcctgcattcgctgcccctcattcacacggctacaaagggcatcagccattcgtttccttggggccacactattgtgtttaaggacttttgaaaaggaggaaggatcgtctggctatggctgaactccttgtttgctgggcccttttgactcagcttcctcgggaggctgcccacctatgggagcaagctcaagtatacaggtaagagcttggcttgcagccagtccaactcagattcacatcccagtctggtcacttgctttgggtctgtgtccctcgtcaagggatctgaatcctctaagtctatgctttgtagtgagtggtttctgagtctcggggtcattggaagccagtagttacacgtagttacatgaagtattactgagtcatacttaacgctgacagagtgcttagcaccaagcactaagttatctatccctaaaggcgctgtggttatcacccccatttttcaggagagaaaactaagattcaccaaaggatgaagttgcttgttcaaggttatgtagacaggaagtggtaaagtcagggttcaagcctgacaactggtcaaccatccgccttttatctggtgtgagtctcacgactgctaagggacggatccacactgagaccagagctttggttttaacctgaggacctgaaaagcagaaaaagaccacagctgggtggcaggagcacctcccacttccccatcccatctgaaactcatgtgtggtgatatatcagagctgggtatggtggcgcattcctttaatctgagctcttgggaggcagaggcaggtgggtctctgactttgaggccagcctggtctacagagggagttccagaaaagccaaagaaaaaccctatcaaagaaaggaaggaaggaaggaaggaaggaaggaaggaaggaaggaaggaaggaaggaaggaagagaaaaggaaaggaaaggaaaggaaaggaaaggaaaggaaaggaaaggaaaggaaaggaaaggaaaggaaaggaaaggaaaggaaaaaaagaaaagaaaagaaaaggaaaggaggagaagagaggagaggagaggagaggagaggagaggagaggagaggagaggagaggagaggagaggagaggagaggagaggagaggagaggagaggagaggagaggagaggagaggagaaagagatattagtatggggtcagtatcaatgtctctgtttctttggtggcattgtcatttatccaccaacacttcctgtctgctggcctccgtaagaatggcaacccatgatttccaggttgtttttatcttatggagtattcctagttccagctttcccaaggtggaaataaaacaaacccgctgtctttggggagtcagtatgggagggagaaggggacaacatggacccggaagtgaaagacacggggactgctgtgttcgcacctggtttgtgctcttcttggaggggcaggaatgaagcctgtcttgtatatgagctgagctccagctatacccaggggatcatttcttctctatttctaatctaaactgcctaactactctcctcctgctaccatagaccaaaaccaaatacagtacaacaggattgtgtgtgtaaaattaaccccactttgaacaaaggccagggtctgtagcccaaccagggaaacttgtctttataaacagagaggctacctctactctgtgttcttgtcaagaagcctcaacctcaactgcatcccagggtggtcactttgcacagtctgttttcataggcagggaattccttccccataggagctttgaattaaatagacaggagctccaactaggccacatgcactttatgcctgggcttgtccaccaggctggctcagcactacagggtcatctgctcttcaggaagcatccttctggtccctaattcctttgtctcccaagtccagtgtctctcacacttctttaatcccagacagcagcaggcaggctcctgtctcagggtttgagttttccccaccttctttggaggtgtgagctctccaggagggctttcagccacagtaaggcctggcaggctgactgtgaaacagttctgacaagatgtctgtcacatttcagatccaggttcggtcatctagtcaaatgttccatggtcaacaccaagtttggtgaactccccaaggaggccatagtgggggtctacatgaagatccacaagacagaggaaggagagattgtggtaagtgtacccagagcttccttcagtctgatacacagcacagatgggctgagaatgtattgcagaaaggcttagaaacacatctttctagacttgatgatataagaaatagtgttaggttgtagatggcttgcagggagggtgtgtgtgtgaaagtgcttgtagcttaagcatgacaaactgactggggtccctggagcacacgctggaaggaaagaactgactcttgaaagttatcctctgaccgctacatgcgctgtgtagcatgtgcgagcgcacatgtgtgcgcgcacacgcatacattaaagttttaaagaaaagaataaagtggggctgaagagatggcccagtggttaagagcactgactgatcttccagaagccccgggttcaattcccagcacctacatgatggctcacaactgtctgtggctcagttccaggggatctgacaccctcacacagacagacacaccctcacacagacagacatacctgcaggcaaaacaccagtgcacgtgaaacaagaataaattaaaagagaaaaaagaaaaatgagaagaaaaatagtattcccttttgagagacaaggcctacaacttggtgtgatggtgtacatctttaaccatagcgcttggaaggcaaagggaggcagatctttctgagtttgaggctggcctggacttagacagtgagttttaggtcaaccaggattacaccgtcagagcctctctccaaggtaaagaaaataaagacatgataaggatgtgtggtttgatctttgaagagtctggggaccatcagaggaaagggaaaggcttaagagacttacagagcatgttaatgtattacaaggaagcagaggggtgggtaatcagggaagagagggaaccagctggagatgaggaggaggcccccctcctccggaggcaagtgaggggcagggaaggaacaaaaataatccctgcacatccctgcacatagctatgacagtgctatgatggcagggaagtgggaaagagctcagctggcaagatgttaggtacgagcatgaacaccctgcagctgagccagagcctgagtgaggaaaccggatggagaggctttgagaatccagagacaggtggatcctggctcagcagactccaggccaatgggcccccatgtcaagaaaccaaccaaccaaacaaacaaacaaataaacaacctagtgtggatggctcctgaagaatgacgttaggcttccacaaagcatgcacacacaagagcatacgcccacatacagaaagatgccacgacaaaacccattactttgtatacagagaccctgtcacagaagcaaacccatttgtaggtggcgctgctgccactgctcagcgctgcggtgcttgtctagggggccctgggttcagtcaacagcactacagtgaaggatgggggatggaagcagacttggggggagaagcagaggggggtggaggaagccggaagctggctcatgctttaagagctcttgctgctcttgcagaggacctgggttcgattcccagggcccctgggtgatccacttccagcactgacacggcagcggttaagagcactcatgtgttactcttgcagaggacctgggttcgattcccccatgatgactcacaactctctgtaactccagtgttaggggaaatccagtgcctgagcacaggcatgcatgtggaggcaaaacactcatactcctcattaaatccataactaacagctaaacaacccaacaaaaaaatgacatcagagatatagctctggtagggaccatacctaaatacgtagcatgtgtgagggcctaggtgcaattccccagtgctgaggaaactacacagcctgagaagatgcaaaggagctgtttacagacaatatggttgccttcaaaaaaaaatctcaacaaaccaaaactactcctaaaactgtcaggtgattctagcaaagtaaccgctggaaggcatttgtttggggacaggtgagattgctcagctgataatgagcataggtatagggctggagaggtgactcggtggttaagaacactgtctgctcttccagaggtcctgagttcaattcccagcaaccgcatggtggctcacaaccatctgtaatgggattggatgccctcttctggtgtgtctgaagacagtgatagtgtactcacatacataaaataaataaatctttttttttaagagcataggtataatttttttaagaagctagactgccacatatggggatggattagtgttaaagacatcattatggattcagatttaactcaaatatacctagagaggcttatgtggagagacggttcagcagttaagggtgtgtgtgctgttcttgcagagaacctgagtttgattcccagcgccactgggtgactcacaaccacctgttaactccagctctggggatctaacgcccccttctggcttccatgggcacctgcacacatgtggcattcactcactcaggcacataaataagaaataataataataaatctttaggggctggagagatggctcagcagtagcacacatactgctctttcggatgatcagatgatctgagcttggtcccaagaatctgtatcaggcagcttgaggggatccaacctgaaccccctggactcttctggacccttcaggcaaccacacatgcacacaccaccgttccatctacacataattaaaaataaaagtaaaccttcaaaatgtttgaaatataagtccaatgtagccaggcagagtttgatgctcctataatcagcagtacttggaagactgctggtcatgagtttgaaaccagcttagtctgcatagggagatcctgtcccaggaacaaacagcaaaacaatagagaaaaagaaaagcctgatgcagtaactgggtcaccttttagcccgtaacgagtgtggggctgagccaaggtagaaaagcacggacctagcagagccagagcctgcttgagaaggggctgtgtatggtctcctggagccctgaaacctgctctatcaccgagtcctttctgctgtgccccagctaggacatcttcaaagtcatccttatacccttttccatgtcaccacggttatgaatgctttcccactggcccgagtgtctgtcagggtgcgtgggtccccaacatcctccatcagtactgacttaagggtttggttttcttttgctcttgggaaggtttcccttttgtttagtaaactggtaactttaaactagttccacctaccccccgtccatggtgaaacaggagaactccactctcttgccatgagatggtctgagatatttaaagaacgtcattttggcctcattcagcgtttctgtagccagactcggtgccaaggctcccgagaaaactttctcaggcagatgatcttctttcatcagttgctctttccatcacagtgtcgagcctcccccgccctccccctccacatgcacacaccacacacacacacacacacacacacatacacacaccctgcttttctgctgtgtgtcagggtttcagagttcactttgtaccactcaacacaaggcaccaagatggtagctgaggatactcaggccagctggaggcatggaaaatgggtagatggtgagttgtttgggaagttttgtaaggaagaggagtgactgggtcccttccatagaagacacccctcaccccaatgctagaatgcccaggaaacaggtggggacaggagtcgaggcccagatcttgagtcaagaggtgtaggggaaaatagcttcccagcgaagcaggtgcaggcttcttatttttatgttccactaaaatctgtgtggtgttgagtaaattgctttccttctctggatttgtggcctcatcacaaagtgtagaaattccccaaggccagctgctgcctctaacatgtgacttcatgtgcatacatgttcattcagcagattcctgcatgtctgcactggtttaagaacagcatgaggtgtcattgtgggcaagtagaccacatgacccggtgagggacaaaggataaagagatgagttacaaagatggaagtaattgaacattgcagctgcacgtggactggaaaccaagaggcgtcttacatggggtggtcagggagggaccaggggctttgaggagtgatgttcaaactgagaatgttccagactgaggcagaaagttcaaaggcagggactagaaaggagggcagggtggcttgaaacagcgcacacaaagtcagggttatggtgtgtggagcgaggccaggctggagagctgggcaaggctgagctagcccaggccttgacagcagaggtgaagactttcatgttatccccagggtctttgggagcagtttcaagggtctgacgaaagagacgacctggtgtgactcaggtgtggacagtgctgttcccccgaagaggtcacatccagttactttgtgtctcattatcctgggcagacccctaacctctttgtgcctcagtttccttgtgttgtgttggcagaaagcatggactctgaagacaaaccagggtgaaatctgacgttggttgtttctgtgctgggtgacagtagccagttcttttaagctatccctgctataaaatgcagatgcacataggagctacaccagtggtgattttataaagcttaaacaaagacccatacttggaagccaggaggggacctggggcttaggggctgctcagtaagcagcagcatcaccaccaccattgtcaaggctgtgcttaggagctgcatgactgcgaaccagcaaagtcctttttccgagccttgttttccacacctgagggtgagaactcctgtgccccaaggcagtaatgaggattaaatttgcgtgtatttcctccagtctgtagggtcccttgaaggtcagccatgtggtggtctctcttcaaggtctggcaatggtgaggagggcccatggtgcccactgtactgagatagacaggctctgggcactggaagctctggatctgctccccacattgcctgagtcttaagaagctgtagtgagtccctagatctgggagtccagtgccatgtattcttgtcacaagttatcctgatcaggatggtttctcaaagggggcctgatggccggcatggtgactcactcgtaattccagcacttggggagcagaggcaggcggatttctgtgagttccaggacatcctggtgtacaaagtgagttccaggacatccaggactatgtacaaagactctgtctaaacaagcaaacaaacaaataagcaaataggcggggtatgctgtatatatagcacattggcttatctgtagtctttatcacttttgcatgcatgaccacagaggactcattcctgagagcaggaacaccacaggcaacaccacagagtacaaatgtccctaatgtcggtgaccacagagaaagcatcatggtccatgcaaaaaggtggcatggaggtgactggaaaaggaaaggccgagaagaccagccttgctcttttgagtcttagaagagaaaatgggtttactcagcagagagaagtgttccagggccaggcaccttggtgtcatgcgtgttctagcctgctcagcaggctaaggcaagatgaccttggacccaggcaacggtgggcaaatgggcagatttgagactggacacggggaaagttcagataccaatgtgagcggctccgagagcagaccccggagagctgcgtggtgcaggggcactggtgggctgtacagggctctaccttgtttcagggctgggaactgtgctggtgggtagtggatgagccctgggcctcccctcccctccccggcctcatgattcccacctagaaagtctgctggtggatctggcttgtctgtgaggtttcacggtctgtggcttctccttagggccttcaccaggcctttgtcccggaaatccagcgagattgccggcccttcatccttctgagtttgggatcagagttgatacaagtaagaaaagagaagttttatgacatggttgacgaggagacaagagcaaagataataaagatggatgtggactatcccaggtcagtgctgagaacgtacatacatgttttagatccactgaataaggcttcccatcagccaggagggtggggagggggaagggtgagaggagatgggggcgggagagagagtatgcatgtgcatgcgatgtatatgtgtgtgtgtgtgtgtgtgtgtgtgtgtgtgtgtgtgtgtgtgtgtgtgttagaaacagtgctacatgcccccatttttttcattcagacagacaggcagggtgttctcaggggcattcaggttttgcgtgtatgtaaaaaatttagacgtttactttttaaaagcttaaatcaatgcatgagcattagatttcattgtggtattttctcttttttatttttttaatttttaaaaaatttaaattattattattttatttatttatttatttattttgggttttttcgagacagggtttctctatatagccctggctgtcctggaactcactctgtagaccaggctggcctcgaactcagaaatccaactgcctctgcctcccaagtgctgggattaaaggtgtgcgccaccacgcccagccccattgtagtttttacccacaactcacccaaagttaatgactgatagctacatcatttttttctgatagggtcttgctatgtagctcaggctgtcctagaatttattgtgtaggccaggctagcttcagactcctcctcccccgccccttgagtgccgagtttaccagcatgcaccacgagcagctctccattagcctcctcacttttattattttcaatgtattttattattgtgtatatgtttatgtgtgtgctcatgatggagctcttacagaggtcagaggacaactctgtggtgtccattctctctttccaccttctcatgggctctggggaatgaatcctggtaatcaggcttgggtggcaagcacctttacctgttgagccatcattctggccttcttttgcctttttgagacagggtctcattatatagcccagaccactctccaattcactgtagggcccagagctactcacaaattcacagccaccccttgtgcatgtgtgttttagtaaggactgaaattacaggcatgcatcactctccctgttttagccgtgctattataagggtgtaaaacaaaagttaacttcaatccactttatttgattcactatatcaaaattacttcaacacattatccatgtgaaaatagttcccattgctttgtggttgtaagtctgactcacactggccacatttcgggtactttctaacccactgtggctcctggtcatggcagcacagactttagggaccgaattggtagaaaggcaaaggaggtggagaaatgtgaggagcggagccagggtgcagagcggatggttagggtttggaaggagcagtggaaacatcccttcagcacggacggagggcagaggccaggagggnnnnnnnnnnnnnnnnnnnncttctgtgtttgcccttcagcgatgaagacctgtgccagagtttcctgaaggaaaacgactatattgtctttcggaaggatttgctgcggttactggtggagcccctcaataagtcaccattcatcccagtccagaccaagaagaaagagatctacaaccacaagtctttgttcctggatctgtgcagccttgaaaagaaggtgaagcagcactatcccatttttctggcgccccagaaatacctgccccccttgagggttgtccaagccatctcagcaccccggcacaaaatccaagaactcctgcctcaatataagaatgcaggggtccttatttagaacaaataaagtaggttcggattagcttctctgttctctgtgtgacccccatgggagttgcaggcgtaggtggaggagatagagaggcatggtcccccttgacacttgaggacaggaatagggagagatggacgcccaggtggctggggtgggtctattactggggaactagtatgaccattccccatcttcttgatggagctccttcaccccaaacagtagatgctatgtcaggaaccaaggcaggccaactggtaccagcctacacaccgtgtaagaaaatcaagaaacctaatattttagagtattcctactgggattttttttttaaagcatgagaaaccaattgaaaatattttaaagaaaacacatatggagcatgttcggcctgcaagctgtgggtgaggcctctctggttgaatggcaaggttggcatcctaggatggcacaggcccaccagagacaagcaggcagtagagacagttcggaagactccttgggcgccctggtactccttattttggggcacctgctcccagatagcctcaatactaccgccatgattaatcaccatgccacttctccagtcacgagagcacaggagtcctctcacaccctcatggctaaggccacgcacactcatctgcaacctagcaagaaaaggcctgggccctggcctttgagtcaggagccctggggagcctggctctgtccctccctgaggccccttgggtaacatgagtcagtctagacggtagaagtgcttatgctaagaaccattttcttgtgcattcaaaaggagaaacaggattttttttccccctcagaagagagtatagatattatacagaaatagacttaagggttttgacctctccagtaactttagagtcaagagatcagggacactgaagcagggtgaggtagcatatacctgtaatctttgcattggggaagaaggtcaggagggacaggagtgtcctagttttgtcatcaacttgacacagctgggaagagggaccttcaactgaagacctgtcttattgactggccttcagtcgttccttccttccttccttccttccttccttccttccttccttccttccttccttcctttcttttgtttttttgggtttttttttttttttttttggttttttgagacagggtttctctgtatagccctggctgtcctcactctgtagaccaggctggcctcgaactcagaaatcctcctgcctctgcctcccaagtgctgggattaaaggcgtgcgccaccactgcccggtggaacattttcttgattgttggtatgaaggtctagccatggtgtgtattgctgtccctgggcctgtgggcttgggctatataaaaaggctatttgatcgtgctgagcctggaagcagcgtttctctatgatctctgcttcaattcctgccttggttctcgcctttggtgttcctggacgatggctgtaacctcaaagccaaggaagctctatttcctcaagctgttcacagtcatgctgccaaactaagacaaggatttcacggtcactcgctgcacagtgacttggaggacagcctggcttacatgagaccctgtcaatacaaaacatcagcttcctgcagagcaggctgtgacccacagcgaccaggtaccactgtctgggggcctagggaactggggtgccttactaggggtctctttgggttaacagttagtggctcagaagtggagaggctgaagcaagaggctcacaagtctgaggctgcctcattcgtgggatctgagcttttggggcagatactctgaggaagccaagagaaggatgaggaagtctgtgtttttctctagtcaagggctctgtagccaatatacagagccagaggatgcttaagctttgcaggccctatggttcctcttacagagtcagctttacctcagggaggagacgtagaaaatatgtaaacaagagaccatggccggtaaagacgaagtaggtggtaatttggacctgacccacaggccatagtttgctgcttaccacaaacgtacctggggcccttgaaggttcttgaacagatgtaacttggctagagaaaggaggggctcctaagaacggagcatccacagtacagccatcttgctaaatatcagtttgtggaatccagtgacaccccccacacacactccctgctggcttctgccagctcttccccattggactgctgaggtgatacatgtataagaaggtaaagtttttcttcatcaggacatttgggtcctacttcttgggtagtgagagaaaagcttccagaatgttcttccacacattctctgcggcaacaatctgatgagaaatggtagcacacagctaatcaccaaacttaggaggcctcactggacaatatagagaccctggctcaaaaatcaaaatgaggaaaggatagccagggataagggcaggagagaagaggttaaagagaggagagagacatgcagggcatggggtggggtggggtgggggtggggagaagctagacaaggaagggggtaagctagacaaggaagggcatcctggggtaaggttaaggccctgagtgaggagaagccataggtgggcttcagaaactcacagagtggaatacagttctccgagtccccagagcagtcacagggatttagagagaagaaatctgcagaggtaggcgtcctctccacagccagcagggagctcccgtgtggctactcctatgaactcagtgaccaagcatgcatggctgggtcagtgtgagccttctgctctcccgcaccatcctaagatcaaacacaacggaagtgcttgctgcactgcagaggtggttagtaccatttaacaaggagccctatcaaccagggacggcttccctcgataacgggaccagacctcagagctgagcctgacaagcatctgcaataagagccatcagcaaatgatttgcggggcagggggccaagctggtatctcagcacatcctacagtcttctctaatgacctggctgatgtcaacattaaggagcagcctggcaggtggaggtcagagggtcactcacccgttggcagacaaggggagagggtactgcctaaaacattggtggggaagggggtgggccagtcagggtaggacaacttctgagcttctgagctgagggatacagaaaggatcagttcccaagcctctgcctccctacccccagcccttacctgaagcaatgccgatccggggtcagcatcactcaggagagttcgttcagaaggtagatatgattccccatggcacaagtgttagcaaaagaggatggcttcacattgcagaggcctgacagacgcagacccgagcacaggtctgaagttccaggaagcctacagttctgtttctgagaaaagggaaggtgctgggccaggtggaatatcaccgtacctgaagaggctcacaggtctgaggctgccccgagacgctgtctcaaaaataaataaaagacaaactgcaggagaaggttctgggctcaggcatgagtgtgtgtggtaccgtgcagaggtgttctggtcggattcccactataatgaaacatcccaggttgaattagaacaaaaagtcttttattttgttcatggtattcaaagctgaaagtcgcagtagcatgctgtcagccctattgacggtcctctgtggctgctcacatgacagctaacattgtcacagtgggaatctaagagggaggtcacacagtgagacaggccaggccagacttggccttttatgatatttggtcttgaaagaacaaccaggcctcatgaaagctaccctagtgccaagtgtggtagcatacacttttaacccagccctggggaggcagaggcaggtggattgttgtgagttccaggccagccagggctatactgtgagaccgatccaccttaatctcttgagggtagaatctgcccacataatccaagggcctcccacctcttgattattttgggacagggcagcctgggctggaaactcactgtgaaccaaggatgcccttcaattctgctcttcttgccttcacttgagtgctgggactacgggcctgtgccgacatgcttagttgtatgcgatgctagtgacctgacctggggctgtgggctaggcaagcaccctaccgctgagctacacccccattccataggtcccacttggctcttaccattgccacactagggcggggcttctaacacatgagcccatggggactcaggctaaaccagagcacaaggctgacacttgtttttaaattatagcctattaaccaggaggcattattcaatttgttagagagagagagcctgaggcccaggaaggcaaaagctttgtctcaccccgcttgcctgttgcgtggctgatccaggcagcctgtgtgcgtgcctttccacatgctgcccactcctggttagtcacttcggagtgtgtgcactgctacgccactgttactcatctctccccagcgagccacctgttttgtggagagaaattctgtgtacccaagcctcgagactgcacgagacagaacacactcgccctccgccatgatctcccatatgtaagtaggcacacccagccaaaaatagagccccctggcagtcaaagcttccactgtttggaggaaatgggaaaacccactggagaaacaaacagagggagtgttgccagtgtttattataggaagagtcttaagagcccgcttggagttggaagcaaacacatttggtaccgctctagtcctcattgtgaggggaggggtaatctcaccttccggtcctgggaacctgggggcacctgtgaggcggggagctttgggacagcccaggtcactttgccctggtgcaccttgttgccacgtctttaacaaggaacttagttgcaggcctgtcactgggactataggatgatcacagtttctagtggccaaggagtgggaacaaagctggaagagtgaggtattcataggtgctacagagttgtgaccattgggaatcaacatgggagaaggagagagctgggggcagcgagaggagacagcactatgggacctttcctttctagggctcattactctcccctgtcaaggcggacccctgtctcatgtcctactttgtattctgttgctaggaggaaaccctctgctcaaaaccaagttgaaaagggttcattttagcttcctggccatcgtcaagggaagccagggccagagctgggggtaagaagtaaagcaggggctgtggaggaacactgcttactggattgctcagcttgcttttgtatataactgggagcaggagtgacaccgcccacagtgggcagggcctcctacatcaatcaagaacaccccacagaattgctacaggacgactgagggaggcaattcttcagatgaagcgtccttttctcaggcgactctactttgtgtcaagttgacagctgaggctaaccatgacattttcttggccccacttatgttcttacctacccccttccccccacacaaatcaagatgagagcagcctgagaatgaagtggcctgagggctagagactagaattgtttcttgatttaactgtttcccattgtcttgtgttatgtaatccaatctccttttcttggggattaatacattccttgacctatttttaagttacatagaaaaagacaccatattttgagaaaatagaactaaatgggtgactgaaaagatggctcagtggctaacacaattacggctaacagtccctagaactgactgcactaagaggccatggctgcctctctccagttgcagcctgggaaggcagacactgctaatccccatatgggggagctctgggtttgattgagaaattcccgcctcagtgagctaagaggacaatggaacatgattccagtatcagccttgggcctctgcatgccctgcacagcctgtacatgccatgcagagatacatgcatgcagacacatgcatgcagcacatcttgcacgcatacttcatacatacatatatttacaacagagagaatgacgggaaaagagaaaataacaactggcaaacctgggtgcgaggtgttcaggagttctttgaaccagctcaaaggttattttaaattataaatggaggccgggcgtggtggtgcatgcctttaatcccagcactcaggaggcagaggcagttggatttctgagttcgaggccagcctggtctacaaagtgagttccaggacagtcagggctatatagagaaaccctgtctcgaaaaaccaaaaaaaaaaaaaaaaaaaaaaccaaaaaaattataaatggaaaccacataaaactcatagtcttaactgtatgtatttaaaataaggtcttaccgtgtagttcagtgacctctgactcaaggtcctcctgcctcagcctcccttgtactaggatcacaggcatgggtcactacacccagtgtcaacttaactattttaagtgtacactggcagtaagtacactcaatcacttcaaaaacaaaacaaaagcaaaaacaataaaaaacaaaaacaaatagacaaaaacaaaataaaacccaaacaccaaaacactctaatggtgactacacaccattatataattgtccagtcccacaggctgggatgtacagtacaatggccactcctaacataaggcatggactctggtgtggataatttatcctctataaaactgtcccatctggtgagggatgctgatggtagggtatggtggtttgagtgaaaatggcccccacaggctcatagagagtggcactattgggagatgtgggcttgttggagaaagcatgtcattgggaggtaggctttgggtccattggcactctctcttcctgctcctactccagcacaatatctgcctgtgtgccaccatgggttcccatcatgcctatagtggactatagctctgaaacaacaagccagccccagttaaacattttcctttttaagacttgccgtggccatggtgtctctccgtcttcacagcaatgaaacccttactaagaagttggtaccaggagtggggtatcgctgggatagacctgactctacttttgtttggaggaatgtggactttgggattttggattagaaaagtaatcaaatgctttaagcaggccttaatgggtcacactagtaggaacatagaagacagtggtgcggaggttgatttgaactgtgtaggactggctcaagaggttttagaggagaataattttagtatgtggcctagactattcttcttttggcaaagaatgtgtctgctttctgcccttgtctcctccccaaaaatctgcctgaagttaaattgaagagttattaacagcttcagtagagatttcaaaacagcctagtcttgactgtgttgtatggttattagtagtagatctaaaatgaaaaggagcaagataagcaaggaaaaatacaaaatgtacagtttgtagataaaagtgaaagtgctaagtgggataaagggagtggtgacctcagagccagaccccacccaacatatgacaaggaattaaagaaaagcttagggctgagtcctgtggtttggacctttaatctcagcactccagaggcagaggtaggcagtttgaggccagtctggtctgcagagtgagtttcaggagagccaactatagacagggaaggaaaccattaaaaacaaaaaactgacccgggtgtggtggcgcacggctttaatcccagcacttgggaggcagaggcaggcgaatttctgagttcgaggtcagcctggtctacagagtgagttccaggacagccagggctgcagagaaaccctgtcttgaaaaaaacaaaaatcaaaaaacaaaaaaacaagcaaaaaacccaaacaaacaaaaaagctggtgcagaacttattatatatataaattgaacaagggagctaagggagctatgtcaggccccagcaagcagcagaacttggcagctttggccctgtggttctggctttagagtcaaggatagaagaaaggggttccggaatccccctccatgactaaggaaaaactctgaggtcaggagtgtgttgggggtgcctgtgcatggaagcctagtgaggccattgtgtagagcctcagaggtgaagcctggattgtatgggagacccaaagaggtgggagatgccagaatcgtgggacacctgctgaggaaagctgctaacagggagtgacaccagcccaagggagaagcgtgctgcagtcagccaagctgaaaggaatcagagatctgaagagccttttgacatcagacatggagatgcagagcttggagtttgtctcgctggctttttgtcttgctttgatccagtatttcctcactgtcctgccttccctccattttggaatagtaatgtatagcctgtgccattatatgttggaagtatgtactttttgattttgattttatatagggcgttacagtcaagagattgtgtcagtctcagaagaaacttggggtttttaaatggtgttaagactgatagactatggggaatcttgaagttagactgaatgctttttgcactatgatatggctacaggtctatctgggctagggaggagaatgtggtggtttgaaagaaatggccctgcaggctcaaagggagtggcactattgggaggtgtgtctttgttggaggaggggtttcagaagcccagaccaagctgagtggcctgctttcctccttgctggctgtagatctagttgtagaactctgagctccttcagcacctttgtctacctgtatgctcccacgatgatgataatggactaaacttttgagacagtaagccagccccaattaaatactttacaagagttgccatggccacagtatgctgttcacagcaataaaaccatagctaagatatgggggaagccagatacaggcaagggcaaggagagcatggcaaatctctataccttccactcagttttgctgtgaactaaaactgtttttgtttttttacttttttaagcatttggtaactgtggcctcaatatctaaataaataagtcagacctgtagttataatataaaaatgttgctaggcggaggtggtatcacacacctttaatcccagcacttgggaggcagaggcaggtggatttctgagttcaaggccagcctggtctacagagtgagtttcaggacagccagggctacacagagaaaccctgtcttgaaaaaacaaaacctaaaaaatctatagacaaaaatagatttttgtgtgtgtgtgtggcaagacttgttctgaggcctagagagcctagaggttaagagcccttgatgcttctctggagggccaggtttggtccccacacccacatcaggtggctcacacatttacaaccccagctccagggattctgatgctgtctcctggcttctacaggcacctacacacacatgaactgcacacatgtggactgcacacacatgggctggacacacgtggtgcacatagatccatttccttgtcacagctttggttactcctgtataacatctctcagtcttgttttgacgtctatgtccccaatacttttggagattacagggcagttactttgaggtatgtcctttgacttgggtttatatggtattcttctgtgattagatttagtgtctccatttggcaggtaggaaacccaagagtggcattttgtgttgtccctgctccccccaccttgtgccaccacaccatgttcctgctggctgctgaacttaggcttatgtgtgttagataagcattctgccactgagcgacatcctgagttcccttacttttcattttgagacaaggttagctaggctaggctcaaacttaaaaacctcctacctctgcctcctgggcagctgggattggaggcaccatttggttgcta

SEQ ID NO: 658 - DNA, 2128 bp, Mus musculus
gggcaccccagcgggacgcggactcaggacaggctgcgggcaagcccagcttacctcgacccgcgaagctcctcggtggccggaaatgaaccgatccgcgaatccggaagccgcctcctctaccagtcacgtgaagtttgatctggggaagtccgtagacatcagctctactgacactaaggatggcggcactgcaaggtccccattggagccggcggacaagtcggacacgacagagtcgaaatctgagtcgggatcggattccagatcagaggaagacaaggagagtccggcctcgattaaggagataaaggcggagacaccccaaccgaaggaccgccctggcgtgcagattaagctctcatggtcacagaagataaagagctggacagcaaaaaagaaaagaaaactgtaccagctcgtcatagacatcatcatgatgaaccgagtgtgtaagatgttccgtcaaggcctcaggggatttcgggaatatcagatcattgagcctgttcacaagaagcatcctgacttctccttctgggataaaaagaagcaaggccgtatctcgtttgttaccgaggactttgctgcacaggagggtcacttccctccgagggccatttctatcacacagaagaagccatcctggaggacccaccaggagatccaagacctctgcaatattcttcaggctctagattgctaccgcagctacacagagtctctacagctgctcctggccaaggtcatacgctttgaaaggttcggtcgccggcgcgtcatcgtcaagaaggggcagatgggcaatagcttttatttcatctacctgggcacagtggccataactgaggacgaggatgggagcagtgctttcctggaccctcacccaacactgctgcacaggggtggctccttcggggaaatgggccttctaagcaccacagtaaggagtgccacggtggtctgcatggaggagacagagttcctggtggtcgacagagaggatttcgttgcaaataagctgggtgacgaagttcagaaggaaactcagtatcggtacaacttttttaggaacttggacatattccagtcttggtctgaagagaagctctggaagctggtggccttggggaggatagagaggttctcatacggacagatggtgtctaaagactttatgaattcggcattcatcacatttatctgccagggcaactgtgaaatcctgcgattggtagccctgggcgactgcagtgcctattacaagtgggtctggcagcaactggagctgctggatcacaaacctctgagaattcatgacaatgaaatatctccaaaggagagatttaaggaactccagatcaaatcctatcctctgcaggatttcacgtatttgaaacttctgcgtctccagaaagccagagagcaacagggaatagacttccacggcaagatcaacaaagtagaaaacactctccccaagttgctgggcccaaagatcaaatccaggttcggtcatctagtcaaatgttccatggtcaacaccaagtttggtgaactccccaaggaggccatagtgggggtctacatgaagatccacaagacagaggaaggagagattgtgggccttcaccaggcctttgtcccggaaatccagcgagattgccggcccttcatccttctgagtttgggatcagagttgatacaagtaagaaaagagaagttttatgacatggttgacgaggagacaagagcaaagataataaagatggatgtggactatcccagcgatgaagacctgtgccagagtttcctgaaggaaaacgactatattgtctttcggaaggatttgctgcggttactggtggagcccctcaataagtcaccattcatcccagtccagaccaagaagaaagagatctacaaccacaagtctttgttcctggatctgtgcagccttgaaaagaaggtgaagcagcactatcccatttttctggcgccccagaaatacctgccccccttgagggttgtccaagccatctcagcaccccggcacaaaatccaagaactcctgcctcaatataagaatgcaggggtccttatttagaacaaataaagtaggttcgga

SEQ ID NO: 659 - protein, 697 aa, Mus musculus
GTPAGRGLRTGCGQAQLTSTREAPRWPEMNRSANPEAASSTSHVKFDLGKSVDISSTDTKDGGTARSPLEPADKSDTTESKSESGSDSRSEEDKESPASIKEIKAETPQPKDRPGVQIKLSWSQKIKSWTAKKKRKLYQLVIDIIMMNRVCKMFRQGLRGFREYQIIEPVHKKHPDFSFWDKKKQGRISFVTEDFAAQEGHFPPRAISITQKKPSWRTHQEIQDLCNILQALDCYRSYTESLQLLLAKVIRFERFGRRRVIVKKGQMGNSFYFIYLGTVAITEDEDGSSAFLDPHPTLLHRGGSFGEMGLLSTTVRSATVVCMEETEFLVVDREDFVANKLGDEVQKETQYRYNFFRNLDIFQSWSEEKLWKLVGRIERFSYGQMVSKDFMNSAFITFICQGNCEILRLVGDCSAYYKWVWQQLELLDHKPLRIHDNEISPKERFKELQIKSYPLQDFTYLKLLRLQKAREQQGIDFHGKINKVENTLPKLLGPKIKSRFGHLVKCSMVNTKFGELPKEAIVGVYMKIHKTEEGEIVGLHQAFVPEIQRDCRPFILLSLGSELIQVRKEKFYDMVDEETRAKIIKMDVDYPSDEDLCQSFLKENDYIVFRKDLLRLLVEPLNKSPFIPVQTKKKEIYNHKSLFLDLCSLEKKVKQHYPIFLAPQKYLPPLRVVQAISAPRHKIQELLPQYKNAGVLI

SEQ ID NO: 660 - DNA, 81796 bp, Homo sapiens
tattcacattttcccagttttacatacatgcatttgtgtgtgtgtgtgtgtgtgtaggtctatgcaattttatcgtgtgtggattaatgcaactactaccacaatatctagaactgtctgatcaccacagagatccctcgtgctatctctttataattgcatccattcatcttcccttcccctatccctaaccacaggcaaccactaatctattctccatgtctataactgtgttatttaaaaaatgttacatacctggaatcatatagtgtataatcatttgggcttggctctttccacttggcacaattccctggagattcacccaagtggttgcttgtatcaatagtttgtcctttttattgctgagtagtaatctatggtatagatgtaccatggtatatttaaccatccattgaaggacatttgggttgtctccacctttgagctgttacaaatagaactgctatgagttattttatgacatggctttgggtaatcacttatctttctgagcctggaaatagtaactaccacacaggatggttctgaatagtcgaggaggagaaatatatataagggaactggtgcagggtttggcacagaatatatacttcgtcatttttttaaaaccgatggttatgaagagataatacttccttgaatatgtaagttctagtatgtagtatttttaaaagtcacaggcattgatattattattagtgtattagtctgttctcatgctgctaataaagacatacccaagactgggtaatttataaaggaaagacgtttaatgaactcacagctccacgtggctagggaggcctcacaatcgtggtggaagacaaggaggagcaagtcacatcttacatggatggcagcaggcagacagaatgagaaagtgaaaggggtttccccttataaaaccatcagatctcgtgagacttattcactaccatgagaacagtatgggggaactacccccatgattgaattatcttccactgagtccttcccacaacacgtgggaattatgagagctacaattcaagatgagatttgggtgcggatacagccaaaccatatcattattgaacatctgtgtatgtgtgatactttatttacagatgagaaattaaggtctagagagattaattaacttgcccaggttcagccaatccatggcaagattgggattcaaacccacgtttaacatagacagtaggaaccatggaaggacttaaagcaggggaaggatgtgatcagatttgtgttttaggagactcagtctggatgcactgtaaagaatattgctttattgctgaacacttagattatttctgatttttcattaaaataatgtgataatcatatattgcttaaagcttgttctgattttgaattataagcatctattactatcaaatctatttggtctctgagtttgaaaaggaagcattctgatagcaagagcttggatggtaagggataccagtacttccttaagctgtaatcccaaaagaggactgactgaaatattttgctacatattgccacctttctttctatagacatgtgtttgattcatagaaccttaggacaacccctttacttcacagatgggcaaactaaagttcagaaagtagaagtactagccagggtagaatccagggcccagcaatgaatgagaattttagttgctctacatcctcatcagcacttagtatttcatttgacagagtctgtcatccaagctcagtgtcattagttattcagaaaattcagtgcagtgttgcagtcctagatcactgcagcgtcaaactcctgggttcaaactattctgcctcagctttgtgagtagctgggaccacaggcgcgtaccgccatgccccactaattgtttttttgtttgtttgtttgttttatagagacagggtctcgctatgttgcccaggctggcctcaaactgctgggcccaaacaatcctcctgccttagccacccaaagtgctgggattacaggcgtgagccaccgtgcctgcccctacctctcactttctctgtctctatactgccatactcctcttctcttcccttctcttcccttctcttcccttctcttcccttctcttcccttctcttcccttctcttcccttctcttcccttctcttccattctcttcccttctcttcccttctcttcccttcccttcccttcccttctcttcccttctcttcccctctcttcccttctcttcctttcctctcctctcctctcctctcccctcccctcccctttttctttcatcttgctctgtcgccacccccctcctcccgctttttctttcctctcgctctgtcacccagctggagtgtggtggcatgatcttggctcactgcaacctctgcctcccaggttcaagctattctcttgcctcagcctctcgagtagctgggattacagacgcctgccaccacacccggttaattttttgtatttttagtagagacagattttcaccatgttagccaggcttgtctccaacctctgacctcaggtgacccacctgcctcagcctcccaaagtgctgggatgacaggcgtgagccaccacgcccggcctcttggctctttttaaatcattcattcccaactccttcatttgctttttgcagtcctatcttctgttctcagcaaggctagctttctttttgatgtttctggaatgaccttctcttctgagatggttatttttaaaatcccttctttcctgagctctgccagtgtcgtctcctctggctgtctcagtgtcttttctttgaactattacatctttgctttgatctcttgttttaaaattcattaagccctttgacttctttgttgttcatgattatcatctgtttcatgttagcttttttatttttctttttttggtgattgtctttcatctgccatttgtttttcctgttccctgcctccctctcctgcttttttcagtaatatatttgtataagtcttgtgttatttcttttttactataactcccctttagatgaagtgagttcttctggacaagctgcttgtgggattgtgtgtggagaaaggactagagtagaattccaggctggcaggaattctcttggcttcatagtgaagcttcttctgacagggttttttgtgagtatgtgaattggtttagccctctcctcttccgatcagttggagcttggcagctgtagggctataaaaatggaacatctgtgtgtttccctggtcaccccactcccctacttctccttggtcccagtgggaccagagaggctcccagagccagcctgtccatcaccatcccaatgttctactgaaggtgttgtgagttgtgccctcaaggtgtagcccgcttctttggagaagtacgagttttgccagctctccctaaggcctgcagccatagcgttctctattggcattaaccttctggatcttctcagcacccctcattgccgcacaggctgatgtgatagcttgctactctcagcaccgtcaccctctggccactggagtgcttaacccagaaaggctgggaagttaatgcctccaggagcagctctcaagtggacaattctgaggcatgctccctgcagtctttttttttttttttttttgagacagagtcttgctctgtcgcccaggctggagtgcagtggcacgatctcggctcactgcaagctccatctcctgggttcacgccattctcctgcctcagcctcccgagtagctgggactacaggcgcccaccaccacgcccagctaattttttttgtatttttgatagagatggggtttcaccgtgttatccagggtggtctcaatctcctgaccttgtgatccgcctgtcttggactcccaaagtgctgggattacaggcgtgagccaccgcgcccggccccctgcagtcttactaaggtccccaggacattggagccccactgggccataggggtgacatgttcatgcacctctgtcaaaaaacaaaaatttatagaagatcctgtgattattctccttagctatgttaacataatgaattatgtttatataattaaccatctttgcactcccagaatgatatgttatttttacaggtactgctgaattctatttgcttatattttaagattttaagaacaatatttataaatgagatgaatctgtagctttctttttttgtgcaacctctattaggttttagtgtcagtgttctcagttcattacaataatttggtagttttccttctttttaggctctggaacggttgaagaaacattgaggttgtttggagttgcctgtgaaacctttaggaccagctgcttttttctttttaggtggtggtagtggtgagagacctcttttacagcttctctacttctatgacaattaatctatttaggctgggcgtggtggctcacatctctaatcccagcactttaagaggctgaagtgggaggactgcttgagcccaggagttcaagaccagcctgggcaacgtagtgagaccagatctctacaaattaaaaaattagtcagtcatggtggtgcacacctgtggtcccaactacttggaggctgaggtgagaggatcacctgagtctgggaaggtagaggctgcagtgagctgtgatcatgccactgcactctggcctagggcatagagtgagaccttgtctccaaattaaaaaaaaaaaaaaggaaataaaatcagaaaattagtctacttaaatggtttcggccggtcacggtggcggatcacttgaggtcaggagttcgagaccagcctggccaacatggtgaaaccctgtctttactaaaaatacaaaaattagccaggcacgatggtgggtgcctgtaatcccagctactcaggaggctgacgcaggagaatcgcttgaacccaggaggcagaggttgcagtaagccagggtcgtgccactgcactccagcctgggcaaaagagagactctgtctcaaaaataaataaataaataaataaatagtttctattggggtcactttggtaaattattttttcctaaaagattattcataaaaatctagtatttaagtgttaaaagactcattcaaattcctaaaaataacctctgttgaaacatgtcagtaggctagctatgggcggtgaactgccattttgcaaccactaaatagagaatttttgacctgaaagaggccctatggatccatactgggggttgcaaacaggtaacatgcctggcagatgacttaattgtgtgaggtgaagactttggtgaattacagagccaatacctcaactaaagacaagcaagttaattttgagcaatatttaaaccaaaacactatgcaggtcaaataaaacagtctgcaagttcacttggcacatcacgtgccatagctagtttatggcctctgccagcccagcctccttcctcataaccacacctcctgagcatctcacgttttagctatgtctcatgctccctgaacagaccctgctctttcttcatatatctttttttctttttttttttgagatggagttttgctcttgttgcccaggctggagtgcagtggtgtgatctcggctcaccacaacttccgcctcctgggttcaagcgattctcctgtctcggcctccctaatagctgggattacaggcccgcgccaccatgcccggctaattttgtatttttagtagagatggggtttctccatgttggtcaggttggtctcaaactcccaaccacagagtctatctctgtcacccaggctggaatgcagtggctcaatcttggctcactgcagcctctgcctcctgggttcaagtgattcacctgcctcagcctcccgagtagctgggactacaggcgcctgccaccacgcccggctattttttttttttgtatttttagtagagatggggtttcaccatgttagccaggatggtctcgatctcctgacctcgtgatccacccacctcagcctcccaaagtgctgggattataggcgtgagccactgcacccaaccacctcttcatatatcttttttttttaagagacggagtctcactctgttgccaggctggagtgcagtgccatgatctcgactcactgcaacctctgcctcccaggttcaaacaattctcctgcctcagcctcccaagtagctgggactacaggttcccgctataaagcccagctaatttttgtatttttagtagagacagggtttcatcatgttggccaggatgatctcaatctcttgacctcgtgatctgtccaccttggtctcccaaagtgctgggattacatacgtgagccaccatgcccggcctcatatatctttcatagctttattatagcaagactttctctgaggattttacttccccaccatattgtgaactcctggtaagcagggaccacatcttattcaccttcatatgctttgtaagcatttgttgtatagcttttataatcagcaaaacaataagaatcttctctctccctctctctctttttttttttttttttgagacggagtctcattctgtcacctaggcttgagtggtgcaatcttggctcactgcaacctgcgcctcccaggctcagatgatgctcccgcctcagcctcccgagtagctgggattacaggtgcatgccaccacactgggctagtttttgtatttttagtagatactgggtttcaccatgttggacgagctggccttgagctcctgacctcaggtgatccacccgcatcagcctcccaaagtgttgggattgcaggcatgagccaccgcgcttggccgaatcttctcataaattgtttgtggaattgaatcgaactccattttatacattatgaaaatgaggccccaagtagttaagtgacttacctaagatcacataggaataggaccagtgctctttttggcattctaccctgtaatagttacagttataaaatcaggaactgtaagagaaatgaaactttcttagtttctagaactgacttaaatgtgtgactctgaatccccagcccacctccttgcagataattgaatttaggatgtcttcaggtaaattgagatccaatccagtaattttgagtggatataatttcaggcttattgattcatcttgggcccattcatagctctccaaacttcctgcttcttcttccccaaagctgatctaattcctagagaaattgtacaaccacagctggcaagaggtgaggttggcagtaaacatttttggggtctcatcaggtcgtactggcatcatctgatgccccttgtgagcctggatactttccttgtcactcttggatcctcaggcagttcagaggactgacgggacacccttcctgcctatagccatctcctaccatctctcttgctttctccaggcccagttgtttctttcagaagccccctacacttttgaaggggatcctcttatatttccttccttaagactaggtttgcagtgggggaggcaaaaactccatacctcatctctctgtctctctttctaaaactttctcttctttctctctctgaattctttacatcttttctcatggtatgggggaaaaaccagttttgtcccttctcacctctgtgtgtgattactgtcccaccccaagagtggcctttgtctttcttctcagctgtccagccatctttgctgaactcagtgtccttctgtctacctatcagttggaggagagttaacagatataccccacgggataggaatggcagagcaggtgatgcttgaaatcacagttttctactgaggatcctggtgcaagagcaaattgagatactcaattgtcatctttaatagaaaaaagcactttagagcctatatttttctatatctttagaaggactccagagatttgagttctagtcaccaagttccattcaatatttgacacttgatttgggtgaggtcttctgttttgctgagttttttttttattgtcctgatttaaccagacttatgggacagtactatgcacccacgttccagggcctccaagttctaagtctcagagtggtccctgggctaaggtgctggatgaacctactcccagcctagaagcctcccgctgtaacaaagtacacccatttttctatgagatagagaatgagttatctttttaaatcatctttttcttctttctcttttgtgtttttcttctgttccccacttcctacttagctgattagaaatgcagttataaccttttgctttcccttcaccagacactcctagagcaagtgtatctgtgtgcttacttaaaagctccagagtagaaacctctcccaccagattgccttgagagacaatagtcaatttacaaccaaaagtatgcctgccaggaaactctgccccacctggagagtatctcgagacaaggccactttacaacctagttctgcccaagatggtggcagctcgaccaggcggtagataaggcaccaaagtgagtcatggagactcccacctgctcattccctcctctgcatgccatttatgccaattccccctcccgcttttttttttttttttttttttttttttgagacagagtcttgctctgtcgttcaggctggagtgcagtggcacaatcttggctgactgcaacctctgcctcccgggttcaagtgatcctcccacctcagcctcccgagtagctgggattataggtgcccaccacctcacccggctaatttttttgtatttttagtagggatggggtttcaccacattggccaggctggaccagaccttgcttctgttaattggatgctacaaatggagagcaagtgtacctgacatttagctacactgctttcttaaaaaaaaaaaaaaaaaaaaggccctggccaggagtggtggtttatgcctgtaatcccggcactttgggaggctgaggtgggtggatcacttgaggtcaggagcttgagaccagcctgggcaacgtggtgaaagcctgtctttactaaaaatacaaaaatcagccgggcatggtggcacacgcctgtaatcctagctacttgggcggctgaggcaggagaatcacttgaatttgggaggcagaggttgcagtgagctgagattgggccactgcactccatcctgggaacaaagtgagacagtgtctcaaaaaacaaaaaagccctatctttgcaggacaggtgagcccccaaattgagacttagcttaggagagttcttggctttgcccaaggaaggaattcaagggtgagccagtggtgttagacagcaatcttttattgaatagtgcttctccttgtggggcagggctaactcatgggcaatgaatccggagtcgatacccagtgtatgagatgttggcaactgtatttatgctcatctctaatcccttctcagccttttggctgagatcaagtgtagtatacgcattcctacccactttcaatcacatgcaaattaaggggcaggctaatgcaaattaaggggcaggttaatgcaaattaaggagtgggtttttagagttttctaggaaagaggtagcaacttcctggtcattgccaagacatttgtacactgtcatggcactggtaggagtgtcttatgttaatgagggatggggacagctagggggtcctagatcctgttttggtcagcagggttgtgccattctcctgtctcaccaggactctggcagccatttagctactttgagccccagtctcctatgtatggagttgagtaaaagtttgggtggttgtgaggattagctgagataatgcctgtgagtatcccataaatgttagactcccacattccaatccctgtgtcccctgcctccagaatctttcattgtgaccttaggagattctgagaatgatttttctcagagcagggcttccagtagctgatggtatggtaggaggagtggagtggagctcttgccttgttactgaggaaatctatttgtttctagtattactggatttttggggaaaaatttgtagtcctccccttgaaaggcaaaggggctagttgtgccatttgcctgcacaggaaccatgaggagacatatggtaacttatgcctggcagctcctgaagaaggaactggtgaggaggggcaagggccctgggagggaagagcagaagactgaacagacaggtgttttgaggaaggtcgatgcaggtgtaggaggggtcttggatgaatggtggccatcctgtaccttttggagtcacagcatggcacaaaggagggacccctgccctgtagcctaccagccccccacactgggcaagccataagccacactcagagccactgagtcctgttctgtacccactcttcctgctattatgagatccagagagaacgagggaggatagagtcagggtagcaacattgagtcataggttaagcttgtgaactctggagccagactacctaggtttaaatccctatcacctattagtcatgtgaccccaggcaagttgcttggtttgctgtgcctttattttctcctctgtaaagtgagatgataatactagtacctactgcataaatttactgattaaatgatttacatatcagaatagtgctttggataatgcctgacaatagtaaattgtactcagtaagtattaattttattcataaagtacctttccccatatttccatagatatctaatttttaagaaatagaacattacaggtgtagggaaagctctttaccatcccatgcccctttatttctctttaatagtaaccactttcctgaagttggtgtcacccttcctgtttatatttttatatattatcacatgtgtatgtatccataaacaatatatagtatgtggcacactgtttaaaaatgataccataaatagcatcatagttcttttttcccactcaaaatcatttcagctttatccacattgacacacacagacttagtgctgtgttcaatcctgtgactgaaccataatgtattgatcccttcgatccctactaatgaacatttgttttcagccattcactgttacacacaatgttgccatgattaccctcatggctatccccttgtacatgtatgtttctctgaagaggacatataaagtacatacaattcttccattgtgaagtacacacatcctcaactttatataatgttgccaaattgctcttcaacatggttgtaccatgtttcccagttcccagtgataagtgcaaaatagtatcatgttattactttaatttccatttccattatttctagcaatgttaaaaatggtttcacaatttggctggggcatgaaggctcatgcctgtaatcccagcactttgggaggctgaggtggaaggatcacttgaagccagagttggaaaccagcctgggcaacaaagtgaaaccccctctttacaaacaatgtaaatataaatacaaatgaataaaaacaatattttcacaatttataggtaatttgaactttccctttgaattacctttgctcattttgctattgggttatttgtatttttcttttgatttgtaggattacaaaaaataaattttggatcgtaatcctttgttgattatatgcatagtaagtatatttttccagtctgtagttcgttgtctcactttgtttatgatacactttaaaaagaacattctcttttttcctttgtttgtttttatttatttttttgagacagagtctcactctgttgcccaggctggagtgcagtggcgcaatttcagctcactgcaacctccacctcccaggttcaagtgctcctggtgcctcagcctcctgagtagctgggattacaggcgcccaccaccacgcccggctaatttttgttttttttagtgcagatgggatttcaccatgttggccagactagtctcaaactcctggtctcaagtgatcagcccaccttggcctcccaaagtgctaggattgcaggcatgagccattgtgccagagctgtttgtttgtttgtttgtttcattttgttgttgttgttacagggtcttgctctgttacccaggttggagtgcagtggcacgatcatagctcattgcaaccttgaactcctgggctcaagcaatccttctgcctcggcctcccgagtagctgggactacaggcgagtgccactgtgcctagctaacgatgtacttttcaatagaagttagtaaacagagacttttatttagtttttgcatttttttctttttctttttttttttttttgagacggagtctcgctctgtcgcccaggctggagtgcagtggcgggatctcggctcactgcaagctccgcctcccgggttcacgccattctcctgcctcagcctcccaagtagctgggactacaggcgcccgccactacgcccggctaattttttgtatttttagtagagacggggtttcaccgtgttagccgggatggtctcgatctcctgacctcgtgatccgcccgcctcggcctcccaaagtgctgggtttacaggcatgagccaccgggcccagcctggctttatgtatttgtatatgtgtttgctgaattgtttgaaagtaagctgcatactttatgacatatctttcttaaaaataatgacattacccacataaccaaataccactatcatactaagaaaatcggcactgatttcctaatattatctaatgtacagtcatattcaatttccttatttgtccctagagtgcctttgctctgtcacccaggctgtagtgcagaggcgcgatctcagctcactgcaacctctgcctcccaggttcaagtgattctcctgcctcagcctcccgagtagctgggactacaggcaagcaccaccatgccaggctaatttttgtatttttaggagagaaggagtttcactgtgttggtcaggctggtctcaaactcctgacctcaggtgattcacccgccttggcctcccaaagtgctgggattacaggcgtgagccaccgcacctggcctagggtgccttttatagcttgttatcatgaaccaggatccaatcaagaagcataccattggtatgtctcttgaatctttattaatctagagcagcccccatgccttgtttttttcatcatgaaattgactttttgaagaaactaggttcattgatttatagattcttctacatcctggatttttccctatcttctgtattcacttgttctcagtctaattccaaattcctggggaaaaggtagggtggcccatcttggattaggtgttatataagttttctatggctgccataacaaattaccacaatttgatggcttaaaacaaagcaaatttattatattacagtactgtaggcaagaagtctgacatggatgttcttgttctaaaatcaaggtgtgagcattcctttctcaaggctcacggccttttctgcttctaaaggccacccacattccttggcttgtgggcccttccttcatcttgacagccagcagtgttgcattcctcttaccattattccctcagatctatctgattctaaaatccaggctctgtacatcatacctatactgcctgcaattagtcgtgccacttattttgtggatggaattgaaggatttgacatttagctggtttgctggtgcataacaactagcttctggggagagatgtcctgactagtagctgccaatttctatggcataagtactcctaccatggccagttttaagttaccaacttaatttcagcaggcttgcaaaattcctgaaaatgtaaccatcactccagcacactacagcacactactgcatttaatcctggtaaatttcaccttgttcagcaccatccagcctgctgttgactgttgagaacagatggtttctattgatcttgtttgctttgtttccatagggactgtaccagctcgccatggatatcatcataatgatccgagtgtgtaaaatgttccgccaaggcctcaggggattccgggaatatcaaatcattgagactgctcactggaagcaccctatcttctccttctgggatgtaagcagttgggctcagcaggattatgagggctcaaagaagcccaataaattgcatcccacttcctggcctaagctcagaactgagaaagaagacaaaaggaaaagcagatgagagacccaatggtcacttttattaatggccatacttctgttggagagggtgacttacatcatcaaccaagaggtttacctaatactgaaccccagatttagacagccttacatgcctagccacaggcaacgctggaccaaggcaggctccactgcaacagcaggcctgctgccaaaactcatggcagggaaaggtggagcaaaatatgggctgagagggaaggagacaatcatgcctagtttttctctttccaaattcatcaaagagtttaagtcactcctcaatgtaaaaggagagaggccagtagtgttctactaatacacctccctccatgtggaaagaaaccttgggagtagagaggtggtctccatttcaatggtgatcaaaagagccagaagcaatccaggaatcacaataaccagggttttctaaatgcccacacgctctctctattcgcgtctctactttctttcctacacccctacttcggtgcaggggcattttcagggctttgttcactgcggtgaccatgtttcttttatttttttgagacggagtcttgctctgttgcccaggctggagtgcagtggcgcgtcttggctcactgcaagctccacctcccgggttcacaccattctcctgcctcagcctccctagtagctgggactacaggcacccgccaccacacccagctaattttttgtatttttagtagagacggggtttcaccttgttagccaggatggtcttgatctcttgacctcgtgatccacctgcctcggcctcccaaagtgctgggattacaggcgtgagccaccgtgcctggcctggtgaccaggtttctagatttcctagaaggtcccaatttaaaatattttatcccagtggtagatcatgtgcccttctttagctcagaaaagttggtcacccttctgctaacttgttctagttccccagaggtatcttcattgctactgggtgtgttgctcagggcttcaaagtttccccagcaatcacctggacaaatcctgcccatttttctgttgtttcaggaatgactagagccagtccccactcctctgcatctagtgattcactccaagaaatttccctaaagggcttctgacagatagtggccaaagaaagggggatacggggctggtgatgggggaaggaaaggcagccttaaactggtttctgaggggccagcaggtaatataactagtgtgtatgtagctgagtttaagatacagcaggccagctggagaggaaagatacacctcatctaaagacattcagatacaaatattatattttaagaccctgtgctggccaaaccaaacaaggctgcagccctgtggttgggctgagatgaaaaacgaatggagtagaagaactgtaaccaaaagactcaggttagctctcaggaaggacctcctgactctcagggtggcatgtaatggtgatgcaatgggccctggagatcagagggctttggttaccagaagacgtggcctgatgcatggggcagttggaagctaagatgcagagtcacttgttgtcaggggaatgtgaggctaagcctaaccacattggccagccagagtggcttgagcagagcagaagcctctcaagggcagcctataagggtcatagggttgtcaggcggagcactgggcggctggagtgcaggatcaggtggggagccctagactgcttcagtagatgtgtgaatctggatgtttctgagcactgcctctttccttcagtagtctccctgagaagcaccacatggctatgcaaaggataaacacgttgtgggggcgagacgggtctgagtctaaggaacaaatgacatgtggcttgaggccacactccagacacggaattgggtttgctgaaagccttgagttggggtctcagctagaccactgacttgctgtgtgatccttgggcaagttccttcaccatctcagtcctacatggagcttaataaaacctgctttgtcctgatgactaaatggagtaaggcagggaggatacactgtgcttggctcattaaagacatttaacaaaggttggcttcatttgttcctttcttttttttattttttttatttttttttattttttttttttgagacggagtctcgctctgtcgcccaggctggagtgcagtggcgcgatctcggctcactgcaagctccgcctcccgggttcacgccattctcctgcctcagcctcccgagtagctgggactacaggcgcccgataccacgcccggctaattttttgtatttttagtagagacggggtttcaccttgttagccaggatggtctcgatctcctgacctcgtgatccgcccgccttggcctcccaaagtgctgggattacaggcgtgagccaccgcgcccagcctgttcctttctttttattcttccttttcttcctcctctatgcttgtttgtttgctgcttttcccccttccttttctctctcctttcctgtttcctccttatcctcctttccttctccccacccccatatttctctgccttcacaataatatgctgtaaatgctggacccaagcctagtgctgagttggggccttcgagcagaggcaggcctgaaagggccggctgctatgaggtttcccatggcttcctgcccaccatggtggtccaggtagacaggagggctctagatgcaaagttctaggggcagtcttgctgattctccctcttctccctgccctctttctttcagaaaaagatgcaaagccgagtcacatttgataccatggacttcattgcagaggaggtatgcatagctcgaaacttgctgtgggggaattttctttctgcaccctggcttggaagaaaccctggctgggtatcagcagagctggtttcagtctaggctctgccaccaactcagcttgtcaccctgggttggccacttcgtttcctcatcaataaaatagctgatctcagtgattccttccagccctggagctccaagactgtgagcatgtaggaaccagctgtcactgcacagttgagcagaaccaatgggagagagttcctgggcttggacccgtgggaaaacagcaggaaaagataaagcagaggatgtgagagtcccagagagaggaagaattcaggtggtgggaaagggctgacctgtgtgaattctggttctaccctgaattctctgagagatgctgggcacacctctcacacctgggtgtcagatacccttaaagagtcttattcaggtgcagcgcagctgttgacactcggaaggctgaggtgggaggatcacttgaggccaggagttcaagactgcagtgagctatggtcgtatcactgcattccagtctgggtgatagagcgaggccccctctctaaaaaagagtcctctcattttgatgagagaatgcttttatatccatgggagctttggactgtgtgacttgttccctgaatttcaatctcatcattgttatcttcttggcttctctccatgatatcctggatattaaatattaaaatccaatttaaaatttaaaagagtctacctatttatagggaacatctgaaattctcaccaatgcagacctgacttgatcctggcttggagtagccacgttgttgtttttttcctcagtggaaggggaaagaaaagaactttataatgggtatcagggccacctgtgcccatctcctgccccacccctttctcttcttggagcccaggtatggcttctgttgcttgcctctcctgggcacagccttatttttcgtgccccctcgtgtatgaagcatactcagttaagtcattcaagctctgtgactcttcagctcttcaggctggctagtgtgtgacactgagcactgaagcttaatcaggctctttccttcaggcaggagaaactaggggcctatctgagagccacagaactctagatatgagggcaattctgtgcaccgcagtagagggcgggaagagggcacaaagggaaaattctttgttatgggcaaggcctataggtggtcctcaaatgaatcatgcctgactctggttccaacacagggaagagtagagagccaatttatcctcccgtctcagccttctgagtagctggcattacaggtgtgcgctgctgagcccagctggaggctcattttaaaaaccagccctttggccagatgtgctagctcacgcttgtaatctcagcactttgggaggccgaggcaggaagattacctgagctcaggagttttagaccagtctgagcaacatgtgagaccctgtctctactaaaaattaaaaaataaaaataattagctaggcacggtggctcacacctgtgatcccagaattttgggaggctgaggtgcgaggattgctggagcctgggaaatcgaggtcgcagtgagctatgactgtgccactgcactgcagtctgggtgacagagtgagaccctgtccccctgcccccaacccatcccaaaaaagcaagcccagccctctgagtgatgctaatgagtatagggtttctttggggtgatgaaaagcttccaaaacagtgtggtgattgttgtacaactctgtgaatacactaaaaaacactgaattgtacactttaaatggtgatttccagggcatgtgaattatatctaagtaaaaatgacatataatatatagtacacacacatgtatagttatataacctgcccctcagcacagcatttggattctgatggacaactaagcctcagtatagtccatattgggcttctaataacgctaaacttctcacagacaacccttagtattagagaggcttagaatcatagactcaattattgcagcaactgtcagacagtggaaacaatggatacatttacaaaacattgtttagaaaaacactgagtgaagaaaagcaaattgtgcaagtgatgtctacagtcttgacatttatgtaaattttttatttttagtttttgagacagagtcttgctgtgtcatccaggctgaagtgcagtgatgcaatcacagctcactgcaacctcaacctccttgggctcaagcggtcctcccattttagtgccccccagtagctaggactgcaagtgtgtgccactacgcctggctaattttttttttttttttttgagacggagtcgagctctgtctcccaggctggtgtgtagtggagcgatctgggctcactacaagctctgcctcccgggttcacgccattctcttgcctcagcctcctgagtagctggaactaaaggcgcctgccaccacgccctgctaattttttgtatttttagtagagacggggtttcaccgtgttagccagggtagtcttgatctcctgacctcgtgatccgtccgccttggcctcccaaagtgctgggattataggcaagagccaccgtgcccggcccaatgcccagctaattcttaaattttttgtagagatgagggtcttgccatattgcccaggctggtttcgaactcctgggctcaagtgatcctcctgccttggcctcccaaagcactgggattacaggcatgagccactatgcccagcagtaaattttaaaatacaaaatagtcttatatattctgtgggtacatatatatgcatacataaaagtggtaaactcagatggtggggagcagatctggattggggtggtgtatacatataagaggattttaactatctgtgttgttctgatttctaatggaaaatatgtgttatttctaaaaattttacttacacctaagaaaaatagaggaagttattatgccagatgttaatggctaattttgggtagtgggattatggtcagtcattctttcttgatccttcatgtcctctggaggaacacagtaggggtgtggctggcctgcagtgagtgaagggaaaatggtgagaaatggtgtttgagaagcagacgggccaagtctcctatgccctatttgaagtgtattcccttttccccatcccagacattttttgagctcctaaggtaggcctagatctgtgtgtggttgtgaggaatattaggctgtgtaacatccccagcctgccattgaggagctaactaggagttatgatgagacttaactagtaagttacccactttcatgataattacattaatccattcactaaggcagagcccttgtaacctaattacctcttaaaggtctcagttttacaaatttttttgtagaaacaaggtcttgctatgttgcctaggctggtctcaaactcctggcctcaagtgatccccctgccttggcctcccaaagtgttgggattataggcatgagccactgtgcccagcgtccacttcttaatagtgtcagaatggcaattatattttgacacaagttttggaggggacgttcaccctatagcaagagcctactggggaaggggctactctttcagctaagacgacccagtggggactcactgagggtgtggcagcatctgagctgagaccagaatgatgagtcagccatgtccacgagaaaacccaggggacaaatattccaggcagaaaaaaacagcccaggcagagacctcaagacagagccgagcttagcacatgccagggacaggtagaaagttccagagtagagaacaaaggggagaggtaggagatgaggctggagagaagccattgagggtgttcacaactcacagtgtcacttcttcagcaggtgggagtggtaggtgaacgtgctggtccatgaggcctggttcactggagaagaaaagctttagctaatagtctctggaaggttcactttgcttgttagtctcctgtagcacactgagctctaggctgagacagaggcaaaggtctcccctgactgctatgtgtatgtgctgagcagactctgcaggaccactggagcccagggaagcctgtattgcctgggaaggtcaatgaacaacacaggtcggggggatgtcagcgttgatatgtgtcagatctcctaatcctgcctgagtttcttcatctgtcaaatggaataacagttcttgggctggcaggatgcagtgagatgggcgtgtaaaatgtttatcccagtgcctgacacacagtaagcactcatcacgtcagccactgtggtacagggaacgggagagtgtacaagcaggactgtggggtgttgcccgctggcccatgggtgaaattgctgggtcccctgtatcactctggtcctctctccccagggtcactttcctccaaaggccattcagatcatgcagaagaagccttcctggagaacagaggatgagatccaggccgtctgtaacatcttgcaggttctggatagctatcggaactacgcagagcccctgcagctgctcctggccaaagtcatgcgctttgaacggtcagtgaggggcacagcccttggccaccaggctgaggctggactgagcaaaagagcctggctgagaaggtgtggcaggtcctgcccacccctctgcataatgtcagccatgaatgaagtcttctgtccattcacttcagctcccactgctatggtcgcagcaccctttatctcgctcacttattgagactcttaattaaagggccattaaatctggagaggatctagtagaaacctcagagaggatctggtccaattccctcatttttcagatgaggaaactgaggctctgtgggggaaaatggctcctcctaggtcacccagacaaaaagaaacagcgctgaagctcttttcagttacgcccatcagagcttgggatgaattctttctgaaacagcttggctttgcttgaattaccactgaggtcagtgatgctctgattgagagttgagaaagggtagtttcccaaaggagaatcagggtgtgattggtggaaaaatatgaccagatgcttgacagcaaaagcgacagatgtctgcttttggagattcgggttctagctctgacttgattgtggcttgccgtgactttcagcaagctgtgggttccttgggtccccctttccccttcccaaaaatgttggttgagcttgatggtctctgagggtctttctggctctagctctagtcatctttacttcagtgaacagtgcctgtgctccctcatcttcaaaatctcatttcctagctgaatattcctgctatctcccagctagtcattatcacctgggccatctcctctttctttattctttttattattattattttttgagatgggtctcgtcctgtcaaccaggctggagtgcagtggtgtgatcacagctcactgaagcctctacctcctaggttcatatgagccttccacctcggcctcctttgtagctgggacaaggggtaggcatcaccattcctggctaattttactttttattttttgtagagacatagtctcactatgttgctcagggtggtcttgaactcctgagctcaagtgattcttccacctcagcctcccaaaatgctgggattacagacgtgtaccaccgtgcctggcttgcctctttcctacattgataaagattccaggctgatactggtttgtagctcatgaagcccacagccacaatggaggctgggcagtactgactccagcctggtgtggtcctctgtctgtcctctgatcccttccctcaggagtttgccacagaatcacaaggccagtgagtactctctaagaggtcagaagaggagatgctgctgggggctgggtcagggaaggcttcctggaggaagtaggatctgagttcctgaaaggatctgaatagtggagaagacagggaaggccattgcaggcaggggagcaacatggacaaactgatggaacaaagtgggtatcatctgccctgagcagggtgttggttcccctgctgctggtcaagccagcgagtcaggaaggagcagaaggtggcagtgtggagggggaggaggaagaggaggaactgctgagggcagggccatgagctcagagctggggacaatggccctgctatcggggcacttccacaatggctgctcatcagtcctggcagagactaaagggcagacttttttttacccattgtctcctgggtaaaatccaaacttagctgagctttggaggccctttatggtgggaccagtcgaatttctctcccaccactcccctgacttgccttctcccattttcctttcccgtgaagtgcacattacctatgaagtacacgttatcccttgaatgtgccgtgctttgggccacctctgcacctttggtcatggtggtccctgtgcctgggaccctcttccatctctttgtccacctggatgactcacttcaagcaccatgctagagccttgtctgaccttcctaagcttggataaaggccccttctctgtgctcctcaagtagcctgcactgacatctcttaaagcatttttaaaccttatttacatcctgtatgtgaccataattttgaaaacaaagtctgtgttgttcattgtgcccaatttttttttttttgagacagagtcacccaggccagagtgcagtggtatgatcatggctcaccatagccctaaactcccaggctcaggtgatcttcccacctcagccttacaggcagctgggactacaggtgtgcacccccacatttggctaatctttgcattttttgtagagatgaggtttcaccttgttgcccacccaggagttcaagaccagcctgggcaacataacaagactccgactctccaaataatagaacaattagctggatgtggcaacttcaggtctcagctcaaatatcccttccttattgatagtaatagtaagaatagctaacatgggactgggcacagtggcttactcctgtaatcccagcactttgcaaggccaaggtgggaggatccttgagcccaggagttcaagaccagcctaggcaacatagtgagaccctgtccctatctcaaactcctaggctcaaatgatcctcccaccttggcctcccaaagtgctgggattaacaggcgtgtgccaccacacctggcctcacggtacctaacagacaccactgatatttatttaacttattgaatgaatgaaggaaaagaataaatatcgaaagaattgagatttggacttgcatacgaaatacagaaacttccctctgagtttaagaactccttgttcgctctgggcctgggcacctctaccccaagggtgcccagttgggtagtgggctgctggtaattatgataagaccattatctgtgtctcattctaggcatactcatctgcattttacagacaagagaaaccaaggatcagagaggggatatccattgctcagtgtcacacagctaagagcagaaccaggatttggatcctgggctaacgctaaagccagtcctcctaatcatttagtgactctactaacccattcattgctttcagcatgtgttcactcatttattccactatgttcaatgaacattcactgtgcccaagcacacgcagcagtgacccagactggcaaagactctgctctcaggaagcttcagttcaaccgaggcaggcaacgggataggtgttagtgaaaggctccagcttgactggcagggctgggctgtcctgagggcccttctggtccaagtctgtgctcttatatcccaaagcaaagagcacaaccagtccagagctcctctcagcttggacctgcccccatgtcactacccaatcaactagcagtggtcttttcccaggtttggtcgcaggcgtgtgatcatcaagaaggggcagaagggcaacagcttttatttcatctacctgggcacagttgcaataaccaaggacgaggatggcagcagtgccttcctagatccccacccgaaattgctgcacaagggtagctgttttggggtaagcccaggggaaggacccagtttcctggggtggagtgggtggaggtgacaggacttctgctagaacctctcagccaggcccagtcctgcctagtactctgtacaagtcagtgtcccgtgtgggccccttacctgtcaaatgctaattgagttggactaagatcagcctcttcatctgtgatgtttaagaagtatgttcctgatacagccctttagagatgaagtgactccatagtgaggcctctccagcttcctcccctctggcctgttcaggtctgttgcctctttttccataagcagcagattaagaagaaggggagtgggccccagtgggagaatgtgcaggagaatagaggaggctagggaacacacagtctggtgaggagagaattcagggggaagatggaggcacggaagatgtgtgtaaggctgaggacaggaagtggaggtggcctcacacttgcccttgccctgtccacccaacaggaaatggacgttctgcatgcttcagtgaggaggtccaccatcgtctgtatggaagaaacggagttcctggttgttgaccgggaggacttctttgctaataagctggaccaggaagttcagaaggatgctcagtatcggtttgaattttttaggtaactctgccttcattcaacatttttttccccttgtgtgtttattagctgcctgactttgtctgtcctaggcctggtgggaaacatactggttgctgttctctctgtctgggatgctctgaagtcccacctcgtacccaccttctctctctgcagactcctactatcccttcgggtctcagctcaaatatcccttctttattgaaagtaatagtaagaatagctaacacgggactgggcacagtggctcactcctgtaatcccagcactttaggaggccaaggtgggaggatccctgaacccaggagttcaagaccagcctggacaacatagtgaaatcctgtccctacaaaataaaaaattaaaaaaaattagctgggtgtggtggcacatacctatagtttcagctacttgggaggctgaggtgggaggatcacttgggcccaggagttcgaggctgtggtgagttgtgatcgcatcactgcactccagcctgggcaacagagtgtggtcctagtagctaggactgtaggtgtgctgccacatccagctaattgttctattatttgtagagatggaatcttgttatgttgcccaggctggtcttgaactcctggtctcaagtgatcctgccactttggcctcctaaagtgctgggattacagacatgagcccccatgctcagcccaaactataaaactataattccttttttttttttttttgagagagggtcttgctctgttgcccaggctggagtgcagtggcatgatctcatctcactgcaacctccgcctcctgggttcaagcaattctcctgcctcagcctcccacatagctggaattacagtcatacaccatcactcccagctaacttttttgtatttttagtagagatggggtttcactatgttggccagggtggtgttgaactcctggcctcaagtgatctgactaccttggcctcccaaagtgctgggattacaggcgtaagccactgcgcctggcccaaactataattcttgattgcatggtaatttctttacagtttatataccccctcagacagtaagcagtatggtgacagagaccagatagatctgtctttgtcactactataatccttatgttgtcacactgccagacacatgcaggtgctcaacaaataaatattgagtaaggtgaataacaggatataaataattacaatcacatgtgagtcagaaagtaagcaccgtaactgggtatcatatttaaaagcagaactcatacatagcaaaagatttttggtttttgaatacttatgtgcatgaaaggccacgtaaggatatgcaagtgaaatctcatttaattgctcttcagttatttgcctttatgtaaaaggaataaaaatccaatgaagtatctgcactggccctgaaaatttgggctgtagggctgcacagctacagagaagtgtgatggccgaggggtctggttcctgtggctggggctgagagaggtagcttcatcccctggaaaagtggggatttagtcctaaagggaggagctgttttttttttccatactgtggaaaaataggtctggctccaatctcagctcttaggttaccagcgatgtgaccctagataggtcacgccatttctctgtgttttagcctcctgctctgtaaaatggggataaggatacccttctcccaaggtcatggtgaggatggaatggaatgatcatgggaagtgtatggcccagtgcttggtgcgtggtaggtacttcttctatggtggccctacttttcttctggtgtcttcagaccttcgtccctgacatggcactgagcgtgttcacctctggtgccctgaccttaactcagtgcgcgcattgaggcctgagtcaccttgagttaacctgattcaatgaactcagtccacctgagtcagttaagttctgagcccttaacctgttggaggtgagaaaatctgagatgattgttggcagcacttggagcagcatatgaaggcaggcaagcctgtgaacgtggtgttcaaggtcaggggaaggggcagtcacagtggggtgggttcacccacagggagcaacaggcagaaagagtggagtccagacatgtcccactctccagacccagagctgaggatttgaagccaacaggccagggggacacaagggttggatgagctgcccaaagcaaaggtagggccagaaccgctaagttgggggacagagcagctgtgagctggagtggggactagcttcatgagccacggtggggagggatggcagggctggaggaggagaagattcttggaaggaggagcagaggtgagaaaagcacagaggctggatcacccaggggcatctgagcagcagtaaagaggggagcttggctggaggggagggccttgggaaaaggaggagggagccaaggtgatagcaggtaggagaatggctacaggcaaggccaggtaattgggcaggtagcagcgaaatcttccacccaggcatcctccacaggagaagagtatgtgccctctgcagattgctaaggtctgggcaccttgtgtgatggagttgatgaattctaacaggctcttcccacaggaagatggagctgtttgcatcatggtctgatgagaagctctggcagctggtagccatggcgaagatagagaggttctcgtatgggcagctgatctcaaaagattttggagagtcacccttcatcatgtttatcagcaaggtgaaaagtctgggggttgggatgagggtgaacctctgaggagcatgcctaagatcatgtcctgtgacctgatggtcagagtttgagcccttttctgcaacctgtgcaattcacttccttctcagagtttccatgtcccagctgtaagaggcctgcctctcacagagcatggctagagacattagatatatggctattgtgttagaaagaggaccaagggattctcccgccttgagctcctaagcatgcttatttacatatagatgcatatttaaattatgcatttggctgttgaatcttagtgatgccagatcacttttaaatttatttatttatttatttatttattttgagacaagagtctcgctgttgtcagcccaggctggagtgcaatggcacaatcttggctcactgcaacctctgcctcctgggtttcagcaattcttctgcctcaccctcctgagtagctgagattacaggtgcctgccaccatgcccggctaatttttgtacttttagtagagacggggtttcaccatgttggacaggctggtgtcgatctcctgacctcaggtgatctgcctgcctcggcctcccaaagtgctgggattacaggcatgagccaccaggcccagcctatttatttttgagacagagtcttgctcactctgtgccccaaactggagtgcagtgacgagatcttggctcactgcaacctctgcctcctgggttcaagtgattctcctgcctcagcctccagagtagctaggactataggtatgtgccaccatgcctggctaatttttttttgtatttttagtagagatggggtttcgtcatactggccaggctggtttcaaactcatggcctcaagtgatctgcctgcctcagcctcccaaagtgctgggattacagatgttagccaccacacccaaccttaaattatctttaaattgtaaaagtgatatgaccacattaggaaactttctggaaaaagggaagaaatcatccataaacccatcatctcagagtagagtttcaaaatggaatttcttggtatcatgattttgttttgtaaggcagactttattcaaaggggccatagccataggtatagggaccactgcaatggagtcttgcagccagagacagagattggactcaactctcagtatcgtaatttttatggctcctgcaacaaattgcattccaaaaggagagccccaccttatctagtgtccaggatgtacatttttgttggtgccatcacagctctgccagccttgcatgtcattttttcaaaagttttctagtttaataggtcgcaattgctgccatactgaggatttgatattttttctgattactagtgagatttatcatgtttgtttatgacctacattttatcttttgcaaattgcttcacgtcctttgccaccttctctgttggttgataatgaaaagaaaatctcccatttctcaagtgcttactgtatgccaggttctatgtttcacatgcttcatctcattttagtctctatagcccggaggaggttagtattgtcattattcccattttacagaggaggaaactgaggcacagtaaggtgaagtggttatccaaggtcacacagctgatgaagtgcagaggcagggttcaacccaagtctctctgactgcaaagatattttcaagaacttggatttaggatttgggctgacctttctgtctggttcttacagattaagccaccacaggcatttgttgagtttttgccaaggtcatgacacattggtccaggctctggagggatacaaagatgaaaaagactggttttctctctttatagatctcctccaccagattccacacatagacaaagaaaagtgtcaatgccaagtaccaagtgattggtgcaaactctgcaagttacaagatttcaggagagggaactctctaaaggctggaggctttaagaagggcttcctggaggaggtgaggtgggagatgagccctgacatattgaaccattaggcaaaaggaggaagcaagattggttgtgtgctggcactggcttgtacctgcctatgagagctgattgttaaattttcaggaattttggtaaacatagtaattattacaaattagatgctataaacctacaattaaataagttatatggaaaattaggagctgggcatggtggctgatgcccatagtcttaacgactcaggagactcatgcaggaagatcatttgagcccaggagtttgaaagcagcctgggcaacatagcaagaccctatctctaagaaagaaagacagatgagagagggagagagagagagagagagagagaagaggggaggggaggggagggggaagaaaggaaggaaagaagaaaggaaggaaggagcaagcaagagagagaaggaaagaaagaaaacaagggtaatacatactgaaaactcatcatttcctactgatgttactgcatttttactagtttttctcttcaggttacgtctattgtgtctctatggtagaaatactatgcaattgtgagcatctcttccccactccacattcagtgacctcatgttggtagcttacaattagccatggttggataatttatacaatggaatcagcaaacaccctaagtcaggtcttggtttagggctttgctgattgtcttaggaaagtgataaaagaaaatgcttataatgcagattaaatttaaaagtggcttgggtctatagctgctacactgcaaagagaatgaaatcgtctaacaatatttaaaagctattattgctccgggcgccgtggctcacacctgtaatcctagcactttggaaggctgagatggatggatcacttgaggtcaggagttcgagactagcctggccaacatggtgaaacctcatgtctactaaaaatataaaaattagctggacatggtggcgcatgcctaatcccagctacttggaggctgaggcaggagaattgcttgaacctaggaggtggaggttgcagtgagccaatatctcaccactgcactccagcctgggcaacagaatgagactccatctcaaaaaaataaaataaataaaaacaaataaaagctattatctggctgggtacagtggctcacgcctgtaatctcaacactttgggaggccgaggcgggtggatcacttgaggccaggggtttgagaccagcctggccaacatggtaaaaccccatctctactaaaaatacaaaaactagccaggcgtggtggtgtgcacctatagtcccagctactcaggaggctgaggcaggagaatcacttaaacctgggaggtgaaggttgcagtgagctgagatcatgccactgctctccagcctgggtgacagagtctcaaaaaaaattaatttaaaaaaaaagctattatctcattcatcatagaagttataccattgaacaaatgaagttctgatgtacatagtgctaaagctaaaaaacatttcagtttaatataatttatgtgagggtgagaaatagaacagtatatcacaagtcagatttaataacattgaatttattgggaagagaatggattgggatgcaacttcatttgtccaatcatgtttgagttgcaactataaactggccatggatacaagattcagccaaaacccacaaaagaattctgtgagagctgattggctgtatggaatttcctgtatggtatattttattatttataaattgtgtgtaacacattctgtataacaggtttatatgcaggcatatgttttttaggagagctggttgttaaacttaccagcaccaccaggggcgtggtgtgtgtgttgttattctcggctcagtcccagagaacagaatcaagtctagttaatataagtagcaaaagatttattgccagatatcaattggcagttccttctcctccttgatatttgcttcctctgtgctaaaattttgaggtgatcacctctgccatatctctccaaatttaactctaagctctttgatactatatagccagaaaagatggggggatgtgtggtgagggatagaaatcctttacaatattttctttaatcagcataatgattacattctgactggcagaaagcggggggtggttcttcatctgttttgcctccattgcttcacctgtgaaatggtaccaatcaccccataaagtctggtaaggatgagaatcagtttagtacatgcttactcagtgagcattcctcccgcaatccagtgcttctcaaagtgcggtggctggaccagcagcaccagcagcacttgggaactcatttcttcttcttttattttttttttttgagatggagtttcattcctgtcgcccaggctggagtgcaatggcacgatcttggctcactgcaacctccacctcctgggttcaagtgattctcctgcctcagcctcctgagtagctgggattacaggtgcccgccaccaggcctggctaatttttgtatttttagtagagatgggatttcaccatgttggccaggctggtctcaaactcctgacctcaggtgttccaccctcctcggcctcccaaagtgctgggattacaggcatgaaccaccgcgcctggcggggaactcatttcaaaatgcaaattctcaggcccacccaagagctactcaatccaaaactctaggaggaagggctcagtgatctgtgttttaacaaggcttccaggcgattccaatgcacactgatgtaggagaacccctgacctaagggaggaattttcaaattttggtaagcatccagacatgtagggtgcttcctgagggaggaattctcaaactttggtaagcatacaaacacatagggtgctttttaaaaaggcagatttgctgtctcaccccagagattgattcattaactctggaatctgcatttgagcaagtgctgtaggggattctaatgcaggggtgctgagccttcattctgagaaaaataatgcggaagtcactaaaggacagcaaggtagggagctcttggccagaagatgaatctggtttgttccttacagtgttttattaaaatctgatttaatcatcaatgtgaagattttatataaaaattctgatttctggcttttgagaattcagaggatcaggcaacaacaagccatattttggtacagcaccccctcccccaccccccgaccctggttggaaatgaaaagcaccagccccctctaaaggactgctcttttctctctttttttttcctgcctggccagcgttttttgagtgttcatctctgggagggagatcaagctgtcccgactcctgtagtttactcatattaccactagagggcaaaatcagctgcgggtggctggacacccctgggacctcagaaagctagagaagatttcctgatggcatcgaaaacttaatgcacactttcaactcatttctaacagtttatcactgggggacacatagtggaactgttctctccatagatgcaattaaagacctactaaatacttgaggaaaccgggctcatgttgtttctctggcacctgcagttcccctatagctcaaaaaaaagaaaaaaaaaagtatgcagtaaagatttcaaatctaaactttacagcttcataaatttttatatatgtatacacctgagtgatcattacccaaatcaagataaaaaacatttccactactccagaaggctctcctgtgctccttcctagacaaaatccccccacaaagcttaatactcttaagacttatgtcaccacaggttacttttgcatgtttttgaacttcatataaatggaatcatacagtgtgtattccttgtttctgacttcttttgctcaactgaatatttgttatttttaattttataaattatggtgtgcatagaataatatgtgaccattaaacatgatactatagaaccatattgtttggcatgaaaagaggtatttgatatattattgagtttcttaaaaagttacaagagtctgttttatgtaaatgaattcgttgatgaaaaattgtagatatacatcttatatgttcatagagaaaagtttgaaataatattcactaatatgttactactagttatttctgagtgtcaggattaatgtagtttttatctctatgtttttatgtctggtttgaatatttttaaactttcaattttggaataattttaaatttataaaaaaattataagaacagtacaaagaactcctgtagctggaactacaggcatgcaccaccatgcccagctaattcagctaatctttttttttttttttttttttttggagacagaatttcactcttcttgcccaggctggagtgcaatggcatgatcttggctcatggcaacctccgcctcctgggttcaagtgattcgattctcctgcctcagcctcctgagtagctgggattacaggcatgcgccaccatgcccggctaattttgtttttttttgtttgtttgttttgttttgtttgagccagagttttgctcttgttgcccaggctgcagtgcaatgatgcgatcttggctcactgcaacctctgcctcctgggttcaagcgattctcctgcctcagcctcccgaatagctgggattacaggcatgtgccaccacacccggctaattttgtatttttagtagggacggggtttatccatattggtcaggctggtctcgaactcccgacctcaggtgatctgcctgcctcagcctcccaaagtgctaggattacaggcgtgagccacaaggccggcttaatttttgtatttttagtagagacaaaataattttgtgttgccatgttggccaggctggtcttgaactcctgggctcaagtgatcttcccacatcagcctcccaaagtgctgggattacagtccgtgagccaccgtgcctggcttatatttagttcttatgcttcttcagttacttgaacttcgtatggtgagtaaataacattttcatttaaaaaaaaaaaaagaaaaaaaaaaagcaccaggctgggcgtggtggctcacacctgtaatcccagcactttgggaggtcgaggcaggcagattgcttgaggtcaggagttcgagaccagcctggccaacatggtgaaaccccgtctctactaaaaatacaaaaattagccgggcatggtggcacatgtctataatcccagctactcaggaggctgaggcaggagaatcgcttgaactcaggaggcagaggttgcagtgagccgagattgccccattgctctccagcgtgggtgacaaagtgagactccatctcaaaaaaaagaaaaaagaacctgaaaccacttgcattaagcaaataaaacaaaatgggataagatgcaattaagagagattttcttcaaagcctggcctacctggagccttaggggttaacccttttcctatgtcccttgctgtgttcagggcagctgtgaagtcctgcggctgttggaccttggggcctccccttcctaccgtagatggatctggcagcacctggagctgatagatggcagacctctgaagacccacctgagtggtaagctgccttggcctgtctgacagcagggggcgcctgggcctgtcctgtttccagttcccagcacatagagccttagaaatctagtcagccagcctgacagcgtatatcatctgcacccttctaccagcggtggaaacccagtctgcaaggccctgccctcctttccagccttttttttttattgagccttttcccttttgctgtttaggttctcccacgtgaccatcaactccttgcctcacatatcccccaccctttttttcacccagctctcttctgctttttaaaatttatttatttatttgttcattctgtctctggatttgcctgtgatggacttttcatataaatagcatcatacattatttggctttttgcatctgacttccttcactgagcaccatgttttcaaggtctatttatgttgtagcagatatcatttcttcattctgttttatggctgaataatattctaatgtatgcatataccacattttttttgtccacttatcagttggtgaacatttggattgttttcactttttggctgttttgaataatgttgctatgaacatttgtatgcaagtttttgtgtgaacatatttttcagttctcttgggtattacctatatgcctaggagtggaatttctgggtcatatggtatcttagtcagttttctatttctataactgaatatctgagactgggtaacttataaagaaaagaaatttatttcttatagttctggaggctagggaatctgaggtcgaggggctgcatctggtgaaggacttcttgctggtggggactcttcagagtcccggggcagcaaagggcatcacatggagagggagcacttctgtctttgagatcttagactacacattcttccttgaagaagtcttcctggtttctcatgctggaccagatcttccatcctctgctatatgccattctagtacccttcaagtaccattcaagtactcttctgtgttatataaccccactgaaatcatacaactgagtctgaaatgcttattaaacatctgtttcccttgctagaatataagctctatgaaggctttgcattcccagggcttcgtattatgcctggcatctagcaggtgctcagaagtgaattacagagttaatggataaacatattttggctgctgtgtgtggtttggacacatcctaggctgtgaatgtatgcgcactctccacagccttatcccaactcagtaacaagtatgaataacagtgatcatttattgaattctaattgtatgtttattatattgggcttgactgtttatacatattgcataattctcataatagctctctttttgttttttttttttttttggagacagagtctcactctgttgcccaggctggagtgcagtggtgcagtctcagctcactgcaacctctgcctcccaggttcaggcaattctcctgcctcagcatcccgagcagctgggattacgggcacatgccaccatgcccggccaatttttgtttttttagtacagatgggatttcactgtgttggccaggctggtctcgaactcctgaccttaagtgatccgactgcctcggcctcccagagtgttgggattacaggcatgagccaccgcacctggcctaataactctttaagaaggtacgattgtaccatctgacacatgaggaaactggctcatagggcaaataagtagcaatgtaggactgtagagttgggattctaacccaggcacaactggttccaaagcccagactttcttctcttcataaatatctccagccttcttcattctccatttcctgttgttggacatagacgttgtcaagtagcagcctctagaactggccagggtgataaccaggcttgctgattctagggtagtattgtttccattcacagctctgtaatggcatttttatttatttttttccccttccatcctctgcagatctttttgtgtcacccacttgggtcaaggaccccagccctcaacagatatttgcagtggctcagatgtcttatctcttacctcctgctcagtactggcatgcttccccccacttcccttgagattgtaatctgtgtatcctggggcctcctccccaaggattgccttatagatatagcagtcctcctgagattagaactgaggccaacacagggtggcgaggagaagggcggaaaaaggagaggttggagctgaacagagctgggtttgagtcccatttattagctgggtagctttggtgagtactcaaagtctctgggcctggtttcttcatatctaccttgggtagtgtcatggttagcagcataggcttggagtccactgcttctgtttgaatacagggtccttctcttattagtgatgtgatactgggcaagtgggccctatgtctaagtgcaccagtgccctcagagtctgtaaaatgtaaataatggtccgtacctcgtaggattgtaatgacattaagcaaattaatatataaaaactcttagaacactacctggctgcataggcagatggcagatgtttgttatcattaccacaacaggctgctaggaaggcagagtgagatgatgtatgcatgaggccttataagtactcagtaaatgtttcttctcatgtcaattcttgtttgtcacttttccactgtcaatccaccagagaaaaagttgcatcccacaaattttgatatgttgtattttcaatgttattcagttcaaaatacctttaaatttctcttttgatttcttctttgacccatggaatatttagaagagtgtttagtttccaagcatttgggggattatccacctatctttctgttactgatttcttttttctttttctttttttttttttttttttgagagggagtctcgctctgtcacccaggctggagtgcagtggtacaatctcagctcacttcatcctccaccccccaggttcgagcaattctcctgcctcagcctcccgagtagctgggattacaggcatgcaccaccaaacccagctaatttttgtattttagtagagatggggtttcagcatgttggccaggctgggcttgaactcctgacctctggtgatctgcctgcctcggcctcccaaagtgctgggattataggcgtgagccaccacgcctggcctctgttattgaattctaagataacatactttatatgatttgaatcctctgaaatgtattaaaacttgttttatggtccagaatatagtctgtcttggtaaatgtttcatttgcatttgaaaaaaacttgctgttttggggtgcagtgttctatgaatgttaagtaggtgaagttggttgatagtattggtcaagtcatctgtacccttataactttctgtctacttgctctatcaattgttaatagaggctggcgtggtggttcacgcgtgtaatcccagcactttgggaggccaaggcgggcagatcacctgaggtcaggagttcgagaccagcctggccaacatatagtgaaaccctgtctctaccaaaataatacaaaaattagctgggcatggtggcgcatgcctgtagtcccagctacttgggaagctgaggcaggagaattgcttgaacccgggaggcagaggttgcagtaagccaagatcacgccactgcactccagtccgagcgacagagcaagactgtgtctctcaaaaaaaaaaaaaaaaaaaaaaaaaattcttaatagagttgttaaaatctccagccataattatagatatatttttctccttgtatttctgtctgttttgcctcatatattttgaagctcttttattatatgcatagatgtttgggattgaactcttaattattatgaaatgaacttatttgtccctggtaatattctttgctctaaaacctactttttctgatgtaaattcagccacttcttttgatttagtgtagcttcctcttgattagtattagtttggtatatctttttccatccttttgtgtttaacctatttgtgtctttatatgtaaaagtgaatttcttaaaggcagcatataattggatcttgctgaaagacccaatttttattgagatgcctaatcattgacatttaatgttaatattgattatggttggatttgactctaccatcttgctatttttctttctatttgtcacatctattccctttttcttctgtttttccctgccttttggattatgtattttgtataattcaatcttattttctttgttggcttattagctgtttgtggtattattttcacagttgctttatgatcattgtatatacttttaacttatcacagtctacctttaagtgatattataccacttcatgtatagaatcagaatcttacaatgatatatttccattttctcctcctagatattatgctattgtgatatattatactttaatgtatattaaaaaccttaccatacatggttattacttttgctttaaacaagtatcttctttttttttttttttgagacggagttttgctcctgttgcccaggctggagtgcaatggcacgatctcggctcactgcaacctccacctcctgggttcaagtgattcttctgcctcagcctccctagtagctgggattataggtgcctgccaccatgcccagctaattttgtgtatttttagtagagacagggtttcactatgttggccaggctggtcttgaactcctgacctcaggaaatccacctgcctcagcctcccaaagtgctgggattacaggcatcagccaccatacccagcttaaacaagtatcttttttgtatatttaaaaaataataagaaaagactcttatgttaacctacatagttactatttctgatgttctttgttcctttgtatagatccagatttctacctaataaccacttccttctgcctgaagtacttcctttaacatttcttgtatttcagctctgttagtgatgaattatttcagcttttctatgtctgaaaactattttatcttcatttttgaaagaaatttttgctggatataaaattctaagttgacaggttttttctttcactactttaaagatgttgcattaaagtcttttttgacttgcattgttttcagcaaatccgttcatatttttatttattgttttcaacaagaagtccgttaacattttatttatttatttatttatatttttgagacagagtctcactctgttacgcaggctggagtgcaatagtgtaatctcggctcactgcaacctctacctccctggttcaagcgattaccctgcctcagcctcctgaatagccgggactacaggcatatgctaccatacttggctaatttttgtatttgttgttgttgttgttggtttctgagatggagtcttgctcttgtcacccaggctggagtgcaatggcacaacctcggctagctgcaacttccgcctcccagtttcaagtattcttgtgcctcagcctcacgagtagctgggattataggcgtccaccaccacgcctggctaatttttttttttttcatttgtgtatgaaattttttttttttttttttttgatcattcttgggtgtttctcgcagagggggatttggcagggtcataggacaatagtggagggaaggtcagcagataagtgaacaaaggtctctggttttcctaggcagaggaccctgcggccttccgcagtgtttgtgtccctgggtatttgagattagggagtggtgatgactcttaacgagcatgctgccttcaagcatctgtttaacaaagcacatcttgcaccgcccttaatccatttaaccctgagtggacacagcacatgtttcagagagcacagggttgggggtaaggtcacagatcaacaggataagaatttttcttagtacagaacaaaatgaaaagactcccatgtctacctctttctacacagacacggcaaccatccgatttctcaatgttttccccacctttcccccctttctattccacaaaaccgccattgtcatcatggcccgttctcaatgagctgttgggtacacctcccagacggggtggtggccgggcagaggggctcctcacttcccagtaggggcggccgggcagaggcgcccctcacctcctgggcggggcggctggcagggtggggggctgacccccccacctccctcccggacagggcggctggccgggcagaggggctcctcacttcccagtaggggcggccgggcagaggcgcccctcacctcccagacggggcggctggccgggcggggggctgacccccccacctccctcccggacggggcggccggctgggcggagacgctcctcacttcccagacggggtggctgccgggcggaggggctcctcacttctcagacggggcggctgccaggcggaggggctcctcacttctcagatggggcggttgccaggcggagggtctcctcacttctcagacggggcggccgggcagagacgctcctcacctcccagacggggtcgcggccgggtagaggcgctcctcacatcccagacggggtggcggggcagaggcgctccccacatctcagacgatgggcggccgggcagagacgctcctcacttcgtagatgggatggcggccgggaagaggcgctcctcacttcctagatgggatggcggccgggcagagacgctcctcacttcccagactgggcagccaggcagaggggctcctcacgtcccagacgatgggcggccaggcagagacgctcctcacttcccagacggggtggcggccgggcagaggctgcactctcggcactttgggaggccaaggcaggcggctgggtggtggaggttgtagtgagctgagatcacgccactgcactccagcctgggcaccattgagcactgagtgagccggactccgtctgcaatcccggcacctcgggaggccaaggctggcggatcactcgcggttaggagctggagaccagcccggccaacacagcgaaaccccgtctccaccaaaaaaatacgaaaaccagtcaggcgtggcggtgcgcgcctgcaatcgcaggcacttggcaggctgaggcaggagaatcaggcagggaggttgcagtgagccgagatggcagcagtacagtccagcttcggctgggcagcagagggaaaccgtggaaagagggagagggagagggagaccgtggggagagggagacggagaaggagagggagagggagagcctaatttttgtatttttagtagagatggggtttcgccatgttggccaggctggtctcaaacacctgacctcaagtgatccacctgccttggcttcccaaagtgctgggattacaggcataagccactgcacctggccaacatttttatttttgtataaactctttatataaccttgtatattttctgtacacagtgtacctttttgctttggctgattttgaatttttttatcaatagttttaagcaatttgattatgttgtgccttggtataatttttgtcatgtttctgtgcttgaggttcatttagtttctgggattcctgggtttgtatttttaaaatctgatttggaatattttgaccatgattttttcaaaaaaattatttgtctctccctctcctccactttgagaactccaattacatgtatattggattgcttacaatccaatatattattggattgcaacatgtatattggattgctgtgtttcacagctcactgatgttctgttcattttttttattcttttttttttcctctgtgacattttggatagtttctattgctatgtcttcaagttttctaatcctccttctgcattgtctaatctgctgttaatcccacctagtgtacttttcattttagacattttagtttttatatctcaaagtttgatttgggtctttttataatttccacaactctacttaatatacacaatattttttccttggaatataattataatagctcttccaatgcccttatgtactaattccatcatatgtgtcatttctgagtcagtttcaatccattgtttccttttcatatagtttatattttcctacttctttgtatccttcatgattttttaataggatgctagaaaatgtgaattttgagtactgcatattttttattcctgtaaatatttctgaacgttaagatgtagttacttggaagtattttgatcttttcaaggcttgcttttaaatttgttatgtggggtcagaacagtgtttaatctagagctagtttcccattcgtgaagtaaaaccattttgtgtatttcagaatgccccatgacttgagaggttttctattctagttattgggaaaaggactatttctggtcctgtttgagctctgatgatttatccctctaatcatttggggtgattctttccccagccttgggtagtatactatgtaacaaattgccccaaaacttagcaacttaaaataacagacatttacttctcccaatttctgtgagtcagaaatttgggcacagcttagtttggtgcttctgactcaagacctcttatgaaccagctacttgggaggctgaggcaggaggatcatttgagtccaggaattcaagaccagcttggaaaacatagctggactccatctgaaaaaaaaaaaaaaatctcttgaggttgccattgtcagccagggttgtggtctcatctgaaggctcatctgggagggacctgcttccaggctaactcacgtggctattggccaagtgtctggcctcatgggtgtctctacagggcagtttcatgacatgtttccccaagaatgagagagagcaacagagaacatgcccaagatggaagccacagtttttttataacctaatgtcagaaataaaatctcatcacttctgctgtatcctgttagacgtgagcccaacccacacttaatgggagggtattacacaagtgtgtgactagtaggaggtggggttcactggtggccatctcagaggctgcctaccactggtagtttcccaatacacatgtgctgattaatactcagctgagcttcaggggaaactctctgcagatctttggagttctgtctctatgcagctctcttctctctggttccctgctctgtggactctagctgccttgccctcccctgactatgtcttctgtctcatcaattcaaggagattgctgggctccatctgagttccccctccctgcaccatggcccagaaaatctttaggcagcatgctggggcagtagtagggctcacctcatttgttttctgtcttgcatcatggatgattgtcctttattgcctgatattcaatgtctttttttttttttgagacagggtctcactctgtcacctaggctggagtgcagtgacctgttcatagctaattgcagcctggacctcctgggctcaagcagtcctctcgcctctcctgagtagctgggactataggcatgagccaccacacccacctaattttttatctttttgtagagatagagtctcactatgttgctcaggctggtcttgaactcctggcctcaagggatcttcccacctcagcctcccaaagtgctgagattacaggcatgagccaccgcatctatccttcaatgtctttaaaacaattttttccataaatgttgtccaatattttcaagtagaagagaaaatttagtccctgttattccatcttggctggaagcaaaagcagaagtctagatctatgtttttaatagttgagttttattctattatatgcatatatcataattaatttaattaccttttacagatattttgaattctttttcaaatgtttaccctactgtggcagatttcctggtgtgtttgtctttgcatctgtgtgcaaggaaacgtattagacaaattctgagaattactggatcaaatagttcagcggtccccaaactttttggcaccagaggctggtttcgtggaagacaattttttcacagatgggggcaggtggtaacgcttttggaatgaaactgttccacctctgatcatcaggcattagatggagcacacaacctagatgcctctcatgcacagttctcaatagggtttgtgctcctatgagactctaatgccgccactgatctgacaggaggtggagctcaggtgataatgctcatgcacctgccactcatctcctgctgtacagcctcattcctaacaggccacggacctgtaccagtccatggccaggggattggggacccctgaaatagttaatccagtgcatactgactacatacatttaaaacattggtagatgttgttgaagtgcctttccgaaagatcaaactcagggctttttatatgtgttttgttaagccagacctactgcttgtggaacttggatttattcccattaacattaatttgaggggccgggcatggtggctcacacctgtaatcccagcactttgggaggccgaggtagacggatcacgaggtcaggagatcgagatcatcctggctaacacggtgaaacgctgtctctaataaaaatacagaaaaattagccgggcatggtggcgggcgcctgtagtcccagctacttgggaggctgaggcaggagaatggtgtgaacttgggaggtggagcttgcagtgagccgagatcaagccactacactccagcctaggtgacagagcaatactccatctcaaaaacaaaaaaacaaaaacaaaacaaaacaaacaaaagacattaatttgaagagttgattctcatactagagattttttttttctttttttttttgagatagagtcttgccctgtcacccaggctggagtgcagtggcacgatcttggctccctgcaacctctgcctcccaggttcaagcaattctcttgcctcagcctctggagtagctgggattacaggcatgcaccaccatgcccagctaattttttgtatctttagtagagatggggtttcaccatgttggccaggctggtctcgaactcctgacctcttgatctgcccgcctcggcctcccaaagtgctgggattataggcatgagccaccacacccggctggagatctcttttttaatcaatgttcttgacgtataatttttatataatagagtgcacatattttatgtgtatagttaaatgacaaattagaaaaaaaattctttttgagacaaggtttcactttgtcacccagtctggagtgcagtggcatgaacatggctcaatacaaccttgacctcccagactcaagtaatcctaccactttagcctcctgagtagctgggactacagtcacatgccaccacaccctgctaatttttgtatgttttgtagagacgggggtttgccatgttgcccagactggtctcgaactcctgagctcaagcgatcctcctgccttggccttccaaagcgtgggattacagtggcgtgagccactgcgcctggccatagttccatgacaaatttatacctctacaatcaagttatagaacatttccatcaccccacaaagttcccttgtgccgcctcccagtcaatctctacccctcacccttgccctaggcaaccactgatttgttttctatcattataggttagatttgtcttcctatggtttcatataaatgagatcatacaggccaggcatggtggctcatgcctgtaatcctagcactctgggaggccgaggcaggtggctcatgaggtcaggagattgagacaatcctgactaacatggtgaaaccctgtctctactaaaaatacagaaaattagctgggcgtggtggtgggcgcctgtagtcccagctactcaggaggctgagacaggagaatggcatgaacctgggaggtggagcttgcagtgagcagagatcgcaccactgcacttcagcctgggcgacagagtgagaatcctctcaaaaataaataaataaataaataaataaataagatcatacagtatggactcttgtttctggcttcttttacttagcatgctgagtagtttgctcctttttatttctgaattatatttccttcgagtttttttaaatttcattttaagagatgaggtctttctatgttgcccaggctgaagttgagctcctaggctcaagcaatcctcctacctcagcctcctgagtagctaggactcaggtgtgcaccactgcaactggctcttggtgatctttttaaataactctcatggagggcctattatatgtcggtgctgtgctaggcatatcacatactttatctgcaattcttttttttgaggcaaagtcttactgttgcccagactgcacacagtgttgtaaacacagctcactacagcctcaacttcctgggctcatgcaatccttccatctcagtgtccccagttgctagagctacaggtgtgcaccagcatgcctggctaattctttaatttattgtagagatgaggtcttgccatgttgcctaggctggtcttgaactcctgggctcaagtgatcctctactttgatctcccaaagtgctgggattacaaatgtgaactaccatgcacagcctgtaattcttacaatagttctatgagagggctctgatgcttatatgacttgtccaaagttccatgaccagtcatccatttatctcttattgctgactctgccccaatttgaaagcccagtttgaaggccgggataaatatggtctgttaatggaatgaatccaagagacctgagttcaaatccaagctttaacctttttctgggtgacttgagctctctgctgttcatcttatctcttaaagtgtgttaatcacccttctccagatgtaatagatgtaaaggctctagcgcagggcctgccacccagggacattacatggaggccacagtgttttatctttcttttttttttaaaaaatttccccatgtgctagaccatccaggcaggttcctgtgataagcttcaactactaccaccataaccatcatatatgcaaagatccataagtatcttttcctgtgctttctctaacagaatactctcctatggaaagatttaaggaattccagatcaaatcatatcctctgcaagactttagctccttgaaacttccacatctcaaaaaagcctgggggctacaggggacaagcttcagcaggaagatcagaacctcaggagacactctccccaagatgctgggcccgaagatccagtaagctcagccctgggcagatagacgggtccagattgtggttgcaaagggagataatacttatatggcagaatgtcagggatgcggataaggggcaaaggtggaggacacaggtcaatcccaaaggattgtgcatgaggcaacctagagatgtcctgggtctgagagccaggacctgcattctccacctgtaactcacaaggctacgtcaggcattcagccacttcttttctcagggcctcagtaacccatttaaggaagaaggggctggacatatcttctggctctgacattctgtcagtctgtgtgtttctgggcccttttgattctgagctgcttcagaaaattctgtccatctaaggaaggcagttacagcatagtagataagagcctgtgtttggaattaagcctggcttggccacttattttagctcttattttagaggtcaagggacttgacctctctaagctgtatttcttggtagataatagcatctaactcttggggttgttgcaagccagcaattaaatgagataatgataattatagttaacacttacagagtattttttgtagctgggcatagtggcacatacctgtaatcctagctactcaggaggctgacacaggagggtcgcttgagcctaggaagttgaggctgcatgcagtgagctgtgatcatgtcactgtaccccagcctgggcaacagagcaagatcttgtctctctctttttttttttttttgagatggagtcttgcactgttgcccaggctggagtgcagtggcgcgatctctgctcactgtaagctccgcctcccgggttcacgccattttcctgcctcagcctcccgagtagctgggactacaggcacctgccactgtgtctggctaatttttttgtatttttagtagagacgaggtttcaccgtattagccaggatggtctcggtctcctgacctcgtgatccgcccacctcggcctcccaaagtgctgggattacaggcatgagccaccacgcccaaccgaccctatctcttaaaaaaagaagaaaaagaaaaagaaaaaggaaacaggctgggcatggtggcttatgcctgtaatcccaacactttgggcggctgaagcgggcggattgcctgaggtcaggagttcgtgaccagcctggccaacatggtgaaaccccgtctctactaaaaatacaaaaattagctgggtgtggtggcggatgcctgtagttccagctacttgggaggctgaggcacaagaatcgcttgaacccaagaggcggaggttgcagtgagctgagatcacgccactgtacttcagcctgtgcaacagagcgagactgcatctcaaaaacaaaacaaaaccccttttctgtgcccagtactgaattatctaatttaatctctgtaacaactctacgagtactattataatcattcccatttttcaggtgagaaaaccaaggtacggggagagattgagttgtttgttccaggttgcgcaggtagaaagtggcagagccaggattcaaacctgagcagctcagtgttgttatcggtatgattgtcacgactggtatgaggcagatgcacattggggtgctgtgcttttgttttttctggagagactgaagagcagaagaggagactcagtggggaccagcctagaatcagctcattgctgggcccagagcagcacagccccctccccctgctacttttgaaattgaagtgtcataatgagactaacaatggcaccagtgtcacaatccctgcattcctacaagggccacttcacgtgagtcctttgcctgttaacatttccaagctcctggcctccataacgagcaccctgtgacttttgagacgttatggataatccttctgaagaatctaggttgcagtgagccaagattgtgccactgcactccagcctgggcgacaagagcaaaactctgtctcaaaaaaaaaaaaaaaaaagaaaagaaaagaaattccttcctcttggctgggcgcagtggcttacgcctataatcccagcactctgggaggccaaagcgggtggatcacttgaggccaggagtttgagaccagcctgggcaacattgtgaaaccctgtctctgctaaaaattagctgggcatggtggtgggtgcctgtagtccctgctacttgggaggctgaggcatgagtatcacttgaactccagaagtggaggttgcagtgagcagagatcccatcagtgcactcgagcctggcgacagagtgagactccgtctcaaagaaaaaaaagaaaaaaaaaaagaaagaaattccttcctcatgctgagcatgagagggccagcctggacttcccacccattaggcctggcttggctgcatgggatcatcagcccctgcctccaggagaacagccctcaggtgtttaaggggagggcctgtatcaccttcctctcccaagtctcctctttcgcaccctccaattcctgacaatgggagtcagggcttgattttgagttttctcgccttctgggaagttgtgaattccccagggaggggagccctccatgtgcagaagagtgagggctgattagccagggcctcaggagcagactgtgttacagatgagctctctaacaagctgtcacatttcagatccaggcctgctcagtcgatcaaatgtgccatgatcaatatcaagcctggtgagctccccaaggaggctgcagtgggggcctacgtgaaggtgcacactgtggagcagggagaaattttggtgagtgtgccaagagctctgttcaccatggagtacgtaacatgaatgggctggaatgttaagtaatgacagtaaaggtttaaaaacacttccctccatatttgatattaaggaattatgttgatttgtaaagatgtgataagaataggccgggcgcggtggctcacacctgtaatcccagcactatgagaggccgaggtgggcagatcacaaggtcaggagtttgagaccagcctgaccaacatggtgaaaccctgtctctactaaaaatacaaaaattagctgggcatggtggtgtacgcctgtaatcccagctgaatccaggaacaaggcaaagatgttccctcttaccactcctattcaacattgtattgaaagtcctagctagtccattcaagaaaaggaaataaaaggtatacagattgggaagtaagaaataaaactatctttgtttgcagataacattattgtctatgtagataattccaaacaatttttttaaaaagaaaaacctcctgaaactaatgagattatagcaaggtcacaggatacaaaattaatatagagagtccattgctttccttataccagcaatgaacaattgaaatttgacatttaaaaacacaataccagctgggcacagtagccccagcactttgggaggctgaagcgggcgaatcacttgaggtcaggagttcgagaccagtctggccaacatggtgaaattccatctctgctaaaaatacaaaaattagctggggccaggcatggtggctcacgcctgtaatcccagcactttgggagcctgaggcaggttggatcacttgaggtcaggagttcaagaccagactggccaacatggtgaaaccccatctctactaataatacaaaaattagccaggcatggtggcacacacctgtaatcccagctactcgggaggctgaggcaagagaatcacttgaacctgggaggcggaggttgcagtgagctgagatagtgacgttgcactaaagcctgggggacaagagtgaaactccgtctccaaaaaaaaaaaccaaaacccaaaccaaaaagccaggtatggtggcaggcacctgaaatcccagctatttgggaggctgaggcacaagaattgcttgaactcaggaggcagaggttgaagtgagccgagattgtgccactgcactcctcttgggtgacaagagcgaaactccatctcaaaaaaaaaaaaattaataacaaatacataaattacctaatatttttatagaatctaatttctaaaaaattcaatttctaggccaggcatcgtggctcacgcctgtaatcccaacactttgggaggccacctgaggttgggagttcgagaccagcctgaccaacatggagaaaccctgtctctactaaaaatgcaaaattagccaggcatggtggacacctgtaatcccagctactcgggaggctgtgtcaggagaattgcttgaacctaggaggcggaggttgcagtgagctgagatcgcgccattgcactccagcctgggcaacaagagtgaaaatccgtctcaaaaaaaaaaaaaaaaaagaattcaatttctaagaaatccattatgaaaaggctaaatattgcatgattccaattctatgacattctggaaaagaaaaacactatagagatagtaaaattatcagtggttgcaagaggtttggagttcaggagatgggatgaataggtgaagcacaggggacttttagggcagtaaaattattctctatggtactgtaatggtggatacaaaagcatttgtcaaaacctatttaattttacagcacaaagagtgaatcttaatgtatgcaatttgttaaaaaagaaaaaaaatcagccaggcatagtggctcacgcctgtaatcccagcactttgggagtacgaggcaggtggatcacgagatcaggagattgagaccatcctggctaacatgatgaaaccccgtctctactaaaaatacaaaaaattagccaggtgtggtggtgggtgcctttagttccagctactcgggaggctgaggcagaagagttgcttgaacccgggagttggagcttgcagtgagcagagatcgcgccactgcactccagcctgggcaacagagcgagactccatctcaaaaaaagaaaaaagaaaaaaatcatctaggaggttagtggatctgaggaaggaatacaaactatgacaagataatctaaccattataaatgtatgaaacaatctctgtgaaggagttggggggaaaagatgctgacttaagtaactttggaaatgagtggaactggtaagactaaagcaaaaggaactgtgtctgagcactgtgccctagtgataaagctgtttgtcatgaaggtagggattaacaatacttctactactatacatgtacacagtgttaacactgaaataaatcagttcagtaaatggatggcagagggtgggagccaggtttttcacaatttaagcaggaatatatagaaagcagggggagcctagaatactccatgtagtaatggattagagttgaaaacatcagtagtcactgaaatttaactcaatatatacttacagataattatgtatagaaatatgtataggtaggccaggtgtggtggctcacgcctgtaatcccagcactttgggaggccgaggagggcggatcacgaggtcaggagatcgagaccatcctggctaacacagtgaaaccccgtctctactaaaagtacaaaaaaaattagccgggcgtggtggcaggcacctgtaatcccagctactcaggaggctgaggcaggagaatggcgggaacccgggaggcagagcttgcagtgagctgagattgtgccactgcactccagcctaggtgacagagcaagactccatctcaaaaaaaaaaaaaggaaatatgtataggtatgggtggaaacatacaactgttttgctctgtcagataatagggcctaaaagaaatgttacccttccagcaatgagcacacttaacacttggatcttggttggtttcttttctttctttctttcttttttttttttttgacagagtctttctctgtcacccaggctggagtgcagtggcgccatctcggctcactgtgacctctgcctcctgggttcaagtgattctcctgcctctgcctcctgagtagctggcattacaggcacacgccgccatgcctgactaactttttgtatttttagtagagacggggtttcaccatgttggccaggctggtctggaactcctgacctcatggtccacccacctcggcctaccaaagtgctgggattacaggcatgagccactggacctggcctcttttattttttttttaagagacagggtcttgctctgtcactcaggctggagtgcagtggcaagtgatcatgggtcactgcagccttgaactcctgggcccaaccaatcctctcacctcagtattctgaatagctgagactacaggtgtgtgctgccatgcccaactaattttttttatttttcgttagagacagggtctcactatgttgcccaggctggtctggaactcctggcctcaagcaatactcccaccttggcctcccaaagggctgggattacaggcgtgaaccatcgtgcctggcctccatactgtttttcatgatggctgtactaatttatattcccaccaatagtgtgtgagggttcccttttttgcaaatctttgccaacatttgtcatattttgtctttttgatagtaaccattttaacaggtatgactcaacatctcattggattttcaatttgtatttccatgatgatcaatgatgttgagcatttttttcatatacctgttggtcatttgtatgtcttcctttgagaaatgtctattcagagtttttgcccacttcttaaccaggctgtttgatttcttgagactgtgttgtttaagttcattatacattttagttattatccccttatcagatgtacggcttgcaaatattttctaccattctttaggttgtctttttactttgttggttgtttcctttgctatgcaggagctttttagtttgatgcaatctcatttgtctatttttgcttttgttgcctgtgtttttggggtcataccccaaaaaaaaccattgcccaggccaatgtcaagaaaccagatcatgatttctaatacagtttcccaataaaaggaacaagggctctttggaagaatggttgaatctaggactagggcaggaaatacacaggatgagtctagaacatattgtaaatgccagaaagtaaggaagagctaggggagggggcaggaactgctttaatatgggagcatgtccaagggacatatgggggccacctaaaagatctcccaatggtcaaagctgaaacaatttgaacaacaaaataaagcagtgttggattataaccaaaagtacaaaataaacattcatgagtgcatattgatataaatgaattaataatgaattaataaatggaggagaagagacaaatctccctgcagaataaatttcaagcaatttatgtagatactctgtcttaaaggagagagtgcctaactctctacttaaatgtgggccatgcataggacttccttccaaagagtacagtatggcaaggggggaatgaagtaactttacaatggaaaaaatctgaaaaacacagccagatcatcaaggccaacatcaacagtaaaacatcatgttaatagtattgtcccttgacaggatgtgatgaaaatgtcatttaacctctgtggccatcctctcaatatcttataactcctgtctaatcatgagacgtgattagaggaaaatcatgagacaaattttaactgtggcatcccacaaaatactcaatgagtaccctcaaaactgccaaggtcatcaaaaatggcctgagaaaatgccacagccaagaggagcctaaagagccctattattaaatgtaatgttgtatcctggataagatagtggaatagaaaaagggcattaggtgaaacaggaaatctaagcaactcattgactttagctaacagtaatgtagcagtagaggttcactaattgtaacaaagacataccaatgtaagatgtgggaaactggatgtggggtatatggggactctctgtactatcttctcaattttcctgtaaatctaaaactgttttagaaaataagaccaccaggccgggcacagtggttcatgcctgtaatcccagcactttgggaggctgaggcaggtggatcacctgaggttgggagtttgagaccagcctggccaacatggtgaaaccctgtctctactaaaaatacagaattagccaggtgtggtggcacacacctgtaaccccaggtactcgggaagctgaggcaggagaatcgcttgaacccaggaggtggaggttgcagtgagccaggattgcaccactgcactccagcctgtgtgacagagtaagactctgtctcaaaaaaaaaaaaaaaaaggaatccaaggctgggcatggtggctcatacctgctgaagcccaggagttcaagaccagcttgggcaacaaagcgaaatcctgtctctacaaaaaattaaaaagttagctgggcatggtgacatttgcctatgatcccagctacttgggagggtggggtgggaggattgcttgaccctgtgaagtcgaggctgcagtgagccatgattgtgttactgtacttcaatctgaacaatagaatgagagcctgtctcaaaaaaaaaaaaaaaaaaatgcagttgtgggagcgagggcagtatggatgaccacgcttggctatgagctgatcactatggaagctgggtggcaggtgccagagctgaatgagaggaggaggagcagtgtgcgggtgcagaggtagggcaggagaagggatttcaggaggagcaatgggccttcggcctccctgtgcctgcagagggctgtctcctgaagcctcatgtgtggttattcagcatctgggaaactgttccctcaccaagccctctcctctgttcctctgtcactatctccaaggttgtccttatgccattctccccctgtgttatggtggactgtgcatgctccttccctccactcacaccagcctgtatgtcctcagggctgggaaggtcagtccagtactgtctgggaggtccagtccctagcacagccctctgtcaatgctgattattttttagctcttagaaatttcttccttttgtttagtaaaacattgcctcctacaactttaaactagctcctctcctctccctgccctgttccccaaaacagaagaaatccacttccttagcatgtgatgcccttaggtatttaaagaatgctgttttgtttttcattcaacatttatgtagccaggcacagtgccagtgttccgttaattattttcatattcacgcagagtggcctccattccttcggtcattcttcaaggggcgtaatttccagccttccagcctattgctcctcctggaaagcccttctgcctgccccacctctgcgcccacacaccgctcctcctgccactcagctctgtcacctgcctcccagcctccatagtgatcagctcacagccaagcgtggtcacccacactccccctgcccccactactggattcattgttttagtggtcttattttttagaacagtttttagatttacagaaaaattgagaagatagtacagagagtccccatatgccccacgcccagtttcccctgttattaacatcttacatttatacgtctttgttagagttagtgaaggtggtgtctgcttcacttcaatttattaatgtttcagagtaaggtgctcagagatgaacacagggcactaagggacagggaggcctgggcaggatggaggcacgaggatggaaaaggccttgctcagtttggtaggcagtgacaggaggggaggctgtgtcaggaacaggaacaacagggtctgttttgtccaggccctgcaatgctggaacagggagtaaggccttgatttcctagaagtcctggaaggctttgggtggggacttagcacaaggacctggctgctgcttcccacatagggccagcacatagaaagccttcaacaaatatttgttaacatgacccctttgaagaaaatgtctgcggatgccttcgtgaggtgcctgtggtaggactctgagctccctgtgttgaggccctggcttcagctgtaggagaatgagagtggtaactgcttgactgaacccgccccctggaaggtgggtcacatcgtcctcacccttgggagtagcagtgtggagctgggtcagccctgggagcagcagagggtggggcctagggtggagggacccaggttttgagccaggagatataggaagtccaacttctccaaggaacaggcaggctgaggcctctgaggtggtcaagactgggcaggccagagccatgggcagcgcagaagagaggtggcaagcagcatttcttattttcattctgcttctaatagttagctgtgtggccacgggcaaatcactttccctttctgaatctatgtcatgggaaaatgaggagattcatctgggtgagctgccacctctaaagttgtgtggctccatttgggtcactcattcagcagatattccttgagcacctaccatgctccaagcatggaacaaagtgccattgtggctgagtagactgacgtaattcctgcccttatggggcttatgatctagtcaggacagacaacaaacagataactagtaaatacatagaaagttacaaattgctgttaggaatggaatgaaaagcagggtgggtggggaggttcttaaatggggtagctaagggaagtctgctgtgaggaggtgatgtttaagctgagacctgaatgatgaaaataataagctatgggactgggcacagtggctcacacttgtaatcccagcactttgggaggccaaggaaggaggatggctgaggccaggatttcgagaccagcctgggcaacatgatgaaaccccgtctctaccaaaaacaaaaattagccgggtgtggtggtgcacacctgtagtcccagctactcgggaggctgaggcaggaggatcccttgagcccaggaggctgagattgtagtgagctgaaatcatgcaactgcactccagcctagggacagagtgagaccttgtctcaaaaaaagaaaaaaaaaaaaaaaaaaaaaaagaataagctatggaacgacctggcagaaaagtgttcaagacagacaagcagcaagttcaaggttcaaggcaggagggaggaggcgtgttggggggattggaagggagggcagggtggctggaacagactaagcaaggcagcagtgacatgaggctgagatggagggcttggaagggtgagacagcccaggccttaggcggcatgagatttatttgatcccaggtgctttgggatgctgtttgaagcatctagccagagaagcaactgactccagctgtgtgcatgcagcaagtgggttggaggtggctgagagagcaagcaggacagcagtgctcctgagtggatccctggttcaaggttgggctctgccactttatgtctcattaccttgggcaagctacttaacctgtttgtgcctcagtttcctcattgtagttgctgaaagcacagactctgaagacagaccacctgattcaaagcctaggtttattgctttcctgatgtgtgatgttagacaatttttcttttctttttcttttttttttcttgagacggagtctcgctgtgtcgcccaggctggagtgcagtggcatgatctttgcacactgcaagctccgcctcccgagtttatgccattctcctgcctcagcctcccaagtagctgggactacaagcacccgcaccacgcccggctaattttctgtatttttaatagagatggggtttcaccatgttagccaggatggtctcgatctcctgacctcgtgatctgcccacctcggcctcccaaagtgctgggattacaggcatgagccactgcgcccggccgatgttggacaattttcttaacctcagcatcctcacctgtaacatgagaataagaataggagtcagctcactggattgtggtgagggttaaatgggttatagatgcaaaaactacaaaagggcctggaatttagtgagtgctcaataaatgtttgttggtgctattattaccatttcatcatcattgctattgtaattataagatgattgaccgtggataggtaaatttcctttcctgaacctcattttccacatctgaggataacccccacatgctaggatggttgtaaggtgtaaattcatatatatatgtttcctctccagagtaggagctggctaaagagcagccattctggtttctatgcaagtcctggcattgactaggagggcctttgttcccactgtactcaacatgagagacacacgaggtgcttcatgtcccccagagaactctcacatgtgccatctcgtgtagaccctcagcagcttcagaggaaaggtggcatagctccaccccagtcttgccaaagagagacaaagccagggctcagagcacccaaaaatttgtacgtggtcatatttcaaggtctagaacccaaatggtggaggtggggagggtgttccagatcccacttcacatctcctttcaaattcagaatccttcggagacatgtcgatagatattctcacctgcatttcacaggcgagcaatggcccaggaggtactgtgtgccccaaatcacataagtacaattttaaaatatggaatcaatctaagtgtccgttaacagatgaatggataaggaaaatgtgggacatatacacaatggaatatcattcagccataaaaaggaatgagatcctgtcatttgcagcagcgtggatggcactggaggctgttatgttaagtggaataagccaagcacagaaagacaaatattgtatgttctcactcatatgtgggacctaaaaactggatctcatgaagatagggagtagattggtggttaccagaggctgggatggggaggaagagagggaacgaaaagaaagaatatgcatgtatttatttccagtgaactgtatgcttaaaaatggtaaagatggtaaattagatgtgtatattgtacttcaacaacagcaacttggatccaggattagtcccaaccccatgtgtcctccacagagtgggcctcttggtttgtggccctttttcttcttgagccctatacagctggcattggtggctctggggccactaaccgttcctgcccctgcccctccttgcctgagccttgattaacagctgagaggctgaagactgagcactggattgggagttcagcaacaaggattctagtcctggctctgcctgtcccaggtgtctccttaaaaagcggattgcacccttcatcacggaagcaagtatgcctgtggacttccatctcccttccagatagaacaaagtaggaattcaagccaaggaacaggagggcagctggagagaggaggacctgtggccaccgaagtctgtgagggatggaggagaaacagaggcctgcaggaaagtgtggggtgggtggctgcaaagataaggtccagaagaggactggctgtttgattttttattttacttttttttttttgagtcacagtttcactctgtcacccaggctggagtgcagtggcacaatcttggctcaccacaacctctacctctctgattgaaatgattcccctgcctcagcctcccaagtagctgggattacaggcaccggccaccatcaccatgcccggctaattcttttttttttcttttttttttttttttttttttgagatggagtctcgctctgtcgtcaggctggagtgcagtggcgcaattttggctcattgcaacctctgcctcccaggttcaagcaattctcctgccttagcctcccaagtagccggaactacaggcacgtgccaccatgcctggctaattttttgtatttttagtagagacgggttttcaccgtgttcgtcaggatggtcttgatctcctgatctcgtgatccacccgcctcagcctcccaaagttctaggattacaggcatgagccactgcgcccagccctaatttttgtattattagtagaggtggggtttcaccatgttggccaggctagtctcaaactcctgacctcaggtgatcagcctgcctcagcctcccaaagtgctgggattacaggtgtgagccaccacacctggcctattttacttttttgggatagtctctcgctctgttgcccaggctggagtgcagtggcgcgatcttggctcactgcaacctctacctcctgggctcaagaaatcctcccacctcagcctgggactacaggcatgcactatcacatctggctaacttttataatttgtgtagatatgtggtttcaccatgttgcccaggctggtctcaaactcctgggctcaagtgatccacccgcctgggcctcccaaagtgctgggattacaggtgtgagccactgcacctggtgcctagctgtttgatttttgttgtaagtcctaaggaagagaaaagagatttgctcgacaaaaacaaaaacaaaaacaaaacaaaacaaaaagctgtaattggacattggggaaaacttgagagcaatagtggcagtgagattgctggagtgggacagtgggtaatctgatttaggtgctcttctaattccacggttagaggaattccatatgatgtagcaaaaggggcccaggatttctcctgcctgtcatttgctcagtgatcccagataaattcacctcctgtttgaggccttctttttcccatctagaaaatctgtgggtaggctgggcacggtggctcacgcctgtaatcccagcactttgggagaccgaggcgggtagatcacctgaggtcaggagttcgagaccagcctgaccaacatggagaaaccccatctctactcaaaatacaaaaggtagcgcatgcctgtaatcccagctactcaggtggctgaggcaggagaatcgtttgaacctgggaggcagaggttgcagtgagctgagatttgggccattgcactccagcctgggcaacaacagcgaaactccgtctcaaaaaaaaataaaagaaaaaaaagaatgaaaatctgcgggcagacctggccagtctctgaggtctaactttctgtgacttctcccgagggtcttcaccaggccttccttccagagggtgaatgcgacacacgacccttgatcctgatgagcctgggaaatgagttgatacggataaggaaggaaatattttatgaactgattgacaatgatgacgagatgataaaaaagttgttaaagctcaatattgcattccccaggtcagtactggaaatgtgcgtaagtcccatcaggtgaaatgaacaatttttcacctgttattttagtaaaagaaggaaaaatataatacctgttgctgacaagggtgaaatgaaactgggagttgttggtacactctagataggctcaatccttttgataataattttagcattacatttcaagtgctataaaactgtcccaacactttgagacagagattcatctgtgaatttatagagccgaaatatggagaaagccctgcattaagatgttcattgcagggttgggtgcgatggctcacgcctataatcccagcactttgggaagctgaggcaggcagatcacttgaggtcaggagtttgagaccaacctggccaacatagtaaaaccccatctctactaaaaacccaaaattagccaggcgtggtggcacatgcctgtaatcccaactactcaggaggctgaggtaggagaatcgcttgaacccgggagacagaggttgcagtgagctgagatggcatcactgcactccagcctgggtaacagagtgaaactgtgtgttaaaaaataataaggctgagcgtggtggctcactcctgtaatcccagcactttgggaggccaaggcaagtggatcacctgaggtcaggagtttgagaccaggctggccaacatggtgaaaccctgcctctactaaaaatacaaaaattagccaggcatggtagtgggcctctgtaatcccagctactcgggaggctgatacaggagaatcacttgaacctgggaggcagagtttgaagtgagccaaaattacaccattgcactccagcctgggtggcagagcaagattccatctcaaaataataataataataggctggacgtggtggctcatgcctgtaatcccagcactttgggaggccgaggcaggtggattacctgaggtcaggagtttaagaccagctggccaacatggtgaaaccctgtctctagtaaacatagtctactaaacacaccaccgggtgtggtggcgggcacctttactcccagctactcaggaggctgaggcaggagagtcacttgaacccaggaggtgaaggttgcagtaagccaaggttgcacctttgcactccagcctgggcaacaagggcgaaatctgtctcaaacaaaaataataataataaaaaataaataagatgttcatagcagccatattcataatagaaaaacaatgacaacaacattgatgtgtgccacactaaggggatagtttataaaattgtggtatattctcttgatagaacataattgttttatttaaaaaatggtaagcttaatggctctgtaacagcagggtaaaatgggtgatataatgatactggaaaagggtggtacagaattgtacatgtgctatgactatgcctttataaaacacttacccgagagaaacctagaaggaaataagcaaaaatgacaatgcctatggtaagagtcgttttctctgggaggtgagactaaaggggactttctggttatatattcctctcatgttttattttatttttatttacttatttttttgaggcaggttctcactctgttccccaggctggagtgcagtggcacaatcatggctcactgtagccttgaccttctgggctcaagggatcctcccacctcagtctcctgagtagctggaactataaatgtacactacaatgctcagctaattgaaaatttttttgtagagatgggggtctcattacgttgcccaagctggtcttgaaccagtcctcctgccttggtcttccaaaatgctgagatttacttttataattattaaaaataaatatgtatcttgaaagattagataattttttttttactttttcatagtgtccaaattttctagagtgaatgttaatgcttttataatgggaacaaataacttttttaagtgtaaaaattaatttattgcccagaccagtggtctcaaaactgtttccatctcacactgctattactaaaaagtgttcaagcatgtactccctggtatgtatatgtaatataaataacatctgttaatttgtttttattatatccacatataatattactgtaccaatatatattataaacatataaaaattgatcttttaaaagaaaaagagaaagataaatataaatgaaatcctactattcacatactctagtggatcttgtacatctccctgggtgacatgtctctccaccccggctttgttttgtgtgtgtgtgtgagagatggggtctcactctgtcatccaggctggcatgctgtggctgaatctcaactcactgcaacctctgcctcccgggctcaagtgatcctcccacctcagcctccccagtagctgggacaacaggcaggcgccaccatgcctggctaatttttttgtattttttggtagagacggggttttgccatgttgcccaggctggtctcaaactcctgagctcaaaggatccacccaccttggcctcccaaagtgctgggattgcatgagccaccgcgcctggcctccacccccacttcgggaccaccaagctagactcccgcaagtcttatcacgggttcctccccttcagtctcctgcctgctggattctttctgcacactgtgttcttgttaaaaccctaatctagttgtgttaaactcctgcttgaaacctttcaatggtatctcactgcctataggataaagtccaaactcaatgctacctcaatgacccaccacagtctgacaccccactcaagtcccctccagcatctcctgccacctccaactcactccagcagcccaggcgggttgcctgctagatgctgcacataccttgcctttgccaatgctggcccttttgcctgaaatgctaaccccagtcctgcctccaccctttgtgataaattcctgctcattctctaagattcatcttctgcagcaaacctcctcagactaaccccagtttgggataagtaccccctttctgcacactcataatattctctacacagctctgtcattgaccgtatcgtgttgtcatacagttacctgtttgcacagctctttcccttccacctgattaagtgcttcaggaaggcaaggctgtgctttatccgcctttggtctctagcacctgtacagtgcccagcatgcagaaggtgcttaataaatgttgactaaatgtgatgggccatactcattgcagaagattgaaaaacactgaacagcaaaaaaagacaaaacccaaatcatttgcagtcttccagcaatcccagttagcatcttctgtatttccttttagtgttttattcacttcgtgaatatgtgccaaatatgcctttattgtcatactctgttttcataatggagctcatacttcttacacattttctttacttgcggtgatattgtggtcagatacggttttggcagcaggtgtgggaagcgagtgattccaatggtagagaaagggggtatgaaggcagacagagctgcaggtgattccagccctggccaataagcacacaaaaggctctgacgtgagatcttcatgaccttgagcagtgtgaggtcttcatgaccttctctaggcttttgactccaatcagcaaaacaagaaaattagagtagatcagtattttttaaagtatgaacatattccacaggagggttacaggatgattttaggtggctcacagattgacgtttttagttttaacatttatgtatttatttatgtgaattagaaaaagcagcatgactaacttactaactgtgtgatctgacagatcttgttgcttaagacaaagttaaagtaaatatttaagtaaaaggaactgaacagattgaaggaaaatcatttgtaatttttttttttttttttagacagagtcttgctttgtcacccaggctggagtgcagtggtgtgatcttggctcactgcaaactctgcctcctggcttcaagtgattcttctgcctcagcctcccaagtagatgggattacaggcgccgccaccacacctgactacttttagtagagatggggtttcaccatgttggccaggctggtctcgaactcccaacctgaggtgatccgcccacctcggcctcccaaagtgctgggattacaggtgtgagccaccgtgcccagcccggaaaatcattaataaatttaaagagcagatgatatgtagataaggccaacactggggcagtcttgtgagaaaaacaagctgaaaaatactggcggttccttctggttcaaggatgccacacttctctgattcctgggtattaccaatataggaaatggccatgtagacctgccactcaaaaaagggtttaaggagccttagctccttgcatattgcctggcacatgatggggatcagttaatatctgttgaatggaaattcataaaaggtttacatagagttgagtgggggcagatggaacattcagcatccgccctgctcagtcagcatttgcggccctcatctagaatgctgacccacagaattctgtcttattcattaatcgttgaactcatgcctttctagactgctaaaacaggcagaaaacatatccattatctagctcaaatccctcacgttttaaccgaagactctgagatcctgaagatcacagagccggtggcagaggtacctgtcctgtgaatagcgcaggctggttatcctgaaaatcacccctacagagcacagggcggcccatgtggggtagaatgcatggctgcatccacaagaaagtcaggaaatccccaaggccaaagtgaagaggatcacccaaaacagacagacagtatgaactaatgctggggattgcccaggagggcttaagggcgtcacgggctggttttttttgggacggagtctcactctgtcgcccaggctagagtgcagtctcgtgatctcaggtcactgcaatgtccccccactgggttcaagtgattcttgtggctcagcctcctgagtagctgggattacaggcgtgtgccaccacacctggctaatttttgtatttttagtagagacagggtttcaccatcttggccaggctagtctcaaactcctgatctgaagtcatccacccgcctggtctcctaaagtgctgggattacaggcatgagccaccgcacccagccatgggttgattttttaaagcctgaaaggacagatgcagctttcagttcaagtgagacaggggattggaactgagacccctgtgtgaagctgaggctaccctgttcagtgaaaaagtagactagaaatcaatgtgaccatcagcatcaggaagtgacatggagtcttgtctgtcctagcttagaatctaggttaaaaaaaaattatcccctaagaattagtcatcacatgctttccccctcctaggttttggtgaatcccttagcctcaccccaatttctatgtttctgaaatggagtggttgtgaaaattaaatgagttcacaaatgtaaagtgcttgacacatggtaagttctaagtctgagtgagatgttgttgttatttattatgtaagaaattgagagttaatggaactttttaagtgaggactacccagtagtgtgctcatggatgtttaacaaccagctctccaagatgccggaggaggaccctggcttgcagtgtttgctgatttccatagtgtaaatactcccaccatggccagtttcaaactaccaacctgctgccacaagcatggagttgagaagaggtgcacacggtcagctttcatgagcgggtggcagctggctttgtcatattgctgatgctacaggactagcttgtagccatgctgacctctgagttttttcttaagccaatctctatggatcaaagttgactttatctttgtcgatataatctggctggaagaatgaatgttctgacttgttaatgatgtattcagcttgtctgcttaggtaagagagtacaggtgagttagttgaagctttataccaccttgccttgctgtggtctcaggaggcctcagtccttcttccaccttcctcagccgcacttactatgaggtgagggggagggcagagccagaccaccatggccagtccaaggcagccaccagtctacctcctgtctctacagacctgcctgtgctggacatctcacgtaaaccgaatcatgtaatatgtatataccacactttatccatttatcaatataaaatgattaaggagctattttactttctaagttctgtgttctaagtctgtgaaatctggtgtgtattttacactcacagcacatctctatttcagactggctgcatttcaggtactcagtagctacaggtggcccattgctactacatgagacagcacaggcctaagggaagaaaactgtggaaagggaaagggtgcagaaggagagtctgggagggtcagagaagcagaatgaagcgccacatgcttagggaggggagagtggcaggaggcaaggctggaggggcgggactggcatgagaacctcggcttctgtgcctgccctttagtgatgaagatatgtgccagaagttcctccagcagaacagctggaatatctttcggaaggacctgttgcagctgctcgtggagccttgccaaagtcaactgttcactccaaaccggcccaagaagagagagatctacaaccctaagtctgtggtcctggatttgtgcagcatcaacaagacgactaaacctcgttatcctatttttatggcaccccagaaatacctccccccattgaggattgtccaagccatcaaagcacctcggtacaaaatccgagaactcttggcttagtgtaagagcacaggggtccttatttaggacaaataaaggatggtggattgggcgctgtgctttctgaatgaccaccatgggagctgtgggacttggaggaagggggcctggagggctgagctgtgggtccacagaggtgtttgggggacagcaatgggggcacagtctcccttgatgcttgagggctgggctgagtgaatggatggtcagaggctgtgtgtggacgggttaatcattgggcataggttcagggtaggagggtcttgtctgataagctggatgtgggggaggctcaaatcaaagtggtcaagactagggttgcaaatgccttccaaggccacacaggtcatctaaaggagggcagcagaagggctgggaaggcaacggggaatggtggagatgctggggcccactgtgtaagttccccatccagatggggcagctgccccttagcccagtcagttgctgccctgtcagaaaataattcgggcctcatatcgtcagtctgtagattcttcaagagaatcaagaaattcaatattttagatgattcctaccagtttttaaacatgagcaactaattcagattgttttcaaatagtgtcaaacaaaacacacatgggcctgcaggtggtgggctgggtccctgtcagagagtggaagtgaggctgcgactgattgggaggagggtacaggagccagagagacgctgatgggacagcatgacaggagcaggcatcaggtccaggatgaggagtgagtagctgtgatagaggaggtggagacaaggaggctgcagagtctgaacgaaagagggctcctcactctctctgctgggtctttaatctggagctgcccaacactgatctgggcctacaactcagggttcctgtctccagcagcctcagcaccacagaccaagctccagacacctctttcccttcgagaaccccataggttagcctgagagcactgaggagcctggcggaggccatggcggcacaggagcctgcccgcttccaagtcccccaccctgtccctggcaaggcatagactctgaggaatgcctgggcgttgagctgggcaccaggagctctggcagtcccaggtgtgcttgtgtctcactggaccctcttgagcactttgattcccttatctgtacctcagtttccccagtggtgaaatgagcaagttggacaagatcaatggctttcatgaatgggggtgatctagtttgaaaagcatattcaacattatagttttgtttgttgaatttattttttattttgagacagggtcttgctctgttgcccaggctgcagtgcagtggcacgatcatagctcactgcagcctcgaactcttgggctcaagcaatcctcctgccttagcctccaaagtagctgggagtacaggtatgcaccatcacgtagggctaattaaaaatttttttttgtagggacagggtcttactgaattgctcaggctggtctcaaactcctggcctaaagtgatcctctcaccttggcctcccaaagtgctgagatttcaggtatgagcctgatacgatttggctgtgtccccacccaaaatcttatcttgaattgtaataatccccatgtgtgaagggcaggaccgggtggagataattgaatcatgggggcagtttccccatactgttctcatgatagtgagtgagttctcacgagatctgatggttttataaggggctttccccttcgctcagctctcattctctctcctgctgccatgtgaagaaggatttgtttgtttccccttctgccacgattctaagtttcctgaggccttcccagccatgcgaaactgtgagtcaattaaacctcttttctttataaactacccagtctcaggtatgtctttattagcaatgtgaggacaaactcatacagagccactacactggaactctgttgaatttaaaagaaagccgttttcatattgcataccagaaaagaagtatgaaatttttctctctgaagggggtgtggacgtaaagggtaaagaagcagtggacttacagatcttcacttccctgatagctccagaatcaaggagtcagggatatctgcagcagtcctggaaaggttgactgtgacctacaaggacaaggggtcactgttttgggaccaagtaagttggggtgtctgaccatatttaggtatccttttgcatttagggctgtggctccaagatgatggtgtgggcttcttattcatccatttgaaatttatttatttatttatttatttttggagagagtcttgctttgtcgcccaggctggagcacagtggtgcaatctcagctcactgcaaccttccggattcaagcgattctcgtgtctcaggctctcaagtagctgggactacaggtgtgtgacatcaggcctggctacagacctggctaattttttgtatttttagtagagatggggttttgctgtgttgcccaggctagtctcaaactcctgagctcaggcaatccacctgtcttggtacttccaaagtgctaggattataggcgtgagccactgtgcccagccttgaaatttatttattgagcactgcagagagagtcaaaggttggataagatgcattttctgttgccttttattttcttggctaggggtcaccaaactccttttaaattttatgtttttaaatttatttttgagacagggtctgtctctgtcacccaggctagaatgcaatggcatgatcatagctcactacagcctcaaactcctgggctcaagcgatcatcctgcttcagcctcttaagtagctgggattacaggtgtgcactaccatgcccgactaattttttttttttttttttttttttttgtagaggcagggccttgctgttctgttcagattagtatcaaactcctggcctcaagtgatcctcctgcctcagcctcccaaaatgccaggattacaggtgtgaaccactatgcccagcccaaactctttatgtaaggggtcacatgttgagcacttattacgtgacagtcaccttgctgagcatctgactgtggagttcagtgacctgcaggctctgccacttaatggctgttgaggattaaaagaggtggtatgtgtataacaaggtggaagatttttttcaccaagatctctgggtcctgcttcctgggaaataagaaaatgcggccaggcacggtggctcacgcctgtaatcccagcactttgggaggccgaggtgggcggatcacgaggtcaggagatcaagaccatcctggctaacatggtgaaaccccgcctctactaaaaatacaaaaaattagctgggcgtggtggcgggcgcctgtagttccagctacttgggaggctgaggcaggagaatggcgtgaacctgggaggtggagcttgcactgatccgagattgcaccactgcactccagcctgggcgatgagtgagactccgtctcaaaaaaaaaaaaaagaaaaagaaaatgcttccagaataacaggcagaacatgttttttagggcagtaatgggtgagaaaatagcctggaagagcaactgaggatgagggtactgagaagggagagagactctgggctgggcttcaggaggtcttgaggggagctgaggaagagcaaagttcctgaagccactatgtgacaaaagaacttgagaaggagaaatgtctgaagaggacttcaaggagtcctctgtgcttttctgtgcattgagaatgtgtccctctttggcatttgtttgagaaaccaagtgaacatttgaatagaattatagaattaggcagtactgctgtctctttgaatccagtaaccaagcagggagtgggcagcaagagatgcttattatattcagcatatggtgtaaagtccctggcatggtaagtgctcagcactcgctaagtgtcattcacgtcttttagaccaaggtcaatttgatcatctagaaactctcttcccccttcagtggaataggaaactgagactttggaagtctgagccctcataatcagtgataaaggccatcactgagtggattggggtaggaggagcctgaatgacttctcgcctaacccccacactcttatctaggtgaaggagctcatgggaacatgaacgggcagcctctcaggggagagtggagacagggcagcaaaccataccaagcactgtgtggggggggtactgtttggaaaaagaatgagtgggacagtgaggggaatgtagggcagggggaggtgggacttgtgtgtgagcctagcttccaggctgtgagctgcagaatgagcgccggttctcaaggttccctttccccagcacacacacacacacatatacatacacacatatatacacacatacacatgcatacacacatatacacatacacatatacacacatacacatatatacacacatatacataaatacacatatacacacacgacacacatacacatacacacatacacatacacacatacatacatacacatgcaataacatgggatcagattcaggcaggatactgggtgtgctggctcacgcctgtaatcctagcactttgggaggctgaggcaggagttcaagaccagcctgggaaacatagtgagaccctgtcactacaaaaaatacaaaaattagccatccatggtggtgcatgcctgtagtccaagctacttaagggagctgaggtgggaggattacttgagccgaagaggtcaaggctgcagtgagccatgatcatgccactgtactccagcctgggtgacagagtgaaactctctctcaaaaaaaagggaaaagaaagaaaaaagaatcaggcagtgggcagtggaagacatgacatgagcatttacctgggagaggagttcactcagaaggagtaaatatgataccccctggcacaagtgtttggaacaaatgacattttcagtgctgcagaggtcctcactgccacctaggcacagatccaagggtcccggaagcccggggtgatctgccatgcctaagaagccagggagagggccccaggctcaggtatggagtacctggtgtgtgccaggcattatgtgaggcactctacagaggccatcacttactctgaaactatttcctggcagctaactggatggcagcatccatttgagagatgaggagcctgaggccccgaaggcaaagctcactcagctaccaggtggtggttccagaaaatccaggaaaaccacagcccagcaccctcctagttaatcagcattgaagtgtgtggacagttacaccaccgttactcatctatcccaaatgagccacctattttcaaaaaaggaagtctgcacacacagccctgaaactgtgctggggagaatataattgccctctggaattattttccatatgtaaataagcatagtcatacttagagaggcaagcccaagctgcttgagccaaaaatatagcccctagtgctaaaagcttccactgtttgggggaaaaataaaaaaaacccacttgaaaaataaacacaggacacattaccagcgtttgttataggtagtgtttaaggtcccaacttggggttggaagaaaggcattgtttaaatcttctattccggtggggcgcggtggctcatgcctgtaatcccagcactttgggaggctgaggtgggcggatcacaaggtcaggagtgcgagaccagcctggccaacatggtgaaaccgcatctctattaaaatataaaaaaaaattagctggtgtggtggcgggcacctgtaaccccagctactcgggggactgaggcaggagaatcgcttgaacccaggaggcagaggttgcagtgagccaagattgcgccactgcaccccagcctgggcgacaagagcaagactccatctcaaaaaaaaaaaaaaaaagaaaagaaaagaaaaaaaaaaagaaaaaagaaaagtcttctattcctttcatataactcctaggaaagtcttaccttccagttaaggggtgaaatgggtcactttgctcatctgcaaggctacatcatagggaaatactttcagggcagtacacgtacaggccattttaccatgatgcctttctactgctgggggatttatggggcttaactgcaagggtgctgagttgctgaatttgtaatcactggtccagagcaaacaatgaggatgagtagcagtttctaggtggctgataagcaggatcaaagcataaacaaaggtttttcatggctgctgccaaactgtgggccttggggacagacactggagggctggggcagtgagaggtagcagagttcagatgtgtgctgtgtgactctccgccaggctccatccctttcctgagcttcatgcctagcatctgtgcaattccaggggtccagcgggtgttctgcacacatagcccccaccccaggggctgagcagggccccacccgcctctcttgttttgtcctcacctatctcgtacttccaaaaccacccacccccaacagaaagtcaggatcaagaaagtggattattgaggctgggcgcagtggcttatgcctgtaatcccagcactttgggaggccgaggtgtgcagatcacctgaggtcgggagttcaaggccagcctgaccaacatggagaaaccctgtctctactaaaaatacaaaaattaaccgggcgtggtggcacatgcctgtaatcccagctactcgggaggctgaggcaggagaatcacttgaacccgggaggtggaggttgtggtgagtcgagattgtgccattgcactacagcctgggcaacaagagccaaactccgtctcaaaaaaaaaaaaaaagaaaaagaaaatggattattgaaccccatggtggcatgtgaaaatgaactgtgggagagataatagtatttatttatttatttgttatgttttcccagatagggtctcactctgtctactctggagtgcagtggtgcaatcacggttcattgcagccttgacctcctgggcttaagggatccttccacttcagtctcctgagtagctgggactacaggtgtgccacaatgcctggctaatttatttttttattatttgtagagacagggtttcaccatgttgcccaggctggtcttgaactcctgggctcaagagatctgcctgcttcagcctcccaaagtgttggaattacaggtgtgagccaccatatctggccgtaattgtatttcttgctgtctgtaattgtactgttacgtaagagactctccttgtacttaggaaatatacactgcagtacttggcagttaagagagataatttcttcaatttactttccaaattatttagaaaattataatatgtacatttagagagagaatggcaaagaaaatatagtcaaataacaactggccagtctgcgtgaagtgtacttaggaattgtttttaaaaaaaatttttttttaacagaggtggggtctcactgttttgctcaggcctgtctcaaactcctgggctcaagtgatcctcctgcctcagcctctttttttttttttttttttttttttttgagacagagtttcactcttgttgccaagactagagtgcagtggcagatcttggctcactgcagcctctgcctcctgggttcaagagcttctcctgcctcagcctcccgagtacctggaattacaggcatatgccaccacgcctggctaattttgtatttttagtagagatggggtttcaccatgttggtcaggctagtcttgaactcctgacctcaggtgatcgaaccacgttggcctcccaaagtgctgggattgcaggtgtgagccaccgtgcccagccactgcctcagcctcttaaagtgctgtaagccgtcgcctggccttaggagttctttgaaccatccttgaaattaaaaacatatgtttaactgtggtaaaatacgaatagcataacatgtatcatcttcatcatttttaagtgtatagttgagtggcatgaagtattctcattgttatgtaactatcaccaccatccatctccagaactcttttcatcttggaaaaatgaaactctgtacccattaaacaatgactccccattactccttcccccctagtccctggcaactacctctctcctttctgtctctatgaatttgagtaccctaggtacctaaagtagtggaatcatacaatatttgtctttctggggctggttcatttacttagcatgctgtcctcaaggttcacctatgttgtagcatgtgtcagaatttcgttcctttttaaggctaaacaatattccattttatgtgtatataccatattttgtttacccattcatctaccgatggccacttgggttgcttctactttttggctattgtgaataatgttgttatgaacattggtgcaaatgcatctttgagaccactgctttcagttcttttggttatatatccaaaagtgggattgctagatcctatggtaattccatttttaattttttgaggaactgccatatttttcatagtggcattatcattcttgcaattttaagtgtgaagttatcttaaaataaaaattagaactgaaaaaaggaagaaagtgaaggaagctaatatggatatgcataaatattggctttagttgactttataattagataaaaattgatttttaagtttgttgaggccgggtgtggtggctcacacctgtaatcccagcactttgagaggctgaggcgagcagactgcttgagttcgaagttcaagaccagcctgggcaacatgatgaaaccctgtctctacaaagaaatacaaaaattagccagatgtggtggtgtgcacctgtagtcccagctactcaagaggctgaggagggaggatcacttgagcctgggaggtggaggttacagtgagctgagattgcagtgagcctgggtgacagagccagacccagtctcaaataaaaaaaaaatcattgataagctccgtgatattcaggataaaaagagaaacatattatttattagaaattagacaattgggccaggtgctttggctcacgcctgtaatcccagcactttgggaggccaaggtgggtggatcacgaggtcaggagatcgagaccatcctggctaacacggtgaaaccctgtctctactaaaaatacaaaaaattagccgggtgtggtggcgggtgcctgtagtcccaggtactctggaggctgaggcaggagaatggcacgaacccgggaggcggagcttgcagtgagcagagatcgcgccactgcactccagcctgggtgacagagcgagactccatctcaaaaaacaataacaacaacaaaaagaaattagacaattgagaccaagaagaaaatggaggaagtcactatggatttgtataagctctagccataattacaaaacctggctttcacacacctattagaatagccaaaatccagaacactgacaccaccaaatgctggcaaagatgtggaccaagaaccatcattcattgctggtgggagtacaaaatggtacagttgctttggaagacagttcagtggtttcttataaaattaaacattctcctaccacacaaggagttgaaagcatatccatatgaaaacccgtacataaatgtttatggcaactttatttgtagttgctaagacttggaagcaaccaagatgtctttcagtaggtgaatggataaataaactgtggtatgtccagacaatgggatattattcagcactaaaaagaaatgagctatcaactcttgaaaagacatggagcaaccttaaatgcatattactaagtgaaataagccaatctgaaaaggctacaaactggatgtatgtccagttatatgacactatggaaaggcaaaaactatggagttgtcttcaaaattagtcgttgccaagggctgaggagagggaaggatgaatggatatagcacagatgatttttacagaagtgaaactacaccctgtaat

SEQ ID NO: 661 - DNA, 1940 bp, Homo sapiens
agctgatggtatggtaggaggagtggagtggagctcttgccttgttactgaggaaatctatttgtttctagtattactggatttttggggaaaaatttgtagtcctccccttgaaaggcaaaggggctagttgtgccatttgcctgcacaggaaccatgaggagacatatggtaacttatgcctggcagctcctgaagaaggaactgggactgtaccagctcgccatggatatcatcataatgatccgagtgtgtaaaatgttccgccaaggcctcaggggattccgggaatatcaaatcattgagactgctcactggaagcaccctatcttctccttctgggataaaaagatgcaaagccgagtcacatttgataccatggacttcattgcagaggagggtcactttcctccaaaggccattcagatcatgcagaagaagccttcctggagaacagaggatgagatccaggccgtctgtaacatcttgcaggttctggatagctatcggaactacgcagagcccctgcagctgctcctggccaaagtcatgcgctttgaacggtttggtcgcaggcgtgtgatcatcaagaaggggcagaagggcaacagcttttatttcatctacctgggcacagttgcaataaccaaggacgaggatggcagcagtgccttcctagatccccacccgaaattgctgcacaagggtagctgttttggggaaatggacgttctgcatgcttcagtgaggaggtccaccatcgtctgtatggaagaaacggagttcctggttgttgaccgggaggacttctttgctaataagctggaccaggaagttcagaaggatgctcagtatcggtttgaattttttaggaagatggagctgtttgcatcatggtctgatgagaagctctggcagctggtagccatggcgaagatagagaggttctcgtatgggcagctgatctcaaaagattttggagagtcacccttcatcatgtttatcagcaagggcagctgtgaagtcctgcggctgttggaccttggggcctccccttcctaccgtagatggatctggcagcacctggagctgatagatggcagacctctgaagacccacctgagtgaatactctcctatggaaagatttaaggaattccagatcaaatcatatcctctgcaagactttagctccttgaaacttccacatctcaaaaaagcctgggggctacaggggacaagcttcagcaggaagatcagaacctcaggagacactctccccaagatgctgggcccgaagatccaatccaggcctgctcagtcgatcaaatgtgccatgatcaatatcaagcctggtgagctccccaaggaggctgcagtgggggcctacgtgaaggtgcacactgtggagcagggagaaattttgggtcttcaccaggccttccttccagagggtgaatgcgacacacgacccttgatcctgatgagcctgggaaatgagttgatacggataaggaaggaaatattttatgaactgattgacaatgatgacgagatgataaaaaagttgttaaagctcaatattgcattccccagtgatgaagatatgtgccagaagttcctccagcagaacagctggaatatctttcggaaggacctgttgcagctgctcgtggagccttgccaaagtcaactgttcactccaaaccggcccaagaagagagagatctacaaccctaagtctgtggtcctggatttgtgcagcatcaacaagacgactaaacctcgttatcctatttttatggcaccccagaaatacctccccccattgaggattgtccaagccatcaaagcacctcggtacaaaatccgagaactcttggcttagtgtaagagcacaggggtccttatttaggacaaataaaggatggtggattgggc

SEQ ID NO: 662 - protein, 570 aa, Homo sapiens
MRRHMVTYAWQLLKKELGQLAMDIIIMIRVCKMFRQGLRGFREYQIIETAHWKHPIFSFWDKKMQSRVTFDTMDFIAEEGHFPPKAIQIMQKKPSWRTEDEIQAVCNILQVLDSYRNYAEPLQLLLAKVMRFERFGRRRVIIKKGQKGNSFYFIYLGTVAITKDEDGSSAFLDPHPKLLHKGSCFGEMDVLHASVRRSTIVCMEETEFLVVDREDFFANKLDQEVQKDAQYRFEFFRKMELFASWSDEKLWQLVAMAKIERFSYGQLISKDFGESPFIMFISKGSCEVLRLLDLGDSYRRWIWQHLELIDGRPLKTHLSEYSPMERFKEFQIKSYPLQDFSSLKLPHLKKAWGLQGTSFSRKIRTSGDTLPKMLGPKIQSRPAQSIKCAMINIKPGELPKEAAVGAYVKVHTVEQGEILGLHQAFLPEGECDWLILMSLGNELIRIRKEIFYELIDNDDEMIKKLLKLNIAFPSDEDMCQKFLQQNSWNIFRKDLLQLLVEPCQSQLFTPNRPKKREIYNPKSVVLDLCSINKTTKPRYPIFMAPQKYLPPLRIVQAIKAPRYKIRELLA

SEQ ID NO: 663 - DNA, 1928 bp, Homo sapiens
agctgatggtatggtaggaggagtggagtggagctcttgccttgttactgaggaaatctatttgtttctagtattactggatttttggggaaaaatttgtagtcctccccttgaaaggcaaaggggctagttgtgccatttgcctgcacaggaaccatgaggagacatatggtaacttatgcctggcagctcctgaagaaggaactgggactgtaccagctcgccatggatatcatcataatgatccgagtgtgtaaaatgttccgccaaggcctcaggggattccgggaatatcaaatcattgagactgctcactggaagcaccctatcttctccttctgggataaaaagatgcaaagccgagtcacatttgataccatggacttcattgcagaggagggtcactttcctccaaaggccattcagatcatgcagaagaagccttcctggagaacagaggatgagatccaggccgtctgtaacatcttgcaggttctggatagctatcggaactacgcagagcccctgcagctgctcctggccaaagtcatgcgctttgaacggtttggtcgcaggcgtgtgatcatcaagaaggggcagaagggcaacagcttttatttcatctacctgggcacagttgcaataaccaaggacgaggatggcagcagtgccttcctagatccccacccgaaattgctgcacaagggtagctgttttggggaaatggacgttctgcatgcttcagtgaggaggtccaccatcgtctgtatggaagaaacggagttcctggttgttgaccgggaggacttctttgctaataagctggaccaggaagttcagaaggatgctcagtatcggtttgaattttttaggaagatggagctgtttgcatcatggtctgatgagaagctctggcagctggtagccatggcgaagatagagaggttctcgtatgggcagctgatctcaaaagattttggagagtcacccttcatcatgtttatcagcaagggcagctgtgaagtcctgcggctgttggaccttggggcctccccttcctaccgtagatggatctggcagcacctggagctgatagatggcagacctctgaagacccacctgagtgaatactctcctatggaaagatttaaggaattccagatcaaatcatatcctctgcaagactttagctccttgaaacttccacatctcaaaaaagcctgggggctacaggggacaagcttcagcaggaagatcagaacctcaggagacactctccccaagatgctgggcccgaagatccaatccaggcctgctcagtcgatcaaatgtgccatgatcaatatcaagcctggtgagctccccaaggaggctgcagtgggggcctacgtgaaggtgcacactgtggagcagggagaaattttggccttccttccagagggtgaatgcgacacacgacccttgatcctgatgagcctgggaaatgagttgatacggataaggaaggaaatattttatgaactgattgacaatgatgacgagatgataaaaaagttgttaaagctcaatattgcattccccagtgatgaagatatgtgccagaagttcctccagcagaacagctggaatatctttcggaaggacctgttgcagctgctcgtggagccttgccaaagtcaactgttcactccaaaccggcccaagaagagagagatctacaaccctaagtctgtggtcctggatttgtgcagcatcaacaagacgactaaacctcgttatcctatttttatggcaccccagaaatacctccccccattgaggattgtccaagccatcaaagcacctcggtacaaaatccgagaactcttggcttagtgtaagagcacaggggtccttatttaggacaaataaaggatggtggattgggc

SEQ ID NO: 664 - protein, 566 aa, Homo sapiens
MRRHMVTYAWQLLKKELGQLAMDIIIMIRVCKMFRQGLRGFREYQIIETAHWKHPIFSFWDKKMQSRVTFDTMDFIAEEGHFPPKAIQIMQKKPSWRTEDEIQAVCNILQVLDSYRNYAEPLQLLLAKVMRFERFGRRRVIIKKGQKGNSFYFIYLGTVAITKDEDGSSAFLDPHPKLLHKGSCFGEMDVLHASVRRSTIVCMEETEFLVVDREDFFANKLDQEVQKDAQYRFEFFRKMELFASWSDEKLWQLVAMAKIERFSYGQLISKDFGESPFIMFISKGSCEVLRLLDLGDSYRRWIWQHLELIDGRPLKTHLSEYSPMERFKEFQIKSYPLQDFSSLKLPHLKKAWGLQGTSFSRKIRTSGDTLPKMLGPKIQSRPAQSIKCAMINIKPGELPKEAAVGAYVKVHTVEQGEILAFLPEGECDWLILMSLGNELIRIRKEIFYELIDNDDEMIKKLLKLNIAFPSDEDMCQKFLQQNSWNIFRKDLLQLLVEPCQSQLFTPNRPKKREIYNPKSVVLDLCSINKTTKPRYPIFMAPQKYLPPLRIVQAIKAPRYKIRELLA

SEQ ID NO: 665 - DNA, 99103 bp, Mus musculus
  misc_feature (1)...(99103): n = A,T,C or G
gctcgtgtctctagctgcatatgtagcagaagatggcctagttggtcatcattgggaagagaggccccttggtcttgcaaactttatataccccagtacaggggaatgccagggccaagaagtgggagtgggtgggtaagggagcagggcggggggagggtacaggggacttttgggatagcatttgaaatgtaaatgaagaaaatatctaataagaaattgaaaaaaaatcttacttttacttgtgttttggggtggggtgttcacatggataggggacttacatggaaggactgggaagtgagtgttatctggatgcatgatgtaaaattctcagagaatcaatacaaattttatgttgagccgggtgtggtggtgcacacctttaatcccagcactcaggagacagagacaggtggatttctgagttcgaggccagcctggtctacaaagagagttccaggacagagaaaccctgtctcaaaaacaaacaacccccccccccccaccgctcccccaaaataaccaaaccaaatcagtcctgactccatgaggaagttctgcgcacactaggcttacctgttgatgccttccagggcggatgccacactgttatcgatctgcagcacagtcttatagtcaacgtaggccagggcgtacttctccagggcttcatatgcagatgctctgcgcagcaagggcttgatgctgaagggaaccaaggccagcgcgctacgggaggttaaaaacatgttaggccaacaggtttccccaacaatgcagtgattcagtcagtcacctggagcagtcagcatatcagaattacttctggtaaaaagacagcatctctagaataggtagggaattctcaacttagactgaattgggaaaggcaagaaggcagaggagaactaatgagatgtgcaggcacgtgtatctttctaccctctcctcttgcccagatgatgaacaagggcctcagtttcatgtgtctatgtgtccacactgtggcccagcagaagtaataaacaagcctaggattgagtctgcattctatccatgctaccactagccatgggaccccaggcaggcacttcatcatcccggtcgttgtcacctgggttctgtcctgggaagaagggtaaacttaccaccacagtgaacaccctgtgaaagagaaaagaaggcagcacaggctccacgagcatgcctctctccttactcattccatgcatgtacagcaacatcagacatagggttagccacagatgtatgctagcttagccaagatgaaaaaaggctagcccggggggtgggggggctggctcagcagttaagagcactgactgctcatccaaaggtcctgagttcaaatcccagcaaccacatggtggctcacaaccatctgtaatgagacctgatgcccttttctggagtatctgaagacagctacagtgtacttatatataaaatgataaatgaatctttaaaaaaaagaaaaaaaaaggctagcaggaagaacgagacaggagaaaccattcagtgctctgtacacctgattactgacagactgtcctttcttccttcctcttcgcccccatcccctttttttgagatagggcctcactatgtagccctggctggtgtagaattcatgatacagaacagactagccttcatctcacaaggatctgcctgcctctgcctactggacactgggattaaagatgcctcagccaggcgtagtggtgcaagcctttaatcccagcacttgagaggcagaggcaggtggatttctgagttcgaggccagcctggtctacaaagtgagctccaggacagccagagctacagagaaaccttgtctcaaaaaaaccaaaaaaaaaaaaaaaaaaaaaaagaaagatgtgcctcaccctctctttgcttcttagactacctgttagcatctattatccccctttcttctttcctttattcttacttctcacaccatcatcccaggaaaccacccgagcatgtcagtcactgtgactgcgtctcacctcatgtgccaagtcacagagatgttatagtctacttctaacttcccatcatacaccattaaagaagcagtgagcccaaattccaaagacaaggagtctgtcattctaagtggcctatctgtaaaaagagagaaggcgggattctcccgaggagaaacctggcttgctcttcagtaaccttcaggtattccagaggctccctgggccacttacgaagtgcaatctttgatgcaatctgtgcagttcccatccttcaagtagcacgctgcacggttggagtacagaacactttcttcttcggggtctgcagaacctgcccagatggaggcaggaagagcaagatcatgagttgggaaatagatgtcagagggcgtagagatgcacttcatatttggagctttctaggatttgggaaaaggcagcagagtcttgtagcctaaccaggcttatatatcatataggataacacatttaccattcctatcaccacagtggggaagtctagatttctgccattcacaggaaactaagcatccatcatcacttattttagcactgaacttggtaccagataaaaatataagcataaggcagctggtttctgcccgagagaaaaccctgttgtaattacttggttgcgtggctaacttattacagaaagcacagggactcaatagagaaaggaaaaggacgataataaatgcctcaacgagggggtaactcagagtcggagggaaatgcaagcaagctagagagcaagagttaagtcagaaaagcctttaccagaaaaatataaccgagccaggtctgccaggactacgggcacctcaatagagaaatgtgaacaaccccataatgtttctcattagtcacttctctaaagtcaatgatcttacccaggcacagaagcttagacctctcactgtgactataatcactttcatttcttaaaatttactcctgtgtgtgcgtgcgtgcgtgcgcttgtgctcctgcatgcaagctcacatgcagaaggaggaatgcgtatggaggtaagatgacagcttgagccgggcgtgatggcgcaggcctttaatcccagcacttgggaggcagaggcaggtggatttctgagttcgaggccagcctggtctacagagtgagttccagcacagccagggctacacagagaaaccctgtctcgaaaaaccaaaaaaaaaaaaaagaagaagacgacagcttgagggagtcagttctctcctcctcccacgcgggacctaggaactcagcaagagcctttgcctgctgagacccctgattttcactttttggagaatttcattaactgtattctgatcgtattaattcctcctctaacttcccctaggctcacttctgcctccacactctccaactctgcactttcctttaacccctgttttcattttaaagatactgtcaactacattttactcactagcatgggtcctaaaataccacaagacagcaaacacagaacataagaaaacagtgtggaccaagtaactcctaggtatatagaccaaaggtcttcctgaaatatttgatttagacattattttcatagcttatgcttgatatgacattcagcatccaccattttatcaaaatcagttgttcccacctccacccacctttgagtgaggtcccactaccttttccaggttgcccttgaactagcaattttcctgcctcagtctcccaaagtactggagctacaagacttcatgtcatcatagtttctccccctacccatccccctacctcctttaaaaacaaaaaaccaaacaaacaacaaaacttaaaacaaattgctggtatggtggcacatctttagcctcagcagtcccgaggtaggggcaggcagagttccatcgtctgtgcagaaggctagccttgacctctgacaacattcctgcttcagcctcctgagtgctgggataacaagtagacacctccacaccctttcctagggagcaaggtttcactgtgtagccctaaggggcctggaagccactccatacatcaggctggcctcaattttgcttttgaaatggctaaaactccatccatactcatttttgtccctggaggccagcacaatgctcacaagcccggcccactttagtgcgtatcattaacgcataaggaactggaccactaaagtgtttcccaaggggcatcacacagcctatccttttgcacttgcttcaggaagtaggataccatgttgacacttgatatccttcattcaatactaacaatgaataataaacacaataaatttatacttctttcattcttctcttgggccagaaaatacagaggtaagttgaatagtccttgccagtactgaaaggttctagttaatggtcctacaaaatccactcaactcttctgagtacttgagtgcatgtatatttgaaggtttcgagtctcagacttgctacaaggcttccctgtgctccttagagcagagaaatccgatctgagaagccaagagaattacctacataatcacactgaaatttccgtagtagggacagaaataaaatctggcaaatttaaacagcagggctgtttaattatagtggtctcagaataaatccacacaaaagcatagcttctggccttttactcagggaagggggctgagagggaaacagccaccttagtgtccccagcaacttcaagatgtgggactgacatagtgggagcagcctaagagggtttccagagaaaacaacaggagtgtgtgtgtgtgtgtgtgtgtacccatgcatagcttcaacccataaaaggtctaaaaaggaggatttatgaattagtctaggtaatgattaaaaatttggactcagggggctggagagatggtttaggggtttaaagcatacactgatcttgcagaaggccagagtgtagcttccagcacccacgtgaggcagtgcacaacacctgtaactccagctccacggggatgccacctctggcacattaaccccaccccatgaccacaaataaaaccagattcagaaatcagatgactatattcaaattctgggtctaacaatctgcactgtgtcatcctaggaaggcaatgaattctttgggattcctcatctacaggttgatctggtcatagtgaagataaacaaagataacatccagcacagaaaaccacgcaacaaacactggtcaagaaaatgagaatggggctggtgagatggctcagcgggtaagagcactgactgctcttccagaggttatgagttcaaatcccagcaaccacatggtggctcacaaccatccgtaatgagatctgacaccctcttctggaatgtctgaaggcagctacagtgtacttacatataatagtaaataaatctttaagataaaaaaagaaggaaagagagaaaatgagaatgaggactcagagaaagtgggactcaaggctgtcttcatgtcaaagcttctgaaacttcgggcaaaggttaggagcattgttaatatgctgttcttttgtttaaaactcttccaattaggggataaaatcccaactctttggagggtttaaagcaccaacacaattaaggttttgtgtacttcctgtcttaaattgtctcattaatagcttatgctgcttagtgtatctgatgggtctccgcacctggcatgcattagacactcaactcagggacatctcaaatatctcttgagaagttgcccatgacttcctttctaaaggatccaaccttatcacattactttgtattaatagttctaatctcagaggtctcctttacttacaaatgtaagacaactggccccaggaagttctatccttgaaaggaccccatctcgccagccacattcagtcaatatacaaaagtcaactgaattttaaaatgagtacatgaggggcggacaggtgcgctagctatatgcgggggcgtggtggtagaggctggtgcggcagatggcccggggaaaagaaagacccagaggacaggatcaacacttagtccagggcgccgatgcgggtgcaggatgcctgcaggcccggaaggtaaacgggggagcgggttcctacctcgcgcctgcagcagtcgcagcgcgcgctcgtacagcgccgaagcctcggcgtactggccgttgcggaaactctggttgccggctgcgcggagctcttccacagagtctgagagtttgggggccatcccgggaggccggcaaacaaggaccacctccgttccccgccgaggagtgcgcaacagcttccgggtggaagcagcggatgcgtgcccttaaggcccgcagccgactggcctgggggtggtggggggtggtgatggtagaccgggccgcggctaggcggccagggacggaaagaatcgcggggtcaagccctgggagggcctggtgcggcggctggacgcggggaagggaaaaccagggaggctgggccaacgggaggcccggtgcggggatgcgggtggaggacgcaggcccggagggaaacgtggggcgggttcctacctcgcgcctgcagcagccgcagtgcgcgctcgtacagcgccgaggcttcgccgtactggccattgcggaagttctggttgccggcagcgcggagctgttccacggaatccgagactttgggggccatctcgggtgggctgggaaacagggagcaacgcacttcccagctaagtggtgcgcaacagcttccacccggaagctagggctgcgtgcctttaaggcccactgtggaccggccctgaggggcggggccagacgaggcggggctagacggggcggagctaagcggccggaagagtgggctcaagcccttagctctgtccggccgctcttccttgtccaggggcggggccagggaagggcggagctaagagggtcggaggcgggggcgttgagaaacaaggcctttagcgtgagctctgtctggaactcgtggtcaacaagtttgaagatggtggctggcactccagtgctgaagcgacagctgaatcaccgaaggaggcagactatcttccctccgttggacctgggaagcaattaatccacgaccaagagaaaacatactttttgtcaagattgtttgttttcgagacagggtttctctgtatagtcctggctgtcctggaactcactctgtagaccatgctggcctcgaactcagaaatctgcctgcctctgcctcccaagttttgggattaaaggcgggtgccaccacgcccggctcgtcaagatcttaatactataaagaagcaaagagcgggatgatgcaaacgtgtggaagtctaaggcaccctcgaggactgtataggatagagtgagaatgatgaaaattttttatacgcacaaaagaatataatgcacttaaaaaaaaaattgaagcaacataatccaaagttgaggtctgcagttccaccactttggaggccaaggacagtatagctgagctcctgttttaaaacaaaaccaagaaaacacaatgatgttataggtgataggttatttctccgttgccgatgaaatgagccaatttaaaccagattatagtaaaggcaggtttattgggaagctgctttcgggcaagttcaccggtcccaaaggaggaggccagggaagtcgccatggggacgggggtgggggggggcggtgggttttaagaggtactannnnnnnnnnnnnnnnnnnngtgtgtgtatgtatgtatgcatgtgtgtgtgtgtgtgtgtgtgtgtgtgtgggtgtatttatatataaatgatatttctctgccttgcggcttagtgaggagcggttgctcctgtgagggggaaagaaagaaagaaagaaagaaagaaagaaagaaagaaagaaagaaggagggcacttatgcatagagagaaaagaagggcagaccaaagtgtctggattatatagggaggagcctctgggggaagggcagcccagcctctgggcttaaagttcaggggtgggggcatggcatggcaggtaggcactgagggatgctgggagaacctggagattggggaaggcaaacaataggaaatacccctgtggaggctgttaaacctgagcaggccacagagagcctctgaggcagagaatcagctgaaacctgagatgtcgggatcaggattccagaaagctggaaagcgcctggcatcttgtggaccataaaacttatttagtgggtgaatacagatggatacagatgaatacagtgaatacacatggataacactggagctgggcttggtggtggacgctttaatcccggcacttaggaggtagaggcaggttggtttctgaatttgaggccagcctggtctacatagcatgttccaggccagtcagggaatatacagatgctgcttcaaacaaatccctacaaacaaccctaaactaaaaatatacccactacgcccctaaaaacagaacggtgagggctcagcgacggaacttcagaaatctgtgagttttatttttttaaaaagatttattgattttatgtatgtgagtacactgcagctgtcttcagtcacacgccagaagaggacatcagatcccattacaggttgtgagccaccatgtggttgctgggaatggaactcagaacctcttcaagagcagtcagtgctcttaaccactgagccacccctccagcccttgagctttatttttgtcaataaccctatcggcttgagctgagtctagactgtcattttggactaaattagtggatctttccgtttttgggggtgtgccaggtccaaagcgaacccccaattcctcccccaaaagggaaggcttgtgttgaatattgaaagtgtaaacaaaaggattgctggtggacagacccgagtagtcctctgtaacctgttggtttctgtctaccaaaaggagtcactcctttatcgtccttgcctttggtaaaggagacttaagccaagctaacctgcagggtccttggtccctagtaacatatatctgttatgagtagcaaagcagcctggccctccttacctcctccactatgctcccaggctgttccagattacaacttgcacactcccctccgcagcagttacgctacagcaaggtcccgaccggctcttctccctcttcgctaattttttctgcccggaagatatagccctggccttggccagtctgtttttttctctctgctcaggagtcttccagatgctgtttggtctcatctacaataaaacctctccagtcttggagcagagattttgatggtttcttgactgcgccctagtttacagagggcttggggcttttccccttggccctaatatgaactcacttctttttctttctctctctctctctctctctctctctatatatatatatatatataatatatatatataaatatatataaatatatatatacacacacacacatatataaaatatatatataaatatatataaatatatataaatatatataaatatatataaatatatatatatacacatatataaatatatatatacacacatatataaatatatatatacacacatatataaatatatatatacatatatataaatatatatatatatttatatatatatattttaagaactcacttatcaagcccgtgctttgctaacagcctccccatctgagaaactggagaaccctcaaggagtcaggcttgaaagtattcagtccaaaggcaagtcaaggagagggtgtcgctgacactcgggccactagaggccgcccgagaggcacctcttcggctttctgacttctgtatccgcccgccactgtgccacgtgactcccgccgctccgcccagcctcctctcgcttccggtaggggcggaaagcggaagtgtgggagggttcgcggggcgggctccgggaggatggagcattgaggcagtctgggcggctgccggcagcgccatggagaccgtgcagctgaggaacccaccgcgcaggtgaggggccgtaggctgagaggcaagagagttgggtgaggagagaaggcgcgagcttgctgagggtagaccccggcgtgcgagctcgggccgggaggagagggacccgcgaggctggtgaccgggctgcagtagcacctgccgagagaggagggagcgtccgctggcccgggcagaagtggttttgcttagagagagcactctctgggcaacgtgcggacaagttaggggagaccccagcagaggccggggaaggcgccccaagaagggacccgaggatgtaggggcgaatgctgaggccgggtgagcgaggacttaaccctgttgcttcgctttcgaggcagaagtcgttagaaacattgattggaggtcccatggctaagtaaggggtggagcggggattttgggtcctggtggttctgtcccaagtcattgctcctaactgccttactgtgtcagtaccaacgtttcacggttctagtaatggagaaagggttatggggggctagagtttccaaggggcttcagggtgtccgccccatgtaggatgatgtattagtagtgatggcggtaatggcttttattactgagttcatgagtgactgcctactttttttcaaatcgtcctcagccttccaacacccaaagttgggacgttgataaagaacaaacaaacaaacaaacaaacaccaacccgggagtgggtaatctgaggtccaataaatagagtttagacacagtaggctcagccagactttgtcctgttcaaattctgtttcgatactctcttggctctagattctagaagtatctagagttgttttgggtcaagatgaactgactgctgttgtgctggaccactccccgtctcacctggagaaaaaaagcctagagcctgagggagtcgtgcttctctcagacacagctaaaaacttgggtttcacagagaagacatttgacttcctgcagcagaatgagcactaaaataggaagtgttcagagtaagggagtgccgggcaccggagaggtggtgtgtgtgtgtgtgtgtgtgtgtgtgtgtgtgtgtgtgtgtgtgaaagcctgggcagcactcttaggggaggcagggtctgttggaagtacacaaacatggaatcaaacaaacagcttgttgagatgggctcaggtttgacttagtgtggtgtgctgaggcactcaaaggagtacttattaattacagccagagaatgctgcagggcggcaggcactgtttcattgctttccagcttgcctgttcagccataggaaattgctggtgttttgaacttgtaaacatggtacaccttactggcgcagctagccttcgcaactatcatataaggaggatatccctgtatccttagtgtaaagaggataaagccagggcacagagaggcaggccacttgttagctgctccatagttagaggcacagttggggtgttaacatctggtgatctagtcttaaaatccttgcgcttagcttttttactctgatgtctctctggaagttacctgttacattgggtctttctttgtatatacgcatcttagcagattgttcctgtatgtacggaatcagtaaccactaggccagttattcttccattcctttcccccaaaaccttcatttaactaatagttttgttctctctctctctctctctctcctccagagacagggtttctctgtatagccctggctgtcctggaactcactctatagaccaggctggcttcgaactcagaaatccacctgtctctgcctcccaagtgctgggatcaaaggcgtgcgccaccactgccagaccaccatttggattgtaagaactgtagtaaagcgcgagagaagagtgtggcagggcgagtccttggaggattggtgctgccttattcgttgtaactagtggactgctgcattttactatcagaattaagtggttcagattgctataacaagcaccacacctggatggtttaagcaacagaaattaattttttatgtagttgccattctggaggctggaagtttggaatcagatgtctttggcttacaaatgaccacctttcctcccacctcttcgtgtggtcttcattctcctctggctgtgcccttatctcttccgctttcaaagtttctgatctccagatgcaatctcatattctgaggttctctgagttagaatcttaatagtcacatgaagaaggcacagttaatttagttaccctttttgtttatttcaagacagggtcttgcacagtgtctcaggctgtcctcaaacgctctacaactctacagcatctggctgcctgtctcagccccctgagttctcatattacaggcagcaggtgctggtcttgacaactttgctattaaaatgtttcagttatctttgtttgtttggtgttttggtttttctggtttttcaagacagggtttctctgtgtagccctggctgtcctggagctcactttgtagaccaggctggccttgaactcagaaatccacctgtctctgcctcccgagtgctgggattaaaggcatgcgccaccacgcccagcttcagttatcttttatagtcattgtaatctgtaaaattctgttagagagataaatatgcataaatgcattgagcctttgagagttctgacatgggatagttgattgagaattaatcatctgagagatcatttcctaacaccttgtgtttggaaaaatacagatgtcttcttgagaggttcaggtggtgtgcgtcccagcagtctaggtgcaggaaatgctttctgcagtcatgagcttgacatctgtgtgtgactcagtggctaatgatggatcggtgtcttgcaagagttagtgattttaaactgtaagttgctgttggctaatggtgtggtggaaggcttaggatgcattcctgggatgctggccattcctgggatgtcgctgacatagaagaagaacgtcaccaatatttggtgtgtgtaattgcattggtcaggcatattcattatgagcaagtgaaaactggcataggacgtcaccactgtgcgaacctcgtcaccacagctcactaaaggcaagactatttgggttctacagtcctcgtccttaagggctcagtcacttagcaaatgtcccatagaaatttattttttgataacctactagttagcatctcagaagagattttattttcatgagccaggtggtgtatgcttttaatcccagcattcttctggaaggcagaagcagatgaaactctgagcttgaagccaacctgcctatagagccgagttccaggacagccagtgctacagagagaaaccctgtctcaaaaaagaaagaatgaaattctatttggataacagggaggataacacagggattgctattcaaggttatgtgattgccgcccttacattggtttatctgtttagcaaatatttttctgaccatctcctgtttatttggcatggcttctttaagtttgaagtgttttaaaaactctaggtgcaaaacaaaactctcatgaaggctgtttaaagtttgtctgagcgttatcgagtcttgcaactgtctcttagggccctggcagtttcctttgttattctgtggtctctgaaatagcgacttttgcttttgttaaaactatgagagtcaacacttgaaagggaatcagatcttcctttatataagctgtttataagagtttattctccacgaatgaggcattgtgcattgtttatacagctatgattggggcttttaccaaaaactcccagcatatgagctgttggttttaagagttcgagttggtagaaatatcactcctgaagcttaagaggagtttcacttcagccctttgttttgaagctgggagtttttatgaagtcactcggattttgaatctccaaatgtcagggtgttggtgatcttcaagtccaggctttacgctctgtagttctccatttctttgtagaattgtgcaggctcgcccctacagggtcagggagtgttagttatatttcatgtggtcagccttttattttatttttaactttatatccttctgatttttctatttttgtttaaagtaatttcttttaagaattggtattgttcagatagttcaagtctttttttttttttttttttggcacaagaaatttatagtgtgactgcttccatattttaccatttcctgagctgtccttttctttgttgtcctttgtagtttgaggaaaccattgtatagaagacacacgtgtacacacacacacacacacacacacacacacacacagcaaactctttgctaatatgttttattagaggtctcagagttttaaatctgaatgttgctttatagcctatccagtttattatgagtgtctaccattgttgtagagtttgagtagtagcccatttgatttttggcccttgtggaaggtctgtggctgatagtggtggggagggtcttagtgagattgttgaaagcctctgctgtcaagttagtttgtacttttgcttctgtataaatgtctgctttctacttcctgtttttgtgttacctatagaacttaattgggtagacaagatggccaaaactttcccactagagggaaaaggtcagctagtccagtttaggcttgaataaacagtgttactttcacaccaagagataactgtgccattcaaacccatagaatttatgcagtgtgctatatagcatttcagtcacatgatatcttattttccataaattttccaaccatacagaacttggccttctcaaggcagtctgtatcactctagggcagctcatcttattagaaaattcatatagatgttgaactgaaatttgatttttttttaatgttctggtccagactgtgctcattgtacaaaactatccctcccacagagcagtctgttaatgtcctttaaaggagccaggaatggtggtgtacacctataatcctagcacatgagaggctgaggcagggggattgtgagtttgatgctaatctgagttataacctgagcctgacttaaaaaacaaaaacaaaacaaaaaaccccttagcttgccttaactattagttattagtagagaaattagacttcatagagcaattcctagaacagtaattgtaaaatacagtgttctttattttttatttgcaagtaagacacattttgtgttcatctctctcaatctacaggcagctgaaaaagttggatgaagatagtttaaccaagcagcccgaggaagtgtttgatgtcttagagaagcttggagaggggtgagtatagataaactacatctgacctgtgcgccccgccccagcagctgaaggatgtgaacttctcatggtgtgacactcaagcctgcgcaaaagaaagagcatcctgtgtcagcgtggctctaggttctgggggaagtgcatctgctacttgcagtgcctttgcagttttcactcttatcactaaacagacttggtgaactccaggcttgttaacaccacgtcacctgttgttttctcttacagaatctgtgatgcatatggtttttatatcatcaacaggaaacactgattaaattataattcagctagattttaggaaaccagccagaatggagacatacacctttaattttagcatttaggaggtagaagcaggcagatctttgagtttgaggcaggtctgttagcaggttccaggccagctacacagtgagaacctgactctcaaacaaaacataacaaaacaaaacaaaacaaacaacaaaaaaagttagactgtgtcagttttgtatgctgttctggaagtcaacatttctggtgtggctttgtgaaaaagagcaaatgaatgaagaactgtttgcatcttcttgagatccagcatcccagctgggaaccagtgggcttcttaacgtaccgatcgatgtctggtggaggttctgaaatgtgccaaagtgacactcagtaatagatgatgggctgtgaccgactttcactgacacagtaggacattatgtcagcgtttattacgcttctacatatcattgcaatttaattctgtggattcaatccttctgtaatgatcagtgcattaaaacgccagggataccttaagtgtgtaacttttgaatgcgtaataagttcatatgattcagagatggttgatgcggtatgtgaaatctgtctgtccagagtaatgactttgacttagactaatgactgacttgaccatatgcttttttccctttctcagtggtgctggggattgaactcagggccatgcgcaggcgaggcaagtgctctgccggagcaaagcctccccttgcctgactgttttgagagcttagcattagtcatgtttaacacagatctgtggtagtaacaagtgcagttctggattacatggaatagatcttcatggatttcctccttgttaaacacgcgagtcttcgactttctgttagttggaaaagtactctttgggatccatcggcaagtcgagcaggggaaggaaggaagagaacatgagtggtggtgcccttgacaagcccgtgatgactgtcagccgacggcttcagtaaaggtatgaggtggtggaagaagtcactctgtatttcttgcctgctatctgtagcattggcttgccattccgggtactctcctgaaggcagttagtccatgcgccttcactgaacagggttcacgagttatttttggaataggatataaacttgtagacataattgtatgtgtaactaattgggttttttcatttttaataaaagcatgttagagtaatgaagtcacgcagacccgggttaaaagtcttggtgtcctgttgattagtcatagcagatgaacttctatatcttggagcctcataacctttatctataaagtggggataataacagtgtctattatatggtgtcatggaagaactttatgaaataatagagaagtactgggtgcggtgcttgtcacgcactgagtgcttagtaagttacaactgttgtttctgagtgtattagctgaagcatttttcaaagctatcttagctctttaagtaccattaggtattcttagcaggagtattgctcggggtgcttaatttgggaaatatcatagttacagacagaaaatgtcagaaacaccatggtaggaagaacaacaagctaactaactgatttttttttaaattgtgtttagatatggatgtcttcagcaaagaacttgggaatttccctctgaagatcctttctcgtgctatcatctcgttgaacttttaactggcaccattaaacacttggatttttgtcatcctggtgtaatgaacctgagcaggtctcacagagccagcatgatcctgagggaggatcttacctgcgcttctccgctaacgcagatggtcctgcagggaaggcctgcggtttccactgacttgtggcttgttctcaaagtgagcgtgtgctgaagaaccacattgagttctggagctgtggtcatgctcttttgaagaaatcctgtgtctctggggcagggcagagtcacagcttgagctgagctgagctgagctgagctgagctgagtggctggaggctttagaacggagccgcgtctccttgcgattctgtcaagttttacactgtggctcctttaagattttcctttttctttcttcagtcttagagccacatgtatgttaggcatgtgctctgtcactgagctacataggaatatagcctttgttacgtttttattatcagatagtaacaaattgttcccatagtctcatggctaatgagtgttaaagcatggaatacttcggagagcttatctgtgaggaatgagagcagacttccagaagcagaaggcgtgggaaaaccgcagtacaagtgtgctgagggaaagagttctgtacccagcaaaactcactccagcctgagccgacatgaagagatccttgcacagatgctcagtttagtatttcaaagaggcctgtggatgtcagtaacagcacctgctaacagtggctaactacggaggcacgcactgacaggctaatatatcttccccaagtggacagttgacttgacaacggttggtctgggcagttcctacggtcacaaggtggttatgttagtttcaagtgtcactccctttgacaggatccaagcagggcggaaagtgacaagtgaaaatggacagccttgtttgcttgtcttacccaggaaaaaagtctcgagaattctagccatacgctggccagatctagttagattcatgctgctggttcattcaccaggaagagaaatggcacagcctatctagatttgtcctaattgagggttattttagcaaggaggagagggcactggttgggtcttccctgcttgctcaacagttgttttctgtgataaaacagtgtttgaagctccttggagcgactttattcctcttcaagtgtaaggaattcagatagattctttcatgtgctctgcattcatagatatttcttttcttttcttttctttttttttttggtttttcgagacagggtttctctgtgtagccctggctgtcctggaactcactctgtagaccaggctggccttgatcttacagagatctgccagcctcagtctcctgcgtgttgggattaaaggtgcctgccaccaccgcccagcatgtttgggaaatttaaaagatgattttttcatatcactgaatgctgcccggggtattaatgaaaaaatgtccataaggttctagcgtgtttcgagtgagcaccgtagctgtctggttagggggtttgcattttgttgttgtcatcttgtgaagaagacagttgaggcacaaggagccaacttaggttataataatgtgtatcagcagtggattgcagtctgccatcttctgattctaaacctcttgttcttgtagcacttagactgaatgaacatagaaccttgcttttgataagctttttggggaagatgaaacacgaggcaaaaagatttgaatgtgcactgttcatctgattctggcacgaaagagacttaggttttcatgagattccatgttgtatgccttgccgcacatgagaggactaaagacagagagactggtaatagagtggccatagaaaacacacatgtgtattgtgttgctgtgaagggaaaacgagcatcgcattcagactgcatggttcagatcatggcagcacttccacgagcgtgggtaattcatgcgattgtgccacacctggccttgcctctcggtgtcttatgaatgatctccttcccccaaacgcaggtcttatggcagcgtgtacaaggctattcataaagagactggccagattgttgcaatcaagcaagtgcccgtggaatcggacctgcaggagataatcaaggaaatctccatcatgcagcagtgtgacaggtaaagcctcgggtcctctgacagacagagctcggccagcctggcgcctacagactggagggcggggctgggaaccgcagggcatgttctttctgaaaaataggagaaagcatgtatgcttttgtagctagttcagtttccatttttgtatatttccttcatcagtcagaccttttagaggtctctcttacttcctattgcacatgtagctgagataattcaaatactttttagctccagaaaccatagcatagcaggttggtgtataaaaaagagaatatttgcttaggtaccgtttcttttttgccgttaagaatgattcgggtcaagagtccttaagtgttttatttttgaggaactaagatttgtcaagctctaagcaggaagttggccccaaagtcaaccacagaagagcacgtgatctgccctgaagttccatgacaacttgctggttgacggagcaggcctgggctctgctctgttagatgtacaagtacagtgacggactgtgccaggtcctggggtttggggtgtgggcgaggggccggggggagcatggtcagtcgctccgaggccagtctgggcagatgagtctgttacctcctgtcctcgtgttcctcaggcttcagcggtagactgggcagtgcatcttgttactttgcagcgacctcagagctccctgactttgaagtgcagctgctgctcatctgcctctgctttatttacttatttctctctttgtggttactgtctgtatggtgccttgtaccgcacaaactcctccaccccgccccacagctggatcggtggaattaagttagcaggttttcttcttagccacatgatgtacttactcgaactctctttagttggtgaatgggaactgtatctagacagagtatggaaatgcttctaactaaagatttgacttttaaagatttatatatttttactttttatgtgtatgcctgcatgtatgtatgaggcccacgtgtgggcctgaagcctgtggaggctaggagatggatggtatccaatcctctggaattgagttacggacagttgtgagctgccatgtgggtgctgggagctgggtcctctgcaagagcatcatgtgctaagaaatgatgtgtgaaggtctctgtgtcaaactgaattaaaaaaagacagggcagagtcattgtgtcctgggagttttgtctgtttgtttgtttctttgttttatttatttagttattttgtttttcgagacagggtttctctgtatagtcttggctgtcctggaactcactttgtagaccaggctggcctcaaactcagaaatccgcctgtctctgcctcccaagtgctgggattaaaggcgtgcgccaccaccgcccggctctttgttttatttttctgtcactgtcttttgagtaaagggagggtttaggggacctttgtctggcttactagaaaaagtggccggaggaagagtgtcagtaggtttcctctgttctctgggagttgacagcccaggcatgagcagtgcaggaaatgctagccggggcagtacaaggctgcacagatcttatcccaacactaaagtccgtgcctacagaggagagggagcagagcacccggattgggaaccgcaggctcacttacctgtgctttcacgaaatctcattttatgtgccctgtcttctttgccactggcacatgtcccaaggatgaaggggcgtttgcaatcaaaagtcaaggaagccaggatagttttagcttcttttgttgctctgcaacccagctttcaacagtagtccagctgttaatggcacaggtgtggagacagcgttcattttcctgagatgcttggcttctcacatatttcttacttggtgtctctcagcaaatttaagaccaggggtccagatttgatgctaagtagtcttctttctttatactatacagtgatgatcttgttactcccaattatatcatggctttggaaaaaaagagaaagaagaaagattactttacgtcactgttacggatcccttggtgtatctgtccctgtctcactgggcgtttgactgtgtttgctttgctggtttatagcttagcttcccctttcttacgctgtttgttgttttgtttttttttttaatttaaatttcatgtctgtgtatcacttgcatgcctggtgctagaagacaaaagaggacattaggtccctggaactagcattacagacagttatgagccaccatgtggggttgggaaccaaacccatgtcctctagaagatcagcaagtgcccttaacagctgatccatgtctctactcccaggatatattacactatgtattaaccattcctctaacatgttctgtggacttgtatttagtatgtggtaggctgttatttatttcttaggttccctcatgttggctgctcacctcatgtctcctttatcaggtctgtgttcatagctaattttttgagaatctgtgattcttttctaaagaaaagttatacacttagaaatactgttcccttggtttgaatctgcatattactcttagggaaagctatcgcttgtcttctcctcgagagattgcttttgttagtcctaactagaaataattcgtttttatgaaatgagaagttactttccatgcattgaacagaatgaattaaaatgtttgacgaacattccactgaattgtattgtgtctctttccagccctcacgtagtcaagtattatggcagctactttaagaacacagacctgtggattgttatggagtactgtggggctggttctgtatctgatatcattcggctacggaacaagacggtaagcttacctcctaggacggggctgagggagagcggtttctcccgcttcttctggccttttgtgcgtgtgtagaaacacacggagaaatgactgtcattttcccttttccttgggtctctgctctcttatactcacctcccccaacctcaaacgaggagaatctcagtgtggtctcttacctttgatccctctggctcagcccgagtgctaggtcccggggtcagccaccttgctcgattcccttctaaccacggcagctcgatactgacttgttccagtgggttttgcttatttcttattaggcgaaacagctgtcaaaccatggtttagggatgagttttcattcttttataaggatttcatggggaagagtaagtaaccaggagctgacagtgtagcccaggctggccgtggactcacactcctcctgtgtcattctccctaccatgcctggctgctctagagtgacttttaaaaatacttgatcttttaaaggttatatgatggcaatttctgaatctaatgatagcttaatactagcttattagtctacatgacttattttgctgtgtgttacataaaaaccatttagtgtgaccactgccagccacaaatgactagaagtattgtttcaatttgaagaaatatgaccacagaaagacataaaaagttggccgggcagtggtggcgcatgcctttaatcccagcacttgggaggcagaggcaggtgggtttctgagtttgaagtcagcctggtctatagagtgagttccaggacaaccaggtctacacagagaaactctgtctcgaaaaacaaacaaacaaacagacataaaagtttaatatttctcatgatagaaccaatcttcaaaaaaagagaaaaaagataacagtagactgatggtactgttgtgctaagtgacattgcccaggctgaaaccacagacactgcttgctctcttggcctgggtgtgttctgatgtggatctcagcctctcatgttttataagcgttgtctatgtgggggtggggagggtagatgccaggaaactagaatggggcccacatgaggcagtgaaattttgactttaagcagaaaattgccttacaattaaatctaagtagatggtagctatatttaaccctgaagtcatgatgggttggggatctgaccacctgtgagacatctgaagttcccgttctgttcctttgggagtcactgttgaggttcgcttgcagaacatttcccctgctgatcgttaatgctgagataacgtgctggtctttccactgcttcctccaagtttcatatttgtccttgttttgatgatttctctccttactagtcctcattcagcaatttcaagtcttagaataaaagtgaaagaaagtagtgccccaagtgcaggctgctccctctgatcctgggtccctgtgtgcacagcttactccccacaggctgctccctctgatcctgggtccctgtgtgcacagctcactcccaaatgtgacttggttgtcacacgggaactgtgtgagggtttgatgggatctgtttaggacttgagtctgctcagagatctgtgccagcctctagcctctagcactgagattctagagcaatttcatttaccacggctacaagagtaaacaataaaagccaggatttttttttttttttaaagatctattttatttacatgagtacactgtagctgtcttcggacataccagaagagggcatcagatcccattacagatggttgtgagccaccatttgtttgctgggaattgaacccaggacctctggaagaacagcccatgctcttaactgctgagccatctctccagcccaaaagccagtttttaatggagcatgtatctgtaacaaggaagactgcattgtatgttagattataacagagaatgacctaggcatggagaaggaaaggattctgctgttttgataagtgacatttgggcgaactgaggaaggcctgcagtacagatagatgtagggagggagagcctcaggtagatagaccaggcaggtgagaagagccaggggaccagagctcagggctcggagttcacagggaacagggaacgggaaggacagagcaaggttgaagcagctgtgtgtcacggagtttggatgtagcttttctcttttctcctatttgatgttaacaggcttgagacatcttactgttttttgtttttcagttaacagaagatgaaatagctacaatattacaatcaactcttaagggactagaataccttcattttatgagaaaaatacaccgagatatcaaggcgggaaatattttgctaaacacagaaggccatgcaaagcttgcagactttggagtcgcaggtcaacttacagtaagtggaagtggtgactggtaccagtactgtaggctgtgtcttgagaagccaattccaataagtgactttatgtgtgtgtgtgtgtgtgcgtgtgtgtgcgtgtgtgtgcgcatgcatgcatgcctgttgactcacgtgcacatttgtgtgctgtggaagccagagtttatgttgattgtggtagttgatctccaccttcctttctgagacactgtccttcactgactggtcattgattcagataggctgactggctggtgagctccaggagtccgtctgtgtctgcccaccagttaggggttacgggagcatgctatcgcatcctgcgttgtgtggagctggagaactgtactcagcttttcagggatacatggcaaatgccttactgaccgagacatcactccaaccactactttctcactttttaaaaatataatacttgctttaattgtgtcagtagaaatgtgtaggatttacgagtacattatctaagagctaataggagtctttgatcttttctgaaatccgggttccatgtttcagtcctcctatagaaatgaaaataccataagaaatgaaccttagtttaaatctgatacatcaggtacataaaagcttcattaagccagactgctttcctccagcaaggcagggactcctcctatctgcttccaagcagctcagctgctgcgctagaagcctcctgcctgcttcagtgttggctcttgattttcctcctgttcgccagtgcttgccagtgagaaagaaaactgttcaaaacggaggtggagggtgggggtggcatgggaagtggatgggtagggggttgggaattgggggtggggtggtgaatgtgaaagtctatgtaggaaaatggaaacagttctacaattaagccaaccagtttcccgggcagtacagggaaaactgggtctcaccctccccacgccccttttctccccagctacagatcttttgttttattttgtttggagacaaggtttcactctagccctggctggtctagaactctgaatgtagaccaccaggctggccttgatagaaatctgcctcccaagtgctgggactaaaggccggtgccaccatgcctatgactttttaacttgaggcaacgttcagtttcttgtttctttggccgcttatacttctggtgctttatgtaactaagaaactatgacatggtgcgagatcttttatgtgtttagtggtctcagatccaacatttgctttgagatctgagttcattttcatgccctgaggtcggtaccccagaagagggcatcagatcccattacagatggttgtgagccaccatgtgggtgctgggaattgaactcaggacctttggaagagcagggacatatgtcatcatcgtgctgctgccccactgttaccttttacgctggttggatgcgagccctttcactttgttcccatccttcaagcttggtgtggctcttggggatcctgcgtttcccctgaggtttggattactgggttagttttgcaaagagatggttggcattttggtagacactgcattgagtcgtgggtcagccttgaagtatcaccatgttaggattcagccctgtaagcagtgggcccaagacgatttttcatttacttagatcttttatttttcaccgatgttatattggttgcacaatccatattttgcattagtgtggttagtttattctttagtggttcctttttggtactgttttaagtagaacacaggtttcacattgttcattgttagtgtgccggagtatggttgagttgcatgtactgtgtcctacagtgtcactgagcttgttgtttattgctagttttcatttttaaaaagtgcatgtgtgtgggctggagagatggctcagcagttaagagcactgactactcttccagaggtcctaagttcaaatcccagcaaccacatggtggctcacaactacctgtaatgagatctgatgccctcttctggtgtgtctgaagacagctacagtataataatataataaatttgtaaaaaaaacttgataaaaagtgtgtgagagtatgtgtgtgtgtgtgggggggttgtagtgtggatgtctatgctgtggtgaggtatgcatgtggggttccaccgtgtttgatgtttgagagagggtattttgtttttcatggtgcagattccacaagttctcctgtagtcacctcccatctcctaggaggaatgtaggatttcagatgggctttttttgttgttgttaaaatatttgtttatttatttattatatgtaagtacactgtagctgtcttcagacactccagaagagagcatcagattcgttacggatggttgtgagccaccatgtggttgctgggatttgaactcaggacctttggaagagcagtcgatgctcttaaccactgtgccatatcaccaaccctgcagatgggctttcaagcctgtctttcactgagttagatgccagcattctagatgtcagatccatgtggggttggaattacagatacctgatgtggacacctgatggggatgttgggaaccaaatgcaggtgctgtgacagagtaagaagtgctgtgtgtcactgagcactcctctagccgtccttactgtatagacatttctttatttttgggagaggattttgcagtatagctttagctggcttggaactcctagtccccttgcttcagcctcctgaaggctgggatacgaggcctttgccaagatgcctgctttctaaacccttctgtagagtctttgaagccagcattgctgttctgatgtccacttgtagcatctgatcatgccagccgcctctaagccgtttggaaggctttgggttgcagttaggttgttccttagttttcccagtgactgcctcaggactcattccactgttcagctgccatctgcttcccagcttacagaattttctggctctgctttgcatttttagatggtttgggcaagaagtgacaataagatgtgtttgtccagtctgtcatcttttagcagaaatctgcaattagtttctttttctgttttggagacggtcttctgtagcccaggctggtgttagactccatccctctgcctcagccccctgggttagcagcacacggctatctgtgagactcagtgtgtgatgcagcttgggtttcatgtgtgagtgtgctgttgcacactgggtgctcactgaccttgctgtttaagttcctacagccacagtgtggtggggatgtgtggtaagcgtcaggagctggagtttttagtgcgtatttgatttttgtccttaggataattggccccccccccaaaaaaaaaaacaaaacaaaaaaccctttaactttcaaaagacaagttcttactgtgtagccctctctggcctctgtaaaccaggctgacctcaaactcagaggccctgcttctgcctcccgggtgcagagtgtgtgcctcatcactctgggttccttccctcccttttaggcacagcctcatcctgtagccaaggctggcctggaattccctgtgtagcttggtcttgaagcctccgtctgtcagggctgcttagagtacaagagtgaactaaggaccggctgggcaggcttagattcatattctatccccatctcagattcatgtttattcattcattctgtctgtctgtctgtctgtctgtctgtctgtctctctctctctctctctcacatacatcacacacacacacacacacccctctcaaatttgtattttaaagttttatttttgtgtgttgggtgcagtgcctttggaaagccagaagagggtgttggatcttttggagctggagttataggtggttgggagccacatggttgttgggagccaaattcaggtcctccagaagactagggagtgttcctaaccactgagctggccggcctgcttgtcctttagtttctaaagttttttttttttttaaggaaaatcaatatctgtctccatctctctctggatttttatctttggtgttctgttccagcaccatataccagttcatctatacttcagtattcttctgggctttgttttctatatttgagagttaccttatttgaacttattttggtaaaagtattagatagaattttttttaaagatttgtttattattatacataagtacactgtagctgtctttagaaacaccagaagtgggcgtcagatctcattacagatggttgtgagccaccatgtggttcggggatttgaactcaggaccttcggaagagcagtcagtgctcttacccactgagccatctcaccagccctagatggaatttaagtttagagttttatacatgactacctaggttttagtttgtttctgttcctcttcctcctcttcctcctcctctttttcttcctcttcctcctcttcctcctcctcttcctcctccactgagatagggtatcattacatagtactggctggtctagaactttgatatagaccaggtggccttgaactcagagagatctgcctgcctctagctccaaatgctggggttaaaggtttgtgccaccacccttggccagtgctttgtagtttggggatattctgtccttctcacactggtttgaaagcatgttaaattgtctgtgtggcatagagagctgacgggcttttgattgtgtgcgtatatagttatatgagccagtttttgggtttaacgctttctgttgctctgttgtacttaataactctgtaactaattggagtttaggatacacaggttacataattctcaaaacactttcctttatgtagctatccacttctggtttaaataatctagtaaaaataactctgggtatcaccatttgaaaacatgctggcaagtttgaggtttctgctaaggaaatgattaagcccaagttgtttcctttgttgttgttgttttaaatttggtggacagtgtgaggttagcttagaagtgccatctgtcattgctcctaactgacataacctaagtcacaggcacttcaggagtatgggaatagggatgggagacttgtctgtatctttgctgggtttggaagtcctctccctaactgtgcatcagttgtagcaagattctgggaaagcgtttacctgcttattagtgtagtaagtgccatatacccttcttcaaaccacaggggaaccttgggaccattttttatatctcagctttaagacgatttttctaattgcacatataaaccaagggagtgttaccgagtgtaagaaggaaaacatctgagtagctctgccctctagctgtgaccgttcctaacagtgcttatcactccaggctgctcttgtgcggccctggcgtttctgttgactgggtgttgcattctcttgactgttgttttgttttcacagaaataaagctgtattcttcaatattttgtaaactatttcttttggtgttgcaatagcttacacgttttccatacctgttttcatttgaaatagaggtttgctatttagttctgtctatcctcaaaattaagagccttttgctgtgtctctcgtgtgtgggctgtaggtgaatgttcactctgcctgcctcttgagagaatttttaacatggtatttcagtatatacgtatgtattgtaatatttatttttctttttgagcagggtcttactaggtattcctggctggcctggaacttgctatgtagatcagaatggcctagaaagcatgcacaaagatctgtttgcctctgccgccttggatgctgagattaaaggctggtcttacttatttatgattttgagactaggtttcattctaggttccctgccattctggaactcactgtgcagtccaggctggccttgaattctctgagatcttcttacctcagctccctgaggactcagattacaagtgttaggcacctgtgtggtgatttcttaaaaaattatttttattattgttatgtaactcaggttaggtgcttaattattgagacagagtaccgcagcattgtcttgatcttgagctatgttgttcaggtggcctttggagtagctgaggtagaggtgtccctggcttggtagtcacttgaacattctacttttgtgtgtatggtttagggtactcacatgtaaggtaaatgtctagaaagatacttggttagagagatatagatattttaaaaaagtttactaaatattgccagttggtgaggttgtactttctcatactccagtgatcagatgtttcatgtatgttttttattagtactagtttaaatttaaaaaattttaataactgtattttaataattgaaaatctttatggttcttggccatttgactttctttttttttttttttttttttaagatttgtttatttatttatttattttatatgtatgagtacacggtaactgtcttcagacacaccagaagagggcatcagattccattatagatggttgtgagccatcatgtggttgctgggaattgaactcaggacctctggaagagcagtcagtgctctcaaccgctgagccatctctccagcccgccatttgactttctttagtgactcatctgattatgcctcgagtattgtttctagataaaggcactgttttttttaaatgtttttatttattccttgagaattttatacagtatattctaatcatatttttcccctttccaggttctcccacagctcccacccacccacccactacatggggtttgttgttgttgttagttatttaatttttttggttttgcttttgtttctgttaagaaccagggagtccagcttgcattggccagctcctccagagcctgaggcccaccctggagtcgggatgttgttctcagtgacactgttgaaggaaacagactttccttctcccagcagccatcaattgcaaatggcttcttggctgggggtgggacattgtcccaactttctgcatgttgtccagttgtggtgggtctctgttacttgcagaaacttctctggtaatggttgatctacgggtgtagcaatgtgtcatgaggagttttatttatttattttaaagatttatttattatttattttatgtatgtgagtacactgaagctgtacagatggttgtgagccatcatgtggttgttggaaattgaattttaggacctcgctccctccggtcagccctgctcactctggcccaaaaatttatttattattatccataagtacactgtagctgtcttagagacgcaacagaagagagcatcagatctcattatggatggttgtgagccaccatgtggttgctgggaatagaacactggaccttcgggagagcagtcagtgctcttacccgctgagccatctcgccagcccgaggagttgttttattgctgtgtcatttagcagaataaaagaagcaagtgtcccttagggctgatgacctagttagtctcagatccttggactcattgacagcataagtaatgggctccatcctatggagggagccttaatgaaatctaagcaaaaattaaccggttagtctcaaacatccgcgccaccttttaccacttggtgtgaacacagcagtttttaattgttcaaactgttcccttttctcagtagttttcatgctttgtgttggtctctcccctttcccttttaggataccatggcaaagaggaatacagtaatagggaccccgttttggatggctcctgaagttattcaggaaattgggtacaactgtgtggcagacatctggtctctgggaataactgccatagaaatggctgaaggaaagcccccatatgctgatatccatccaatgagggtaaggatgcagagagcccgtggggggttagctgctggttagcagtagaaagtggtgtggcagcttccttggttacattctaaacaagaaatgaagtaattttctataatgataaatactgtaggtgttattcttcccctggcattagatgtcgtaaaaaaataattgaatatggtcctttcttcattctagagtgtctgcttgaccgtctccctgaaggatataggctgtaaaatacagaaatatataggctgacttacaaattatatacaatatgtatatatatcttttaaaagttaaggaaccacatttttagctttgtaaatatatgggctttctacttagtcattttctgtgatttccattgggtcaccagtgtcagacagtgttttcttcaggttgtttttgcacttacatcactaaccaccattttggttcatatattatctttttcatgctttttttggtttgtgaatcctcagactcagaggcaaaggctagtctatagaacgagttccagggtagataagattacacagagaaaccctgttcttagactccccctccccccacccaaaaagaatttaaagtatttannnnnnnnnnnnnnnnnnnntatggagggagccttaatgaaatctaagcaaaaattaaccggttagtctcaaacatccgcgccaccttttaccacttggtgtgaacacagcagtttttaattgttcaaactgttcccttttctcagtagttttcatgctttgtgttggtctctcccctttcccttttaggataccatggcaaagaggaatacagtaatagggaccccgttttggatggctcctgaagttattcaggaaattgggtacaactgtgtggcagacatctggtctctgggaataactgccatagaaatggctgaaggaaagcccccatatgctgatatccatccaatgagggtaaggatgcagagagcccgtggggggttagctgctggttagcagtagaaagtggtgtggcagcttccttggttacattctaaacaagaaatgaagtaattttctataatgataaatactgtaggtgttattcttcccctggcattagatgtcgtaaaaaaataattgagggctggtgagatggctcagtgggtaagagcacccgactgctcttccaaaggtccggagttcaaatcccagcaaccacatggtggctcacaaccatctgtaacaagatctgactccctcttctggagtgtctgaagacagctacagtgtacttacatataataaataaataaatctttaaaaaaaaaaaataattgaatatggtcctttcttcattctagagtgtctgcttgaccgtctccctgaaggatataggctgtaaaatacagaaatgtataggctgacttacaaattatatacaatatgtatatatatcttttaaaagttaaggaaccacatttttagctttgtaaatatatgggctttctacttagtcattttctgtgatttccattgggtcaccagtgtcagacagtgttttcttcaggttgtttttgcacttacatcactaaccaccattttggttcatatattatctttttcatgctttttttggtttgtgaatcctcagactcagaggcaaaggctagtctatagaacgagttccagggtagataagattacacagagaaaccctgtcttagactccccctcccccacccaaaaagaatttaaagtatttaatgtgaaacagtttcgtttttcataaaatgggatttacatcatttaaaatccagcaattaagagttttttaaagaaagatttattattttaaatgtgtgctaccttggaggccagaagagggtgtcagatctcctgaagctggagttacaagcggtgtaaactgcccgacaggaatgctgggaaccaaactcaggtcctctgcaagaccactgtgtgatagtaactgtgagcactctccagccctaatacgggataaccttgatctttgagaaggagaatttaaatgtgcttgattttatagcagcctatagtagctagataattttgttttttttcagagagataattaagcatatggaaaaaagcttagtagcagagctcctgcttggcatccacaggcccagtgttttaatccttagtgccacagtctcttcagcctacacacatacacacacacacacacacacacacacgcgaaaggattctcttttttttgacactgtatggtttagaatacctgcatgtgagcaaggggaaggggaacagttgttagacctctgatcagttgtgaggtcgctgaacagttgtgaggtcgctgaacaggtgtttgttaggcctctggttgctgtactccatgtagacatgctttgtgtttagatatataaaatcattttaccaagcaaatgtaggtgtttgtattgaagtgtctgtcatctttcttttacctgatctttttcttttttttttttaaactaggcaatattcatgattcctacaaaccctcctcccacattccgtaagccagagctgtggtcagacaacttcatggattttgtgaagcagtgtctggtaaaaagcccggagcagagagccacagccactcagctcctacaggtacacaccgccgcgtctccacgccgctcacacactgctgagtcgcttgcttggaagtagtaatgaggagtaagacattctgcgctgtctgtgagagaggtttaaagctggtgagatggaaggccatagacaatacttaacttgcaaaacagagcagtgatggaaggaagtgcgtcacccgtgagtttggactgaagagcagtaagaagctcagaaacacttctgtcaccaggcagaggagtgggtgggagtagctccagactagattcaagcggtgtgtgcttgtctggtaagcctgggaagaagtggtcttagtgccagtgcagagcacaaggccatgagctactcttgctaacggccttgctcgtctaagtgtattaccgaatgcggctggaggagaggatgccagaggcttatgaaggagtcttctgctctgcagcctctcatgtgctgaggctccctttcagtctgagagtgcttccaaaggcttggcaagcggcacttacccaggtgctgatgggggcagggatgtactgtccctgcaaggaggaaacatgggtgctctcagaataagtctggatatataggtaactcctgcaaagattcctagatgtaactaccagggattgttgttgctccacataaggtgagtcgggtaaaatgtcttggagggtaaaggtgcccgcctcaggcctgcaacctgaatttagacactgggactgaggtagtggagatggactctctcagtaaaataaagacaaaagaccctctagatgagacagagagaaatggcacgggtccaaatggtcatctgtcttcttagagtcgtgaagtaagcgtggctttgtgccccaggtttgaagagaaaaattagacccactgatttatatgacagatactgccaggtttttattacgtgccatgtactattttaaagtaaatattgtggccgggcagtggtggcagtggtggcctttaatcccagcactcaggaggcaggtggatctctacgttcaggaccagcagagggagttccaggacagccagggctacacagagaaaccctgtgcccagaaaccaaagcaaaccgtgtccattgttgtccactttgttatttaagcacccgtttgttaagagtgccaaaggagtgtcaatattgcgagacttaattaacgaagccatggatgtgaaactgaagcgccaggaagcccagcagcgggaagtggaccaggacgacgaggagaactcagtgagtggctgctctctgctgggtcaggggtgtgtacttcttaggtctcgcttgccacagaggtcagctgagtagctggtgtagtcagctctttgttgagtgcggatggatctcattcagtgctgctgggctccgctgccggggctatgcttgctctttgctcagtgtttccttaaaacacattttgttatttcccctgtatcatttatccagattatctatttatttaagagacagtgagagacagagacatcccctagttttgagactttgtttatccaagctcttctaaaattctcatagtgtattctggagtcacctgcaccgttgagattcaagggtgcttttggccagatctgtgctggaagtcaagagagaagggaggaggaggaggctccattagatgagatacgcaggtgtcacatgggtcacttggtgaccatctctggttaaacaggtgcttttcagcttctaaggtgggaacacaacgtacagaggtgtcagatccaggtctgtttgcaccgagagtaaccgtgactcaggacgttcagttagctccagtttgagattctgctccttcgcaggaggaggatgaaatggattccggcacgatggttcgagctgccggtgatgagatgggcactgtccgagtagccagcacgatgagcggaggagccaatactatgattgagcacggtgacacgttgccgtcccagctgggcaccatggtgatcaacacggaggacgaggaagaggaaggaaccatgaaaagtgaggctctggggagacactaactgatccagtgtcagggtctcgcagcccctgctgtctgagttgtgggtctgctgttgtgttgtcctagctacgtcccttagagggagagaggcgctcagtaggagggctgtgaggagcaggcggcaggggaggaagaatgctggcagtaggctgggagcttcgtctgaatgctctcattgagggttctcctggagcaggccatacgtactctctgctgtgatgcagactttcagtgtattttcacgctagtgtctgtctggttagtcaaagctcactgacagccagtcagggataattgagcagatgcaaaagttctgttaagtcttcagaaaatctcttccttttcctctccctctttccttgtctcccctccctgccatgtttctctgacccctcctttccttcctcccttcactctccctttctttctttgctggttattaagtccctgagcctcaccagtaagcactaggtaagcactgcaccagtgagccccgcccccaaccggtgctcctgctgctggagactgatgctttttatgttgcccagcctcacctctcacttctgggctcaagctgttgcctgtggtcagagtctaggcctggtgtttccaggttttgtcattgttttgaggaaagaaagttatgtgcagagtagcaagaccattttatttaggcaacgcgcaggtcagaatacaatgcaagagagcagtaggccgcagggaggtgcagtcactgcccgaggcttctttttgtgagtctagtggagggagggactggtttcttttttttggggggggggggtttcgagacagggtttctctgtgtagccctggctgtcctagagctcactttgtagaccaggctggcctcgaactcagaaatccgcctgcctctgcctcccaagtgctgggactaaaggtgtgcgccaccacacctggcgagagactggtttctaagagaagtagttgggtggttctctctgttgcttgatagattagtttatctgatcacttcctcctctgtatgtgtctctttctctaatgacacatcaggtggttccctagcctcaggctccagtcttccacatcaggtgtgtgccacagacctgggttcttcccctctttcctggctggcctgtgactcgctccattcctcgagttggcttagagtcccacactctgctctttactgatcgcctttcctctcgacctgaggtacaggccatgtcacagagggaacagttggaggatacaaaatagtaacggaggtatagaggttcaggttagcctgaactttgcatacgttgaaaggcctgagtttccttggtcatcaggttttttttttcaccccccttaactacctacccccccacccccatgctagggatcaaatcatggcttcatgtgtgccagtctactgctgagctgtacctataatatttatggcttttcttctaatccagggatcagcaaaccagtgtctcggccaagctagactgccacctactttgggcagtaaggctcaactggaacctagccataaaccattcctttgttgcttttggctgcctctgtactgaaaaggctgagttgagtacctgttaaaaactgttgcctcaaaggcctaaattatctgctgtctgttccttcacagacagaaagtttgttgtctggcagaacacttgactagcatgtgtgaggggctgggtttcatcccagggagaggacacagctaaagggaagggaaaaaaggtgatcaaggagccctggggctttaaacctaaacatagggtctggaagggccatcagtggctggctgcagctcggagaggctgagaacctgtgagctgctcaatccacaacactggatatcttcagcagtctcagtctggctctaagggcctggaacattcccagagagtcacttgactttagtccatgatagaagaccaagaatctggagtctaatgccagcgatggatggcagtgataatagctgtagcagcaacaggaatgggtgtgccagcaaggagcagagtcaggctggcatgcaagacttgttctttttgcctcagagccctctgtatctgggctgtctgtcagatggtgccatccactctcagagagacttctctcagtcggccctttttgtaaatgcccatacagactgacctcagttgtatctctgacttggtcccaggtgccatcaagtgcagggaaggacatgagttctaatattggtgtaggcccagggtgttgccaaagtatagtaaaagggaatttaacgtgtccctggggctccctacagaaacgtagcaagcttggcagcacgtaggaaggtagagatactcctgaggaggggcttctgtgtctgcagacattggcagggcagtgttctcatgggtctctactcttcaccttggagatggaaatcattccctttgttttgggattcagattaattatctctgagactgaaaagaatggtaatgttacattggtagattaacaaattgataaaacttctggagtgcattctttatcagcatttaaaaaattcagatctgggcttgagagatggccccacagttaagaacattgcccttcttccagaggacctgagttcagttcccagtgactcatgaccacttgtaactccaggctcacaggatccagtgccctcttgagactttgaagacacttcctctcacacatgaagagactccttgctgtatacacataattaaaaacaaccccccaaagaaaagatcaaacctgtgacctggtaaattcctttattaggaactaggcccaaggaaataattaaagataaaatttatgaattttcccagacatgctagtgtagactattgcatatataaaaatattaggtacagtccagccttagctgaaatctgaaggggaattgacattaactagtcattacttgtgtaaaaacacattggtcattcttgctgtttgtagactatgttcagggttctctaaaggaactcctggtcttagtggtgaagataaaatgcccttgtgagttgtcagcattgaacttgttgtgctcccactgtgccagcagagggagctccgcgataggatatggattgaaattgcgttcccattcaaattcaccgacaccctttccatgatagcatttattttggatcaagactattatttatttatacttaagattttattttattttattttattttattttattttattttattttattttattttatgtgtttgagtgttttgtccatatgtatgtctaagcacacacgtggctcgtgcctgcagggaccaaaagaggttattgaatctctttgaaccagagttaccgtgagctgtaggtactgagagttggacctcggtcctcaagaagagcaaccggtgctgttaactgctgttagccctcacctttaaggctgtcttgagttaccgcagcaacactggggcatggccttcatatcgtttagtgaggaggttggatacttggcagagctgaagcacttcagcacagcctcttcgtctcaggtttagtagactttagttggaattggttttgtcgatcctgagcacagtgccacacatagctttttaagtgtcaccagttaaggggtcccaaccaaacagtgggatagcacttcaaaacaaaacaactcacaaacagaactgatatggggaaagctacaatatgtagacaaacaagtgttaaagatactttataaccatcattgcctgatatatcccgattttggttttggaagtgcagggacgggaaccctgggcttcctgcctggccgtgtgcactactgagctgcatggcccctcactttaatcttgcgtgttttatacaggaaggataatcggaatagccttttactgatctgcagaaccgctgtggattgtaggtatcgacccttttggtttgtgcattgcggttatttggccctagcttgtgacttgtgcccgactgttgcagtcattcctagcagccggccttctcctgatgtcacactgttccagggtttcttatacagtatcatttttgtgttcttcaagaaattttgctgggtggtgatggtgcacccctttaatcccagtactagagaggcagaggcaggttggtctctgagttcaaggacatcctggtctacagaacagtttccaggacaggcagggttacatagaacgacactgtcttgaaaaagaaaaagaaaaaaagaaaaaagaagtttctttttacctacacaccttgaaagagtaaatgtttaaagagttgtaaagtcttactgcccacagatgttctttaatatatcatgaatttcttgttctttgtattatgaactgtagtcacattcagctgtacggtccagtcacctttgcatggattccgtgaccattattctaaaatagattccttgccctccttccccttttttttccaatagagattgctatttgaatttctttacaatgatctcgtatcagtttcaggatcagtgaagccaattttgcgttataccactgggattttacttgattgctttgaatacatagttctgtcagcaaacacggttccatggtttacccagcatatctctagaaaactgagtttattcacaggcatgctctatatctctgtgtgtgcatgtgtgtgtgtgtgtgtgtgcatgtgtgtgtgtgtgtgcatttgtctgtctgtctgtctgtgtttttgttggggagatcctagataggatttctctctatagccctggagcttgctctgtagaccagcctggcctcaaactcacagagatccccctgcctctgcctcctgagtgctgggattaaaggcgtgcgccactgcctggcatctctatcttgatgaggtctttttatatagctcaaactggtgtcaacttctgatccctcttcctcaacttcatgagcactgcagctacaagcacccttagcatgtgtgtctgtgtacacgtgtgtgctcatgtgtaggtcagaggtcaaccttgggtgttattcctcaggggttgttcaacttgattgttttaatttgttttaaaaaatattttctttttagtatttaaaattgtgtgtccatgcgtgagtatgtacacttgagtgcagacacctcaggaagcttgtaacttgtatcccctggagctggggctccaggtgcttggaagtcacttgatacaagtgctaggaaccaagagaatcctcagacgagcagggcacactcttcactggctgggctgtccctccagccttcatcttggttttaggaccagttccaagtcttttgtttttatgttggctttggttcttgttgtacttttatggctgttgcgttgatgttttcagtggattgttgtactcatctcctatgagactcctaatctgtaagttccctttttattttttatgaagaagatcttgtctctggattatgacctcagtgttgcccctgtgatccatagacccttttttttctggttcactcagatctctactacagtttgaatagtggtgcctgttcttgtcctgttcacctcagggaaagtccctctagcatcttaatcctgagtctgattgcagccgaatcagcagtccttccttaggctagagagtctgactgtagccttagagagtctgactgtagctttagagagtctgactgtagcttagactgtagcctggtgtcagttagaactggcggcagtttaccatcttgcggtttgatttttcttgcttactagtctgactacccgtagctttccccttagctctgcagcttcactccaccgtcagtgtggtacatgcgctctttgttttctttccgcccaccctctggcgccaggccttgaatgcagggaccaggccttttgcatggagctgcatacaagctctgatattggaagcgtcttatttattagaaacaggattttgattactgtgtatcgcttccagcctggaagttgctgtgtataccagactggcctcaaattcaaaattcccccgcctctgtttcctgtattctggaagtacaggcatgttaattattcagaagaacttttttcaaaactaagtgtgtgaaattttaaaacccggtatgtgctagagagttgtttaaagagcgaggccgaggtggtaacagttcttgggtacttttgaggcatttgtggcttggcatgtttgttgtgaatttttgtcaaaagagtctttgtgttttcttcttttgaaaatatttaaacactctgcatgtgccacagacccacgctgtggaaagtagaggacaacttttgtgggttctgagaattgactcaggtccacaggcttgggtagccagtactttacccaggggccacctaaccaacctaagaatgcttggtttctagttgtttagtacaggaatttatatctagtaaacttaatgtgccaattgcctttaaattggctattttctaccaatttttgatacttgggttttcagagacaaacccagcaaaatatggaaggaaggaagtgggcttgtttgcacaagttgtaccttagcagtccttccctgaggaggggctgacagtcagcggttctgatggtgagcagacacctatctgctgaagcctcgatgccagccggctgctctccctctcagtgcttgcggcatgtccaggagcgcatcagctggcccctcctccttcccaggcttgctgcctgcacaggtggggggcgcaatagcttttgcagtgttctcgtccttgactcgggcctttccagttaggccctgtgacctgaggcgagtgagatgatttctttttaggatctgcactgaattcccagcgttctaatgtgctccttagagtagtagccacactaatctgtttgcagtagaactttaaagcatgacggcatagttaagattgggaagctctgtgactgaggccgtctactgttgctctgtttcctcctttaagaccacagtccaggctcttactgaaaagacttcacactgtctgtcagatatgcattcatcagagcagtgtgagagggaagttcttcattcactctcagcctgcagctgtctgcagggtgcagttaatacacggtccacatgctgacttcgtcagtctcggatgtaggggatagtgtttgcaagcatggttctgagggtgtaagcgctgtgcactcctcttacaacagcagccttgttgtccagtttctggttgcttcaaagttcaccagagagcactcggtgcttcctatacttgccactctgaattgacactataggaaggttctcgatagaatagggctgtttcctgccccagagcgaaaagctacaacagttaattttgttgcagttgtcttgctgaaggaaggcaagagtagaaagaaaaatactggaaagattttgggaatcagtctttggcctggagtgtatttctgggtctgataggggaagtctccttagggaggttattccccctttgaccttcaggttttatgttttgttttgtcaaactaataaaatacatataaaatacgtagtgtctaaatgctcaaaaatgaaagcattataatcattcattcattcattcagagagagagagagagttaaattccctagcaataagatgatagctattttaagaaccagttaaacagctcagtatacaagatggcagatttaaagaaggccagactttggatccctttaagccttcttttataaggcttcaaactctttatcttaacactatggcatttattaccgactgcctttatgtccgtccctgaaaggtaatctccgtggtggactgcattttatgagaaggtccctcttgggtgagctttacaatggaaaagcagacttgctgcttaaactttttctcgcactttcacaaatagctcaaggtcatccttccagaagggagactgattccacagttgtgcagtctgtcttattgtctccacatgttgggcttttatctttagaagccattaacattcttgatttctttggaatgagccaaaaagcaaggagcttggggcctgaatattcattcaaggagcccagccagaccacagactgggatgtgagagtaccagatctccgtgtgacctgggggacggctcaaggcctgtgctgtttggaatgtaaggccctccagtgtggtcatgtcagtcaaaggagaggcaagagtagccatgaggcctctgtttcccagaggacagtggtgcagcggcaggagaagaaaggcgtgagtccagtgaagctctggctaagggcggagagccaggcaggtcagcttcgtccatccgtgctccaactccagagccctcagctcctctgagctactgacttttgcttagagaggaatggagacgcactctctaatactaatttaaatggatctatgaggaaaagaagttgattttctgtaggtatgtctactctaagaaatgttaattttagtatttgttaaaaacaactactcagtacaatccctgagatatttcctaggatgtactatgtgtcacagctgtgtaatggacagggacttaagggaaacatttactgctgacaagaaccttacaggttaaacacgtacgatggtgtctcgttcctgtccagtgctgtatgtacacgctccactgtctagtccttgtatgagtagaacataccctagatcatggcctttggtagtgatttgattagctgtgaagataacaaagcacttgatgaaagcccagtgagttacagaaaaagactaacaagcccgtgagaaggattgtaaagcgtcagaaaggtaggcagggtgtgttgaatattaaaattggctaagtcagcttctaaatggaatcaagtgcccagataagaggttttaacttgatattgttgttaagagggtgtgccaagaccctctggccaggaaagttgacccagtctcaggagactgatgcagtatcaagggatgggtcatccttattggtgaaggttgcatctttttggatggctctctccagtgctttagttgggagcccttgaaaatgttgagctagagttctcttgtaatccatatgcaactcattagcattaagatggctgtgagccactgtctagaaagcaagtcagttcctacagatgcagttgccctgttaccaggaagagagtttttctgagctcgagggcatcttacaaccctcagttcttagtggtttcaagaacatccaaacatttgtggtcatatagacttggataatgacttatgtaaatgagtgaccagatacatctgctccttaacaaaaacaaacccagaaaccaaatctacaaaacagaccctctgtgatgcatttgcatcatattatatagctcattgtttaaaacagagggaaacattgagatattgctggagtttttgttttgcaaatatttttgcatagagcccagaagaaattgtaggcttgtgcccacttcgatactttgaacagaattaattactacttggattaaaacaagttatattgagaattaagagaatgctaggttgacagttgtggttcagttagtgacagtttgaaaatgaatgtttgggatggaagagccatcagtttgagatctgatagatggacgtgtcgaaggagacgtgagctccagttgttggtcaagctcccttatagcatgcctgtcctgacgctattttatagttttcaggagcacattgtggacgaaggggtcttatctctttacttcaagatggagttattgatataatttatgtactatggagtttactcatttagagtatacagtggcttttagatttagtattcatgtgtgcaggaataacaccagtatttaatttttaaagttttactatttacaattttaaactaggatataatatataaagtttactgttttaaagcgtgccatttcatagcttctagcatgttgacaacatcttatgggatagggactattaaatcccaggtatttgatactttcaaagcaactctcatccagttgtcagttacttcttactcgtcttctctgttcatttgcctatgtcgatatttaatgtaaatggatttagacaatatgcttctctttgggtctgacactttttgttttgtataattcttccaaggtttatccaaggtataccagtgtttaaataattttttattggtgtatgtgaacatgtgtgtatgaatatgtatatatgtgtggtatgtgtgcatgtgtgtgtgtgtatggtagaggtgggtgggcaggccagaggttaacactggaactccgccttgtttattgagttggtggatgcggtgaggatggctggctcgtgagctccggggatctgctgtctcctcctccccagcactgggatgcagattggtactgctgcatccatcttttttatgtgggtgccaagggtctgaactcattcatgtcttcatgcttttggggtaaggactttacaactgagccatctccccagcccatatttcagggtttttttttttgttgttttttttttttttttttttttgctgaataattttccagtgtgtagatatatcatatacctgctcctcagttggtgacatttggatcatgtctttctgtttaaaaaaaaaaaacacaaacaacttttatgtatatgagtacactgtcactatcttcagacgcatcagaagagggcatcggatcccattacagatggttgtgagccaccatgtggttgctgggatttgaactcagtacctctggaagagcagtcagtgctcttaactgctgagccatctctccagcccgtctttctgcttttatgtaacagttttcaagaaaaatggagacaaggcacaggtgctcatccttgtcctcctgtgcctgcaggtttagacagattgtccattcagttgataagtggggcttacggagggagggagaagtaggccgccctgctgagtgtagcagcacatttatttcctgcatcacataaaaagaatcacagcagcatgtggctgttttcctggtttgcccggtccattctcccactggcttcaggtttcctgtattatcattcagttgcatgtgttcatttcctgtgatacagacatctgaaaaaacactctagttcaagttggaacaaacccttccctggcagctgaagccggggagctggcgaggccagagcagcgtagtcttcattggtcatctagctcaaggctgctgaaggaatggttcaaaaagaaggtgtctgggaaagttccatccgctcaccctttctgcactcggcttcatggcagtggtaacatgctaagaatcttcattttggttttagagaattcaccaggtgacatagagctcacgaggcttagaacctgacagctgacgttcacattgctccttgtcgtggctataaaacctaggcaaacatcttatccataaagcaggagtcataatatatccttctgaagattctgcaaggcattagcgaggtccgttgtgctgagtgcggtcctggcaggtcctagtatgtacaggtctctaaaccttatgtggtagtcaggaagtgggatagaagtcacagaaaagcctcaaacccaggtggttagtaacagtgtggttaaatttgtacctgggtttctaaggggatgcattttgtggatgtaaggtagtgcgtgagtgagcacacttagggaaggagagcagattgttacaaatcatttagcttttgctgcataacagcagctcaaaatttgctgaattaaaaacagccattttatttaaagcatgatttggtagatttgaaaagacttgcacttgggtatttcttttggtctgctttcgttagcgcagatctgtgggcagctgggctggctgttgtgaaggcctcggttaggacgtctgctgtggcgccattatgtggtgggctgctaggaagctcgctgagatttatgcactgatgttgattagaagatggagaaagtctctgctggctaaatcattgtaccttctgaggtagggactagctctttcaatttgagaagcgatcatagtaaaacgtgtacagcataaactccaaggtaggagttagtctgctgtgctatttgcaggattgtcttcggaggccagggatgtaatataccagtggctggatttgattcccagatacagtacacccccaggtgacctcctgccctggctgaagtcatcttcacctctttggtaatttgattgtttagttataattaaattcccaagaacagtatgactttcattcccagtttatgtctgcatatgtgattagatgaaaaagttatctaatcgtaaaatatagtttggggcgggtatctttgaattctaattcctgtgagggatagccaagcccttggcgtgggcagcacaaggggaaagaaagcaaggcattgctgggatttcttacttacgattcttagttgttagaagagacagagaaggctggagagatggctcagcgggtaagagcaccgactgctcttccgatgatcctgagttcaaatcccagcaaccacatggtggctgacaaccacccataatgagttctgatgccctcttctggtgcgtctgaagacagctacagtgtacttcatgtataataataaataaatctttaaaaaaaaaaaagaagagacagagaatgcttccatttatttatttatttatttatttattcctccaaaaaatattagacatcttctagggcttggggagggttgttgccaagtaaatgagtgaactgaggagagcagtcgccaccctgcatctaaactgtgacagagagagaggtgttctcactcctgtagtgatttagagttaagccacaaaactgttttactctcacccctgacctaaagacctgatttgtatatttccattttatattacacgtaatcagtttattttgagacaggctgtcattgtctggccccgtttggcctggaagtcgctttgtagctcatgctgcacatgtgttctttgggggctggcagtggcgcttctccccgaggcatctcttaaatgcccagtaggtgttaaaaagtgaatatttagttggccagagtaatcttaggttaatgcgttagtaatgtttttagacctcaagatatacacggtttgaggcttaacagaaacacataaaatttagaaatagccctgtttggtaagtgtttaagcaggatgaaaagtcacccaagtcctcagcatttataaaatcgcggggaacgtgctaccgacacttcgtggatggaattttcctcggtagtaggacaccagatcctgttttctcagaggagtgggtgcggaggtgtcagtttggagacatcaaaccattcctgttggttgcttctcagagaatcccacaccagtgtccacacactggggggagccacgagcaggcttagacattcagtggaggagcttattttggggtctccaggcattggcttcagatgttgctggagttgtggcttgcatgggctactgagcaaagtcccatctggctgcttctgtccttgtgggagaattgggtcccctgaggccttgcaaggagtcttgagggacaagggagcagcgtggacgctgggttctcacgggtgctctgctgctgctgaggtggggagatgcggaggccttggaggaaggttggaggctggctggcctggtggctgaggtggggagggtctcgcctgctgtgttctttctgctgctgcaggaatgctggagccattgctttagtggggacctcctggtttctttgctgtgcaaggagaccgccaactctagggccacagagaggctgcagagccaagtgtttgctcccagctagctaagcccttctccagcacagggctatcctttctatagctcttgtcaatcttttatttttttaaatttttatagataatattttgagcatattcttcctccttccccaacttaatgttcttttgttcttttattttcaagattataatattattacattcctccttttcctttcctccctccaagccctcccataagccctccatgctcccttcagtttcatggtctcttttctcatgaattgccattaaacatatatgttcctaaatatacaacctgctccgcctatataatgccactcgtctgtgtgccgcagggatgaccctttgatactgcatagccagttgtactcttccctgaggagactgtttctcccctcttaggatccctgagttgccgtctatagctctctgtgtagggttgaggccttctagttgaacacctgtccactttggcacgtttattggttaaagttcttaaaaacctgcaggtgtgacatgccacagacagacgacacacacacacaccagtcaatcatggagtccatttggtgttggccaactacatattgtgtaagcagcaagctgcctagagagtaattggtagagccagtgtcactccactgaaggaaacagatttttccctttcatagcaactatcagttgccatggcatctaggttatcggtgagacgttgtgctggtgttttgtgtggtttgaagccgtgaggccatgtgtgtgctgtaatagcctatgcgagttcatctgtccatcagccctgttctgttggaaggtgcttgtccagtctgggttaatcaccatctactgcaagaggaaacctctctgataaggctgtggggtgcattggcctctactcccctgcctaaagagatggaggctcactcatcgttcttttccttagtcctagactttgctgttgcccttttttcagtagaggaggtttgtttgtttgttttcttttcacacattagatctgctctgggaacgctcattggtgttaaggtgctgtggctttggtgtcctcgaatcaaaactgcttggcaggatcttttttaaaaacacagttcacgttcagagctctcgttgagactccgcactacagactgttcatttgtgcttcaggcccatggtttcatacttactccgccagtcccgctgacagccgttgcacactgtacagttgattcagccacagtgggagtggctggccccaccaccttacccagggtgcatgattgggactgaagttttgccagttaaagtgttaagcaatggtaggtaccgcatatggctttaatttaagtttctcttctaactgaatggaagcctttctctttacctttttaagaaccgttgggtagttttgtgcgtgctaccaatatttatctcactgttccccagattcacaaagtattcttacaatctttaaaatgaagttctttaaaacattttatggtatttgttgcaaacacttctcagaatttattttttagtttggcttataaagtatgtgtcttatactatttaataattttaaaatctgtgctgctctttcacacacgtgaagtagcttctctccatctatccgtccgtccatccgtccctccctccttcccttcttcccttcctgtctgtatgtctgtcaccattggaaagccttccccagaactgggctttaagtgtattctcacattttcctctagaatttacagtttccgtttttgcagttgctgtttatcagtttggaaattctttgttttgggtgtgaggtacatatccactgtaatcttttcccaaacagctatgtggtagtttgaacttgctaggttttctggtctgctcagctgcccggggaacctagggtgttttgtatagttactgtgttctgtgcctgctcagcaggctccaggctgattgacactgggttctgatactccgtgctcacgggtaggatcaggtgagggtctgatgctccgtgctcacgggtaggatcaggtgagggttgctatgcagctgtttcatggcctgtccttcctcttgacttcccagacgagggaactaagcacagagcatgacttcttgtctccttagcaagtcccgtgtcacagttttacaagcttgttttattattatagttcttgtagtacttcggtatgcagtaatagtgaagcttgaaaactaacaaagcaaacctcagaagcaccttgtattttctgtagaacacacaaaacaatagtgcgtcgtgtcttccttgtgtgaaatcccctgtgagaaggaagctgcagcatagcagtggtagtaccttgcagtggcagacctgggattgcctgacatgggtgatagagaaagaacacgaatgtctgaggagtcacttagcggtttggaatacttttctcctgtgtataggagtttacagagctcagctcatgctgtaatatggtattatatcccataaaagtcatttgtaaataatattttaaaattatttatgggccaggtatgaagctacatgcctttaatccaagctcttgaaagacagaggcagggggatctctgagtttgcggccagcctagtctacgtagtaaattccaggccagccagatttgcaaagtgagaccctgactcaaataagtaaataaacaaataaatacaaatgaaaagaaatagaaattagttatataaggctatgggtgtatgtgtgtgtgttatataaaagttatataaatgtatatataaaagttacataaaaagaaagttatataaggctagagttcagtgggagaatacttgcctggtatgcacagggctttgcttttgatccttagcagcagcagaaaattacataatatttcacaagtggaaggattgtccttaacttgtgtgtgtgtatgtatgtatgcatgtgtgtgtgtgtgtgtgtgtgtgtgtgtgtgtgtatttatatataaataatatttctcctcctttcagcttactgaggagcggttgctcccgtggcgttgtctgtctgctgtgatgcttacaggaatagtgactgtgatagatacaaatacttttgtttcagaaatatctttaatataaatatctcaagagttatttgctataggaaaccaataataataaaatgaacaacaatactataattattacttgaagctttctcagaatcattgaagtgcccaaatctttctgtttagaaataatgactctgggaaaaacatatatattattacagggggacgtcacaatctatttccataagaagtattttgagtgagactttgtgtgtttttctttagcttcatcagagtctttcataaagaggtctttatccaggagaaagaattgacccagagactatagcccttgtgggcgtcctgaccacatacatatacctgtgttccttctcaccttctgtgtttcttggttttcaggaagagatgagaccatgcagcctgcaaaaccgtctttccttgaatactttgaacaaaaagaaaaggaaaatcagatcaacagctttggcaagaatgtatctggctctctgaagaattcttccgattggaaaatccctcaggatggagactatgagtttgtgagtagagctgaggttgacccgtggaggggtctgcactgtgttcatactgtccagtcagctcacaggaccccagccttgagcattttcttacaaagttccagtccccgtaactgcccttggcagaagctccagggccaagggcctcactagtttgagacagcacttttcctgacatgtgaaaagttctgggatccctgactaatgacagttttttttccatataaaaaaatccttaatccattttctgtttcctgttttgtgcaggttgaaatgattagggatacttgctgtcttagtcagggtttctattcctgcacaaacatcatgaccaagaagcaagttggggaggaaagggtttattcagcttactcttccatattgctgttgatcaccaaaggaagtcaggactggaactcaaacaggtcagggagcaggagctgatgcagaggctatggagggatgttctttactagcctgctctcttatagaaccaagcccagagatggtcccacccacaaggggcctttcccccttgatcactaattgagaaaatgccttacagttgtatctcatggaggcatttcctcaactgaagctcctttctctgtgagaactccagctgtgtcaagttgacacaaaactagccagtacacttgataaccaaatgaagaagcagctgtctttagtggttcattgggactgtgatctcttacttaggagtcgagtactgaagagagatagggtataggtaagggggtgaggatgggaactacacaggtctccagagcaaccgtttgtcaggcagattcaaagatcccgcagtggagacctttccccttgaggttcacaggaatcccttgcctggaggtgacttgatatactttatattttgaaacttgtattctggcgcctctgttaacatgtagcaggaagaacttggctgcagtgttttttactgtacaaaggaggccataagcaggagcccctgctgccgttcctcttgcagggccttggcatgtatcttctgaatactgatgctgagtgctgcttagagcgctctgcctgctatgtgaggcagtgtagatcacaagctttgaattgtgccgctcgctccttcatgttgcctgtggagttgtcttcagtgtatttgtaagattgattttcttagtttactggttctttcagcaagcctgtttgaatttcagtcaggcaatcacatcattattgccacacagtctgtaagagctcttacatctgtcctcttgtctgcttcttcattttcagatgccctcgagctagtactcttgagattgcagtcactgcaatgctgtccccatcttaggtcagtggttagtgtgtgaagagcccctttatctctgccctggctttctcaaggtgagctgttggctacagagagtcttggtcctcagagagtgaagaaggtgacggctaggttacggggaagttggcccatgagtgagcaggctagcagctgtctagtctgtgctgctcaaagactctgctgatccatgcctggagccgcatccagctcacacaggcggctctgagtcagtggaatactacagaatttaaatccggctgcttgtgtttaaaacttgagatattttacataaaatgctattttcccagcttgtcccagaaacttggcagatctggccacatgcctcattactactggatgatggctatttgagtttagtggcatctgccctgtttgagcgtgactttttcaattccccaccttatctggccacttcactcttttctactcataatctaacctatctcacacttagagatacttgctattagggcttttgttccaaatccaaatccaaatattggatttatatatgaccgagccaacctgacctgatataaatttccctgtttttaccttcaggatgccaggataatttgttaaagaaacatgcaatacagtgtgcatgtggaggaagaaatacatgcacaccgcagtatacacgtgggggtcaggacagtgcatgggtttgagtctctccttccactgtgtaggtccccgagacccagtacaagagcataggcttggtgacagctgcctttacccactgagccatcttgccagcctgagaattctattctttctttctttctttctttctatctatctatctatctatctatttatttatttatttcggtttttcgagacagggtttctctggctgtcctggaacttactctgtaggccaggctggcctcgaactcagaaatccgcctgcctctgcctcccaagtgctgggattactggcatgtgccaccactgcccagcctagaattctatttttagaaaagatattttttatgtgtggatcggtgtgagtatgtgcacatgaatacagtgcctacagagaccagaacatgagatgtcctggaattggaattacaggcagttgtgagctgtctgatatgggtgctgagagatgaactcaggttgtctgtaagagcttacatactcttaactatcaagctgtttctccagtccctacagaactcattctttaaaattctcttttaagggcatttcatagttgagtaatgaaagaaggtgggattaagatgtacatgaagtaattctaaagatcaagggcaaactgtctctaaggcctccatattgaggccttatcacagtcctgaagcatggatttggaggtagtctaaaagatggctcacagtgcaccagcagttgaccaggagatactgaactagaatctgaggacagcaccaggtggtgcctcagcctgccccttggtgacactaagccatgaagtctgacctaaaagatgtcagagtgtagtatagcatacgagtttctgtttttcttactagttaccataatggcagaggcccactgcattgtgggaagcctccctggacaatctcattgcaagcttaggagatgaatctgtgcggctaactaacatgttccctcagcagcctcagagagaggctctctaattctagacaagcagtatttaattttaagaatgataccctcttttctcctgtgaaggccattacttttttcagaatgaactttttgcccaagctggaaaataggaaataatttaatcagaagtgacagaacttgatattaaaaaacctttatattttcatctgaaattgaatacttatcccatttctaaaattgaattgccttatttaccaagttgaaagaaaatgattccctgtagtgtttaagatatgtagtgattactaaaaaacagcacttagaaatgaaaaaaaaagaaaaaatcactttaaaagtgatatttctataaacagatcacagttttgaagagaatattccttttttgagaactcacacgttctcattttgctattcctgattctacaaaaagctttaaatttaaatccagtttggttcatgaatcttcaaaagcaaaaccccacccctgcaatccttgagtttaacaaagccccacccctgtagtacttgagtttaggatgatttgccagcccagagtagatgcacaagaccgtctgcgttttcatttgagttcataatgagagaaacaaacataaacccagtaagttcaataaataaaaccagttaagatacaacagtggctaattttgtaaagcatggtaaagagaaaacatgggccaggaggtggtggcgcacgcctttaatcccagcactcaggaggcagaggcaggcggatttctgagtttgaggccagcctggtctacagagtgagttccaggacagctagggctacacagagaaaccctgtctcaaaaaacaaacaaacaaacaaacaaacaagcaaacaaaaagagaaaacgtggaggaggccttgtatagacagaacaatcagtaagacacgaagaaccacaagctattggaaggagaggaggctcttcatagactgagcggtacgcagacacagctgagtgtataaggaaggagtgaagtgcctggaaatcacagtaaatgtgattaaaagtacctgtgttctaagagtatctaaaagactaatctaaattcaaagtagagaaatagaaaaagataaaccatgaaaacactcaaactgaggtagaaactgggtgtgcgctgtgcctctgtaggaggagggaagcctgggaggctggtgtgaactttggaatggctgaatactcatgactagggactgagggagcatggagaccgggatgtacaaccagactctatgtcctttgtccctccctccgtcagggtaagggaattggctctttgggcagatgtcaactgatttcactcattcctaaggaatgctggcttttatctaaacaccaacacctacccccccacccccacccccaccccaatagtctaggttgagataggcctagattcaattttggacctagttgatgggcctgcgttttgtgggggcatgaagtaccctttagacctgataggaacatatagaatacaacaacaaaaagtgatactctggaagatgtataattttaggttcctaaaaaaagactgtagctaaagcattaaatagaataacaataagagcaaaatttaataaaatggaaacaatatcaatccataaaacaagtcagtttcgggctggtgagatggctcagtgggtaagagcacccgactgcttttccgaaggtctgaagttcaaatcccagcaactacatggtggctcacaaccacctgtaacgagatctgactccttcttctggagtgtctgaagacagctacagtgtacttacatgtaataaataaataaatctggagtgtctgaagacagctacagagtacttacatgtaataaatcaatcaatcaatcttaaaaaaaaaaaaggtcagtttctgggagggacttggctttgattgagtttaaaagggttttataatggcccatcctaaccatctttcctgcaagaccactctagacttttctaataaaattcggtggaaaagttcttataaaacatcccggggagttgtagcttagtgttagagtgcttagtatagcctcaacctgtctaactagcatgaaactctggcttcaggccccaccactacatgcaaaacaaaaccaaaattaggggaaaaaaggttgctataagaaacaccatgacgagccatgggaaactggcaagtggaggcccagtttgattgatgctagcctggactacctggcaagcccttcttagctaagcaggaaacatggtgggcaggcaggccgctcaggaaaaagaaccctcagcaagagcctagggagggtgcccggaggtctcacctgaagagtttcacttttgttttttaaataaagatttatttttatatgtgtgtgtgttttgactacatgtgtgtctaagcaccacatgtgttcagtgcctgaagaggtcagaagagggcgtcagatcctgcagaactgaacctgggtcctctggaagaacagccagcactcttaaccactgagccatctagccagccccttcttagcttcttgagctaagttccggcttgatgtatagccatggctgaccttgagcacacaatcctgcctcaccatccctcatgctggattatagacatgctgcactgtagctggctggaagagcgttttggaaggtgattggccttctctagctggaggaggaggagggcaaaggtggtgtgagctgagacaggcaggtgagggtagtgtggaccgcacacagtcgtgtctgcagtgtggagtgtgagcaaacaggaagacaggagagccctcaggtgaagtcatcgagtatacagcgtgccgtcctcccccagcagatttccctgtctcggattcctcctgggtgtttggaggacttaaaagtagactcctaaagcaacccagggcagagctctctgaagtcctgtgataagtggctcactgggggttaaaaccaactgttagttcaaaattaattttatggaagtaccagaacctgaacattgatggctcagagtttctagataattagaagccagtaattggctatttgtagaataggaagataaattttagtcctgagttttccccaaggatgttttgaaactttagcttagccatttttatctagatcagggcactgaccctgatggtgaattgagatttctctggggttttatgggagactttacaggattgtcgctcaccgggtcttcatcaagtttcacagtttgctttaactctgtatacgccttagaaatcagacactggctgggagcgagacttagcattgtctcagtgactttgtggcagagatgctttgggtatccgtacttaatactgtcaaaggcacattgtggtgttttctgggaacccaggtaatgtgcaatttaagcctttatctgctgttttatggagatcaaagaatattctaaagcattgtgtttgagcttattttctaccttcttcagaaagaattttaaaagttagctcattttcttaaacacaccagtctctgaggtaagataaaatctagtgagtactgtcatgatctagttacagcagccagtttactcttgttgagcccttcatcccccattctccatctctcatccttggcttgtgtcaagtaaatcaaggcaggtatatattatattatctctaaatattttacagatgtgtgtatgtgtgtgtaagaataatagaagatctttatataaaaagatttaaagactcctttaatacagtaactcaagatacctttaaaattaaaaacaatatttatttaatgtcataaagtactatttactgtttagttttctccaataatgcctttcaaagtttgttttagaaccccaacaagattattgtgtggcatttggttgctgtattaattggggttctctaaatgaatagatttgatagactgatcacatatatatatatatatatatatatatatatatatatactgcatatatatactgcacatgtgtgtgcagtttttcctccctcctctctccaaccccccacttgactaattttcccatatcaacccaattttttttttatgtaactttggtcttggtttaaaagaacaatctgcttttgttactctgaccattctcccatttatgtggaagtgagatgactctaaacgatactggagagctgggcacgtatgtgcaggcctgtcatccctgcactcaaggggtggaggcaggaaactnnnnnnnnnnnnnnnnnnnnggggagccaccccatcgtcgtcccctcccttcccctcccctcccttccagggacatggaccaaatatggcataacaagctacagtaagaccaggcacatattctcaagtcaaagctggataaggcaacccagtaggaaaaaagggtcccaaaggcaggcaagagagtcagacagcctggctctcactgttagggctcccacaataacaccaagctacacaactacagcatatatgctaaggacctaggtcagagccattcaggctccctgatgtcggtgagctcacttgggtctctctcattggttctgtggttctcagttgttacagtgtccttgatccctctggctcctccagtcctcccccccttccccagctccatctaatgtgcggctgtgggatcctgcatccgctcccatcagttgctgcatgaagtctctggtttcattgatgatgattatgctaggctcctgccccagcacatcctgcaggcatgacaaactgtaggttggtgtcccagtccctccattggggactttgccaggtaacagagaatccatgtccactctaggagtctgctctagtgtcacccgtgtagatttcatggaattcccaatacactaggcttctacctcactcctgaaatgttgtgtgggttgtatctgttaatacttgacaaaattcgaaactaaaacagataagattaaacctcagttttagcccccttgcttagcagaggcaaggcccttaatttgaagtaccctctacccccaaaccccaattttaagaatctcttcttattctaaagcagaataaaatgacttattggttcatttaaaatagtggtaaatttgttatgcattaataaagtttttttatgaaaaaataatattccattctataacaaaaatgtgtcccagtgacagtgtgagcttgttttcaaatccgtgtgagtgggagacagctagattactatatgagcattggcattcagtctgtcagacgttgttctgtgtgaagaatgttgggccaaacaaagctgtgccattggaagagggaggtggacctcagtagcttgttcagatatttttgcttaatagcttgcagatatttttcttcaactgtgtatgcgggatttttttacttttgaaagagattttttatttttagttccacgcatatgtgtatgtgtgtacgtatgtgattgcgggtgcaggcgtaggcagaggtaggagagggtgttgggtcttcaggacctggaattacaggtggttgtgaactgcttgactttggtgctgggacttgaacttgggtcctctgaaagacccacaagtgcttctggctgctgagccagctcttccgccccatcagtggtggtcccttaaaggtaagctatagaatctgagactcagtgagctcccgtacgcctatggaaaccatctgcgtttgcatagaaggtttgcaggctttatgacaccgtggcttggtcatctggaaatcattggtttagtgagtcacggagacctgccaaagcgttggcattttattatacagcgtacgaagattgcactccttgccactgtaaccagtctcagcacggagcgtctgtagggggagctgtcagactcactgtggcagaatcaggctaagttttgcttgaaattaccgttggcagcaaacactgtcagctgttttaagcaccagactcactttttcatttttaaaggaaatgtctgccagtgcccgagtctgcctaaccacagtttgttaatgtttcttcaagtgcaattgatgttccatggaaaaagcagccgattgagctcccagctcgattgtgcaagtgctttccttaagacagccattgattttagttacaaaccctcccatttcatcctgggtgctgctttactgtaattaaattaatactttccccacttcatctgagaatatccggaaggaatgggttgtaatttttttttttttttgaggcatgttattttatcttttaactgtagtttgtaaccatgaagaacagagtaactggtaatgcttgcgtggtctcgtttattgactgatagtaagattagcactcatacctccaatccttgatttgtgcccccagtccaagtgtcagcacagtgaaggcaggcaggtgaggtcttaggactagagagatggtttgaccttacagagatgctgagagacaacgccatgggctagaactgaggaactgcagctggggctatcgagccttcagcattttggcagagacatctcatagtacatatgtgttcttcctctgggggttgacagttgcctaagtgccatttaactcaaagatacaagatggtgatatctgaccacttctccatttatcatatgaaggtcctcaaacagcaaacattccatcaatgatggagatattcccagctgtaattgatgtaggaaagacagaatttatgttagactttcccctttatttgctatttttccaaaataactatttggtcccctgccattctacaaacatgactaatgatttttttaaagtttttttttcttctatttctttaaaaattaatttttggttagtatacaaagaaatgcaatctactgtgatattttctttttttttaaaaaaaattgtgtttatatgtgtatgcagcacttgtgcagtcagaggacaaatgaagggagtagtctctcatttaccatgtgtgttctgggatgggaactcaggtctccaggcatggcagccagcccctttgcccactgagcagtcctgcaggtcctagtgtgagattgtcacacatgcacccttctccttggttctgtcccccctttgttgtgctcccttcttcccttccactctggctgctccccctccccctccccaccaagtagtcctctttttgccttcccctctttcatcccatcaggtcctctaggttacactcttgctctaaagtccttcctgcatctccgtatctgtccttctgaggccgactcattggcccgacagtcagtctgtccccacaaatgcctagcttcattcctccatgttttgtatctatgcttgtgttggttctggttctggatgcctggctggctcttatctgggctggcatggatggtgcagcagtaagtgctgatgtacaaggcgtgatatacgcctcctaggtatatacccagaagtggacgcagggtggatcatgtgatagttctggctttagtttttaggggtgtttgcttgtttgtttgcttgtttgcttctgcatttttgaggcagggtttcactctaacccaggctagccttagactcatggcaatcctcttgcttcagcctgccaggttgtggtatcacaggttagggccagcaaacactgattttagttttcagaggagcctttcagctggtttacatggtggctgcaccagttggcatccgtcccatcccccacggaggtggatgaagatctttctctgtccacaccccccccacccccccagcattaaggtgctactggttgatttgatttctttctctaaaaaaaacccctatgtggtgggtgtgcctggatgtgcctgggtgagtttatgtgcaccacctgtgcgcagggctggaggaggccagtagagagccttgggtcccctgggactgcagtgcggatagtcaacctgctatcttattttttcctttgagaactgtgtgttccgttaacttgcccattttattagaggatttataatctcgagctttaactcttagaattgcttgtaaatcctagatagcagtcctctctctgttgactatttagttggccaaggccttatcccactgaagagtctcaacactctgctggcttcctttgttgtgcacaaactttttgtcaatctgggatggtttcctgaactcttaaagtctttctcagaaagtccctggggttttaccaatgaagactcaggaccagaagctggggtgaaagcctgcgagctcagagaggcagagaaagcacctggctgaccttcctccccagccgatgtcccggaacaagtgcccctccccatctcagaacacctcctccaaacccagtgtcccttccttctgcttccgctgcgtctctctgtccaccctcccctgcccccaaacaccctactactctgtggctttttttttaattagatatttttttaaatttacatttaaaatgttatcccctttcctggtttcccctctgaaaacccttttcccttccccttccccctgctcaccaacccacctactcccgtttcctggtcctggcattccctacactggagcatcgagccttcacaggaccaaggcctctcctcccattgatgcccgactaggccatcctctgctccatatgcagctgaagctggcttttttccttaatcctgggctcacttcctgtcagctggttgcctgctctgcctcttggttactcttatttaatcatgtttacagtattcaagcagaaaggtgtgatcaaataacctgaaacatgcctacatcttgaagtattttgcttgttccattccagactttacattaaagtctgaatgaatctggtttcattctctttgccttccttccttcctgccttccttttgttttttgtatggatgtgatctatacctgtgtactttcccatgtatgtgcatgtgtgcatggggtatgcctgcacacagttctcaaaagaaaaaaaaaaccaaaacccccaaaaaacaaacaaacaaaaaaaccccaccaatgaaccagaaatactttgccatattaggaagcaaggaagctcttgagagctacttcacataaaccatatctcaataaaccagttttaaaaagaactgagtcacagtgttgaaatatttgcatttttacttgaaatgtgtaaaatgttctgaaactcctgaattcatgacgattaataacaagatcatagcctaggacaaaaatgtggcttagtgacaaactgagttgtgcatatggccgatgtgaaggtagttcccaacatgagctgtaggaccagctacaccagccatttcttatccctaggctcagtgggggaaggcacagacacttgagaccctggagtctcttctggagacgtgtgtggactcccaagcctttggagttgcctgtgagagtcactgttctgtgggcaggaagaatgatggtcttagaggaaaaactagcaaattagagttattcagacagacttgagttatcagcagacattttctaaaaatttattctcaccaagaatcaaaagatcttacttaaaatttggactttaaatctttaaagagattttaaatctttataaagttatttttaattcactttttaaattattgttttccatgtgtgagtattttgcctccatgtctgtctgtgtacagtgtcagtgcctgatgtcagtggaggccagaggaggtgttgaattcccttggatttggagttacagaaatggctgtgagctgctctgtgggtgttggccttcaaacctgggcctctagaagagcagccagtagtcttaatcagtgagccaactctccagcccttcactttttaaaaaaaaaagatggggtaataacatatatctgtaatttgagcactcaggagactaaggaaattcagagtttaaggccattctggactgcacagcgagtttgaggacagcctgggtcacatagtgttatcgggaaaacataacggcctatctacatcaaaacactgatgtggaccatggaacagaatgggcagtctagaaatgaagagctgcacagcctcagccacccgatccttaacaaaagcgaaagggacagcctcttaggaaaactgaaagaccataaagaacgagagggtgtgctggagagagggctccactgtgagcgcttgcggcacgagcatgacgtgacgacctggggttcagatcccagcatcccatgcaggtctggtggggtagcatgcacctctaaccccagagctcaggaagcaggggtgtggatctctggggcttcccactcaactagtcttaacaggtaagctgcaggctccaggagagaccctgtctcaaaagtgaaagcggatattgaataaaagcacccatctctgggaaaggctgactctccccctggtagccaccagtggcctggggtttcttgtctagggtgagatcccatgaatattttccacttccacattaatatgtctgttgatactgccattgtttcggggaaagattaaaacatctaatgttccaacaacttaaagaggagaacaggagaggacaggatccagtgccagcctctgtcctccctgtgtaacctggggacacacagtgccagcctctgtccttcctgtgtaacctggggacacacagtcccagcctctgtcctccctgtgtaacctggggacacacagtgccagcctctgtcctccctgtgtaacctggggacacagtgttaacctctgtcctccctgtgtaacctggggacacacagtgttgacctctgtcctccctgtgtaacttggggacacagtgttaacctctgtcctccctgtgtaacctggggacacacattgttgacctctgtcctccctgtataacctggggacacagtgttaacctctgtcctccatgtgtgtaacctggggacagacattgttaacctctgtcctccatgtgtgtaaccgggggacagacagtatcaccctctgtcctccctgtgtgtaacctggggatagacaggttttgaagaaactcttggttcttagtaggaatggcctttagagaccagccttgacaagtgcttctgaagccagctcatttttccccctggccttttcagtgaatgaaacaaaggtatatgctcattacacctccttacactaagcacagactggatacttggtgctgcacttagccactctaactgtaactcctctcccctggtagtgccagcatttgccttctcttccacactaacgcttagcgctgcccgccttcctcctctctgatctccacagggctggtcctcggtgagcaggtggatctttgttttaacactgctttctgtttttaggttttactcttttaacttttctctgtgattgcatagactgtgtagttccaagtggaagtccataaaacaaggttactcagttcatgaatatacccttctacctcgttcttctcccttttttgttatgttcacagatgagggctgaggaaacaccacattccccctgacccccacttgtctgtctgtctgtctctctctctcactttggggtagcagtaatggatggcacacttttctctgcctttgtttgcattatgtgattaatctatagcaatctgtataaagaactgtgagccagcgcttccttatgtgtggtgtcttgttgggaggatgtactgcagtcacgacagcctctctgtggccacatgctcagcttgctggcagtggcttttaaggtaattcatagcctaatcataaattaggaattacatacatgcatatacatattacaaattttgcctttgtttttaatgtgtttctgttttgagtggcactatatattagttgcctatttaggtttctctttttccagaaaggagaagaatttcttagaggaatcccttctgctaacctgttgctgttgtataataaattatttaactcataaaactaatttaaacataattaaaaccatgtgccacagcagaatgagcagtcatgtctcctggccagacatggttagcttgccccagacatcagtcagtatgttgccatgttggtgctaacaagagaagaagctcctggaggcctggaattcctgtgtcatcagagcctgacagtttgaatcttgtagcagacagagacagatctgggtcagttaccttactactgtaatgtgaagtcaaaaaagaaaaagaaaaacaactaaattcagtgttgttgttgttgtttttttattcaagaagtttccaaaggctgaaatatattttaagtgtaaattagctagttattgatgtagaaatcatttttaatttttatctggatttaattacttattgctggacttgtaaccatgagtttgcattgtggtcttgttcacgtcgatgcaggcgcttgtatttttccttcagtgtgtgggaaataccttattccaactttgcagctttgctccccatttcttctctcgtgtgggctcttgactcttcagttgcctcagaggtccatccctgttcccggggcatgagctgttgagaaaactaaaggagagatttaggacagctttctcactactatccaaggctaagagcctattagaactctgcaagtagggatggaggcaggaggatggagcacaagggtggcctagacccacacatggaggagtcggcccttcttctctgccttacttacttgcttgtatcctcagggcctctcaagagaagggggtcaggttgtgtgacgcttgttttcatatctaagctgtcccctgcatgtcagcctccctgtccagtgaccattgtgcttaaaactgaacggtctctggcaggcagcggtgtactccactggctactctgggatgaagacgcatctatggtccttgcttcccttcactgcaccttttgatcactgagatctcaagctggcagagtggaacaagcagtgttgagatgatgcaaagaggaatgagttcccggatggtccctatttcattacatccaagagaaggcacaagcagtggtgttggtgggtcaaggcattcaagtctgtggggttttgactgaaaaaatgttagattaacatttactaggacagcgggactacacagagaaaccctgtcccccccaaaagaaaacacaacaaaaagattgtactgtataaaattgcactgggcgctctgcatggaagaggattatgtctacacacaccagtgtagttccaggagaacgagctagtcaaggtcactagagttgggcttttagatcaggttctgacttgactgtgtgatgatacacttagcctggaaaatggaaaggatactgtctagatagagcctgtgggagagcctgtgctgcgctgagtaaacaaggcagtgcatctgacttgcctgcagggtaacagacactttgtaaaagctagctccctctgcttccctctgctttctcctcttttcttgaaacatcacccacagagtaagcctcagttccttaaatcttttctgcagtgattggctgttgaattcccttatgaaagtagggatgcctttcctaaaggacgcttgtccccgcttgctgatttataaaacaaagggattaaacccctgccagatggaaatacagtgggtatcactgttggattgtccagcccatccccctctccctgttccgccctccccttcttctctcacatacgtagtccatgtactttcccactttcccctcatttcatgaactgtcgatgtttagggatgtttctcacatcccagagttctaaacacttcctgtggcagcacgctttggccagcagatgccacccttttgcttcttgtgccgtctgctctgtgcagccttgaagcagaggctgccagctgtggatactacatgacagaattagtttaccagtcttgaagtttgacatttcctgaaaatgcatccttatcatacagaccgcactgcttgagaagagagatgagtgacctttcagatgcctgagagccttggcttgcttgccctcagttgggtggctctcttctttgaacttgatcataccacctgccctgtttgtttgtttttgttttttgtttttttcctttctggttggagaaaaaaaatcagcggaaatgtaaattgaatttgtgaaccaaatttaagatccatggtaacataatgttggcgtagaattttaaggttgcttatgtttgagctttatattattctatttctgtttcacatttcatttttgtaaaaagtattgttagctctttgaatgatgagggataattcagggacaacagaaggccaaagcattggtaagccagatgtggggtatgcctggtgattgtaatgttaccaccattccatacaaagtctaatgcacggaggatagtcatagtcttttatttaatggtgcttgtttttgtgagagaatagatgaggttttggggtatgtgtgtgtatgtgtgtgtgtatgtgtgtgtgtgtgtgtatgtgtgttnnnnnnnnnnnnnnnnnnnnnnnnnnnnnnnnnnnnnnnnnnnnnnnnnnnnnnnnnnnnnnnnnnnnnnnnnnnnnnnnnnnnnnnnnnnnnnnnnnnnnnnnnnnnnnnnnnnnnnnnnnnnnnnaatagtttgagaaatagaagcccagagatctttatgtaaaccagccagttttctcacttcccaccagagttgggtcccaggtcatttcctggtcctctgaactcttgggtgcttccttttactgagacagccacagctgtgagcacatgtcagatacttaagtttgttttacaagccaggaaaaagaatcatttttaatatgtaacgagtactgatgtcagggtggggtggggtgggggacagcagagggacatttatccttggctcagtgtgctctcaagcttattcagagaaggttgacagacttcattttattgttcatctaggtcaataattcccagggtaaagcagtcttgtgactctatattacttacctagttgccatgggctttacagtaagtgtgttgtcaggaaatgtcatgctaactaaaaaagacatttttttatggcatccttttggctttgaccaaatgtaatctctgtcaaaacaaagatggctattgtagaagagtcttaatgtctacagccaagagttggactgcttttctgctgctatctctgtcactgtgcaactattagtctgctttaggaatttgctcctgaatttttctttcatgctcttatctcctggtaatgtggccttttctgctggtttcccctccactcttgccccacagcagtagtagatactgaatatttctaaccgtctgtgtatgtgttattttcttgtcctatttcctgctttgtttgcaagaatacttgcctctttatgactatgttgaaggggctgcagaagtggctcaggggttaagacttgcagaagatacaggttcaatttccagcaacctcatgatggctcacaaacatctataatttcagttccatgggcattgatagcctcttctggcaggcaaatgtggtatgcagacaagatatccatacacgtaaaatagacataaaaaaaaaaagagagagagagacaaggttgtagagtttggggtggaagtagcactcaagtgcatactgtgcacaggccccataaacactctgtccatccatctctcacactgtcttcccagggtagatcttatccctgctcactgggcagcacggcttggaaacactaggtggtgtgtgtgacccgtacagagcatgtgattaataagtgatgagtgtaggctttcagctttgatgtggagcctgttattgtcctcagataaaatacttttctgcctgggaagtgtgtcctgcccctgaacctttgtttaattcaggtgctgtgcatttctttctctaatgtgctttggcaaaaagccacagcacatgagtgttcagattgtggtttttaatactgtcattttagcccatttatacattctttgcagaactgcatattttttgagattttcactctgtgatagctttcctcctgtgtttatgggactgcgttaattagagtataaatatgacaagtgcggaacagggttttttttcccccctcatttttggtaaaaccttagcagagcacagtgattggagctgcagtgctgggatgtatattaaacatttagaaagtattattaatatgtgggtttgtcttcacagttcaggcttacgtgtaaggagagcagtgggctaggaggcaggggcaggcctggcagaccttcctagctgtggggttctggaggggctctcgggctcccactctctgctcgtctttaaaatggagctgctgtgtacagaagaactggatgtggcgtgtgagagagatgcttagggttcacaggttcttaacagcagcgtcgggacaactgagcaaaagcaggtagatgtctgtgctcactctctgaggtctgcaactgcggccagccgcttactgtggagtgaatctcctggctgtgtttgcctcggggttagtgagaatgttaaacttaaaaatgcctttcaagtacttcgcagagtgttcatttagtaaatgtgatgtacatgtttagtacctaaggtagggaaaataaatgaaccaataaaaaggtggaaagaggtgagctgccccgaaacagaggcagaaggaggctctgctatgcctcgccagttttgctgggagcccttgtgggagttcagactcactctgaagcactttcaagaaagccgaattctgccactcatgttccgagggctaggtgtcagtcagcctggttgacacactggctccctgctgctcttcctccgggacgctatgagagccggtggggcagggccgcagaatggccctgtttgttgtgtctcggctcttgtacaacctgggatgctgaggtggctggttactgagaaagagcagactcgtgttctctttacagactcaccacactcccaactgctctttatttagaaaaattgtggcagaaactattctaggattttatggccttcacacatggctgtgtgtagtttgagtttaaaatatcttatgaggagcggtgtttaaaatgagtgcagttgggacatttgttacccctcccaagtgctcttcccagatgcaccagggaacaaaggctgttctcacgcattgtggagaaaggctccgttccagactcagtggaggttttccacttttggaagagctgctgaggctctaatcacaaactgcagccgttctaggattaatttaagatagttcctgggatgaattaacgtcttgcagtaaaaataccatacacaacctgtcacattatctgtggcatcctttcctgagccagcccagttaatgagaaaaccaggtgcccagggtttattgctgaaggaatgtttaataagggagccatgcacggtgtttgggttcgtggtgtttggtcagtgtgtgagttgtatgtggaggtgtgtagaagctctgtgagacacagacattacctttttctaatcttactgcctctcctcctggctcactggggtgttcctgtggaaagatgaaaaccaaacagacagtctggtctactctgcattccctgacttgtagctttctggtgcagtcctcggggtcttggtaccatgtcaataagctcctgtgggagaatacataggtgagcatcatcccagagtaaggctcctccaaggctagaacagagcaggcagccttggcccagggctatcgatgatacctccatacccaggggcatgggacttaggaggaagagctagttgggccactgcacattggatatgtgtagcttgcattactaaaatgagctctgttacaccacaaacatacctcctgtgtgtctcttaaaagtgtgtgtcagagttattcctataaaactgatacccctgtccagcttgtgctagatgctaaaaacatttgtgttcgtgactcatgattcaataaagccccaagttaggagtgtgttggttggcttctacattttttttaatatattttttttattacgtattttcctcaattacatttccaatgctatcccaaaagtcccccctccccccccaggcttctacattttgaatattattttttattaattcttctcatacggtacatccggccacagcttcctccccatctctgtccttccccggatcccctgggaagatccaggaaaaggccatgggatgcggtggttgtcactcaagactctgagtcctggtgagccttgcataggtgattctgggggctgtgttttcctggtgtccttgaccctctgagtcctatagttcttcctcccctttctgtgggcttcactgaattagctctccagccctctttgcagggttgctttttttttttaagattggttttttgggtttttgttgttgttgttgttgttttgctttttgtttttcgttttttcgagacggtttctctgtatagccctggctgtcctggaactcactttgtagaccaggctggcttcgaactcagaaatcctcctgtctctgcctccctagtgatagaattaaagttgtgcaccccacacccggctcctctttgcagttttaaaagctttatttacatatagtatctaactattcagacattttaaatttctgtattttgatttattaacttcagtttgtagaatgccatctcatttacaaaaatattttatatcctaagactataaaaatattaatctctgctttgttttattttttttcttccaatatgtaatccatttgcaatttgtcttggtgtaaattgtaaggtagccacccagattcaaatctttcttagcttcttttgctgacagctaaggattttcagaatgagtggttaatttagaggtatctgcatctaaatgtggcttgtttctacagagagaaagtttctacttgagacttggagtttcagtattcctgtcttaaaaagcctccaaaagaactgtgaaacacatattgattttggccttgacttcagtgcatctcaaacgggctgattctacagaacttgattcaaagcatttcttctatgtcttgatgcctttctgccaagcaaaattgatcatttctgaccagaaggctctgagctgaaggaaagtgaggaggctctcggctgctgcaggcacactttggctgtgcgtgtggggcttttaatttttctcttaagctctcctagtcactgtgctgcttgtcccgttgtcagggaccatttggagggcacatttggtacagttgccgagtcctggagctcgtaactgggtctttagatgtctgtttccttggcactctgatgagtagatacccggggtcttcccgggtctttagatgtttgtttccttggcactctgatgagtagatacccggggtcttccccgggtctgtagatgtctgtttccttggcactctgatgagtagatacccggggtcttccctgtcagttgattcttgtcttttcttgtatcgcgacatctgctgtggttgagtctgtggtgctgatgtgctttcaccagcaatgcctggtctggtttgttgttcggtaagaagtatgtttagttccagtctgacaacttccctgagtgtctaggacagtagttctcaacctgtgagtcacgccctctgtaggggaagggagtgtcacacatccgatatcctgcataccagatatttacattacaatgttgtaacagtagcaaaattatagttaggcagcagcaaccaaataatgttatggttggggtcaccgcagcatgaggagctgtggtaaagggccacagcattgggaaggttgaggaccactgctctagacttttgcagatttgccccttgtacccagactcctgagttatagcaccattcaaaatcagttttaccagtaaaggaactgtgttgtaccagtgaggtcaaagggtcagtacatgcagtagagagagccatgggagtctctctgtcagcctttgcatccatttcaccaccagatttccttatctgctgaacagactagaaagacggctgagtggatgggaactcttctgacccagggttgatcgccagcactcacatcaggcagctcacaactaccctccacacccacacccaccctcacccccacaccaacccccaccccatattacacttttctgaaggagttggtgagtacaacgtgatgaaatgtgtataaaatatataggtgcccctgcctatattaagcatttaataaatgttattttctttcttggtttccggtgttgctttggtcttcttggggattatacagcctctactccagctgtagaaagaatgctttatgcgcatttcagaaagtttagagattctagaaaaacttaaagatgtcttgctatttatcactctcaagcaacaatttctttattttgatgtgcttccgtccagttttctatgcttatatgtaagtttcagtcttacacagctgaaatctttctgcctatagttttaattttgtcatctaacatagcctgtttcattgtatatttaaaaatctttgcagaaccatctttagtaaattactggttttagttatgtacgtggatgtgtgagcgtgagtacaggtaccagcggaggccagtgatgttgattgggtctccctggaactggagttcctgacacatgggggccacctgctgtgggtgcttggagctgagctcagctcctctggaagaacagtactgctgagcctctgccagccccgtagtcaggcctttttaaaaatattttttgagataaagtttagcagtatagcctaggctatacttcaaaattcatggtcttcctgcctcaacttcccttttattgttgttgttataggtagctaccaccattcctggcttaaaatacttgcttatggtcatataatagccattgcagtgtataatttagttgacctaatcagtcagtgtatttggccttttgggttagttgagattattccaatttatcaagccaggaatccttgactaccagagagctgcctcgggttgagtctttgtactttcatttgtaggacacctcctccctcagctaagtatgtgaagtagccagggtatccttcccgccagctctctggtcgtctggtgtttatttaggtttcaatctttttggagaggtttcttctccttacactcctgggctagaagaaaggtgaaggagactgagttgtatttaggtctctggcctggtggtgccaagtgaatgcccaggagctggcctgggtaaatgccacatgccactgtgtcctcactaggaggtgggaagactcttctaaatgtgtcctcacaggacacactgttttgtttcaacttcttgtctgttttctgtagagccagttttaaagtacgctgagactgggctcacttgtaccgtggaatctagtgagatcttgtgctccttactttcagaaacgtggccagaaatagcaatccgaaagacacgcgtcaggctcgccagggaaagctgctgtgcagatacactgagaatctgcacggccagtgaatggcgtctttgtctcagaacccacagccgcctgcttctgctgtgattgcagtatcagatctgagctcagcttatagcagttactgaggtggcattgaaaacaaaacttaaatgctgtggtttgtgtccccaagggtcacttgaaacacacaacaaaaataaaacaaaacatacactaaacagaaagcacaaaacaacattgctccagcttgaggctgttttcatttgctctgctggggtctgagactgcctgatccaagactgcctggctcctttcattctctgatgttaaaggatagttttaatctcaaacacttagtcagctagatatctgagtccagactagctccgaaatagatcctaagaactgcagacaagtctgcagggtgggtcctacaaggccctctgaaggccactttgctgtctccctgtggcaaccaaggctggcagctcacgcatactcttatagtccaaccgaggctggaagctcacgcgtactcctatattccaatgctgctcagaacaagcctgttgttggttctcctgaggtggtgagagttaagtccgtcccaagagactctgggttctgatttcattgaaactgcagacttaaccagaagcagatctggttttagtcttcgctgatgcttgctgattgtaaccttgaaaacgaggattaattatgtgactcctgacacctcagattccctatctatagtcacattacacgttagctgtaagtgatgatcgaatgaaaggaacatgtgtgcagaagtgtgctacatgccagccatgttgacagccgatggatgttaaggtggctcctgttatactgtacagcagctggctgcccagctatgatcctagcactttgggagactgaagaaggggaggggtcctgaaagttggaggctggccttggctacctagtaagacctcgtcttaaaagaattaccatatagctagatccttgaatcttgcctcctcatcaagtaatgctggttcctacttgcagtttagatgctttctcttttgtgtgccttggtcttgtatgtatgtaggtctgctctggtcattttgcttgatttgctgagaatcacagcattagcaccgtggcaagagctggggcccatggtggctcttgacttctttcatggtcaatccttagtcatattgccagtactggcagttaggggttaacgtttccagcgtgcagagaaaacaccttgctgtgtgatgccctgtctgtctgtctgtcctggccgtgtcagtaactctcgtttgaggacattataaagtctagctcatcagctctgtcagtgttctcagacttccagtccgtattcttgtttcattctgggtgaattgggttttgcccctgtgaaatgttggttttgtcttaagtctttaatgcattggcattagttctgggctttcagctccatggtagaaccttcaccgagcctgtacaaggctctccactcaggcctggcaactgcagaaataatatagacaaccatagagtcgctctttcctttttagtacacacatgtaaggctgtaaatgcccttacattaccttacaactggcaatttttgatatgtaggtatttgtcttgtaaagtcaggtttattgagttttaatttacataatataaaatttgcttccattatgtacaaggttgatgagctttgactgatatgtacagttttataaataaccataattaagtcaccctgaagtttcccatgacctggcttttgtctgtgaatgtgccgtttctaaggtatatgaatagaatcatttaggtccaattaaaccgtttcttcttctccacagaagaaacgctaagtcataggcagtgacaaatgcacacgtgcagtctgcagtcagaccacttacaagagggcatatgaacatggagtgtggagcctcaggttaccaaggacacggtcacagatcacagggcgcagtgcaagctgggttttgtttggtttgtttttccttttcactagttttctgcaagcagtttttatccattgtgtgtaaagttggacctgactttgtctaaagttgcctttcagaccatgtttattaaaaatgcatgtttttcaaaaactaatttggtgtgtgtgtgtgttgatagtggctgtgagtttttgagagagtgtttgtgtgtgtgtgtgtgtgtgtgtgtgtgtgtatgttgatagtggctgtgagtttttgagagatcctttgtgcccaggcttacctagaactttaatcctcctgcctcggcctcccaaatgcttctgactacaggtgtgtaccaccacgtcaaacctcagtttgctgttaacgctccgactttgcacaggattctctggcttcttttatgtgacgggaagagagaggaaagtctgaccttctctcagagggcggagttaggataagagaagaaagtccgaccttcctactctcttggaaatttccagctcaagaaagtacacagaagccacagcacacagggatttttatgcgattagccaactcttttcttaaattattaagctgcattaaaacagcgtggtgtacttggagttttaggtctccctgtcttctgaaagattaatatcacggaccttcttaataggaaacctgtgtatcaatttagagctactcttaaattagagttttccttacagagcaaagctagcaaacaggactggagtcagtcttggctttgtggtgctaggtgtcaaagcttggtctgcagatggtagacacgtgtgctcccgtggagatgaagcccaggccagggaggttctccttgcagtgtcagtgtaagcaggacactggatgagctgttcgttttggtcttagaacacacgggtccattttgagtaattgatatagtgttatttaatgaacatatattgtccttatgtatttatcgattatatacttttaaaacctctgtgaactgccctgtgtctgagagaacccagtaggacatgggtgttgctttcacatagagatttaaaatggaagggcagatttcctgattccgtttttattaagaactcttttctggtggctggagaataccttggctctcctgactctcagacagttcttaaattagcaaagaaaggtattaggggccagagagaagtcggagccagggctggaaggctgggtggacaaccctctacagagggtggagttagcataagtattggggcacagaggtcagtgttttcatagaccttggaagtccccaagtctttcatttctttagtcatttttatttatatcactgtataagtcaggctgacctcagactccatcctcctgcctctgcctcctaagtgctggaagcctatatgtgtgctaccatactcagcccctcacaccccatccttaagatagtcttgctgcgtagcccaagctggcctcctcttctagattctcctgccttacgctaccaagaattaggattgtgagcacaggctaccacgcatggcatgagggaggttttctagggcctgatggaacttgattttccaggactgttatttgaatcagagaaacctttcattaagattgttacatttcatgtaaggagcaagttctgttggagtgctcaggtgtgatgcgtatgaaatacacatctcttgatactgtgtgcacagtgtaccatcaaggtgagagtttagagaagaaaagagtttaacagccttgacccctgtgtcttgtctatggctaggtttgcacactgtggggcttgctgtggaggcagggaagctctgctgtgcgttcttaggtgtttagtttacactgtctgtgttgattcaagctaggctaggtgttattctcatacactcttcattggaagagcgtcactggagcttttgttgagggccgggtggtgcattgtagttcagctgtagccactatttagattatctacttcctcctttccccaaggagttggaggcagtagctcctacctgacctgtgcacttgttctggcgtgttctcagctttactgtgtgtaccttgccaatacttacatccagtgctcttgtagaacacatactgtcatcctctggtgcacacactagataacatgcccgttactgtagagctacagaggacagagctcaaagccacttactacccttgacccaatagtcccccctctggcgggagttccactcttcattcgccttggcagcagtgttcctgacctggtaaagctgccagtacagttggttgattggacttaaacgttcagccagttgtatttcattgcgtcagcacatcacacagtaggcactttgtgcaaagagccaagcacagttttgtagatgggaaagtggtccagagaggtagagtaacttgcctacagcccaacgacagcactaggagcagcgttttcagcgtgagggccacgtgacgtatttaacgtctgttccattcagacttgtgatcgcccacactgttcactgcctcgtcttcacaacaagctttctctcagttctgtatcatctcaggcaagttatctacctgctcttctttaagattacattttacaagtgtgagtgagccgttctcagaggcagaggtgtccgatctctttagagctggttacaggtaagggagctgagctcaggtcccctgcaagaacagtaggcactcttaactcctgagccatcgctccagctctctacgtacccactcctaacccgcatggatctcttctgtaaaggagagcagtcctagtgcctgctaggactaaagataggctaaatgaatgtacagtgcttatgctaaaggtaattagcatgttttacatgcatacccgaggagtccagtaatcaggtgacgttgtatcatactaaacaggctgaactttaagactaaaaacagatttaagaacacatgtcagagaccagttgtcaagatgaacagtacctatactaggttgtagagggtacttgctcagagctccttggacagacagcatacaccaccaggctgggaaaggcagcggcttgtggcctttgggtgattgttagactgcagtgagcgcagtctaccatcagcctggactgatgtgccgagagactttcagggggcctcagaaattctagatgcccttgatcaaaagactttctgtgttctccatctaaagcaagagctctcagaacaagagcctgctgtgaggaagctcttctcaccttcagtagtgagcctgcgccgactgagttcttgtctagaagggtcacatttcttaatatcttgattatttcattttatccaaggaatactgttatagtaggagttgttttttgtctgaggaacaacactgcatgaggcacacccttcacacatggctgacctgggactggatacttgcttcccatcagcagaaagcctataaatgttcattgagctgaggtttgtcttcaaggatgttagagtttgcatgaggtttgcccccccaaaccccacccccctgcataaaggctcgcatggtggaaggttggtgtcgctgcgacttcatcaatggaggctatcaacagcaatgaagacccattcatttagtcattcctccagccaggcaaggcttagtggagtagatgaggtgaggccatttccttccctctgagaactttcatcctaggaagagaaacaagtgaagagagtaaacatacaagacacacttctgatgaggaggcgcatacgtgctgcagcctctgcctgctcacagagtgacatagaaaatgggactttacaaaagtatcctattgtcccggcagaaggggctgagtggcttaagttttatgtacttcaacagactcattatagaattaatgtaggtatttaatcatttatggatctcttctgattcaagttcattgaattgtgatgttaaaattaagtgatgaccagagcccctctagatgatctggtcagaatagttgtgtgacatttgaggtgtgaggatctgagtggaaacctgaaggatgggggtgacctgagcaccagccactgagacaaaggtctttgtgactattggaagactcacaagtgacatgtccaaagaccaagcaaaggaagagttgtaaagagtgaggcctttgtaggagaattggatttaaagatagtaagacctgctttactctggtttcagttgtgcttttgctgtgggttggtggtggtgtggacgaggggactggagacagaaaccaccctgatgaacttgaatcacaccagagatgagctccacagggctgggctgtgggcaggagagctgtaagggaaaggaagagctcccaggagaggggcggtccattcctggggtggggaggaaagcaggtagatagctagagctctctttagtgcaagctgcaagctcctgtagcataccagggagtcctatagccagtacaactggagctagatgattctcctggagtagattctgggctctaggtatgagtggcagtcacagcatagagaacatatgtaaacctagaaggatactcacgttgagttcctcctgtctgctgaaaaccattcagacttcctggattgctcatatgagaatctgatcctttggatgctggttttatttagcaaaactgtacagacattttactgaaccatttgaaatttatttatgtcaccaaggaccaggaaggtgaaatgctatatctggcgccataaaactattgtctgagcttgtttgtcagaaaaatctatatctgcatggtgtgatcaaatcctcagccctgccctactggctgtgtcctaatggggaaggcataaaaacccccagaggactaagagcagtcattgtttagatttaaggtggcagagttagaacgagaatgtctgtcaccccaggttagaatcaaggataacagagctgcttagaaactaggaacccataagaagctttagactaggcagctgtttggtgcgaattttgttaacagctggaaaggcaggtgaggagtcatgcttgaggcccatctctaagatgccgcacttcccgcagagtctgagaaggtagtgcattttcctcagcttacattaccctctgtcctcatgcaaggaagtctgctttccaggtccctgcctccctgcctgcctgcctttcttcttttgttcctccctcccttccttccttctgtcctccctccctccctctcctctgtcttttctcaaagcatacatcctctttacagggttattactgacttattgtgcttgtcactacctgtgttgcctcaccggggccatgacttctgttgttttgttcacttaattgtcttgtgaattatcagtagtgattgacctgtagtcggagttcagtgaatattccataatgtgtggatgaaacatttttgtcaaacaaccccaagttgttgaaccttgtgggaactctcaggttttaggtattattagcacagagaggtgaaataggtgctgtgttgtttttcacttgtgggatcctacttaaagcagcagactcacgaacagcttggttatgggagattatcagtaacaatggcagtgatcactagcatttcttgaatcagagctcactacctgtccgacatgcactgtaggaagtcctgagctaacagtgtttcgtggcactcatgtcctcctctgaatcttctcacagtccagtctgggaggaagaactagaccgtctgtgtgttcagggagactaaggctcgagagggaagttgcttcttcagggtgtcacagccagtacaggcagtgatctgaggattaagttcttagcgacctgtaacattcagtattgggtttagggtgttttctcttggaagaggaattgaaaacacggaagactaggcaagcgacagtcttcagggtgtccctgggccaaaaacatcaacctccaaggtggtataaaccacagcctggaaaaaagacagtttattcagctcagccttccagcatccccacaccctcaggtcttcccattctccattacaaagaacccttcatcttcaactggtaggctttttctgcttctcggaaaacttccctgaaaccagccaaagaaaattcctgtggtgacaggtcacactaaaccgtttctagggaggccactgtagcagtcattcacaccctgccccctgaggaaggtgggtgggaagaaactccttctcccagcgtctctaacgcggccctgtggaggcctcaggaaggggctgactgagggctgtggtagtttataaatgtgagcacaacaggtcccttgtgagactccggcgagcctgtgagttctaggaacactggacttcctaggagcaacagggacgctcgccacccagtgtgcacaaggctagcattcactcacagctctgcaagtcaggctgccctcgtaaagtcagcaacaccacacatggggcgcagattccatttcattcttaacggaactcctgtgaaccttcactgctccctccgtagacacaaacagcttatggggaaagtgctggggttgcagctgtgtgctaccactccagcctgggaccacaatttgccaatctgctggcatttcaaaagtcctgtttggaacttgagttattgcatagggctgggctgtgctggcctgcctttctgcagagctggctcacatgggctgtggagccatcctgctggttaccctctgatgctgccgcatgctccctgggagatgccaggcaggttatctagtcactctcccctggcttgtgtgccctgtagcatagggacactggaacactcctgtcctttctcaagaatattaatggagtcaatctgtctggctcccagagctcagcgtgtcagcactagccatatttttaatgtatatgttgtccctttctctctgtgtataagattagttgaaatttcaaggatttgccagccaaaggttgtacccgcatggtcaggagccacatgcagatgacccacacagatgcttggtttcaacctagtgaatgttagtgggggttagtatggctgtgtgggactctggggtatgggggggaggctcatctgcactgaaggtaagttccagacacaggcatgagcactgtctctgaacttgtatggactaggtaagaagtaggagtcagcgagttactgtatatgatgaatatgtacttcagagtttttcagggatgcctggtctcaacagctctgtggttgtggtcattggaattagctcttgctagcagccgctgctccttgattctgactgatcacactatcctcctgcccactttccctctggatgctggaggagactgggattctcagctcagacattgtggtgacttttctcacttctcttctagctcaagagctggactgtggaggaccttcagaagaggctcttggccctcgaccccatgatggaacaggaaatggaagagatccggcagaagtaccggtccaagcggcagccaatcctggatgccattgaagccaagaagaggaggcaacagaacttctgacaacaccagcccagccttggtggcttctgggttgctagactcatgtctgttagccagcacttctgctctgtcatctctccacagcacctttgtgaactcaggaatgtgcgccagtgggaagggctgcttggcagtcacagtgccatttggtgtgtgcatttacactggcaaggtgtatcttgaagggtttgtattggtgcttttaactcagaattctagaccccaggagcagagactcctagttcagtgatagctgggaaattttttacattgtttctttttgttttccttctagtaatagcttttggttgctcgccctggaagactttttaaaaatctataaatatgcatatattatatatatatataaattataaatagattccccactctgtggtggtgtctctgtacaggtacagtttcaaacactttgcctctttcctgtgagattatggtactgtgcagcaagcgggcagaagacactgggaggctcgtaggtggtcactgaatcccagacgtcagcttcacccattgcagggttgcatggagaaattagtcttgggatggttgtgccaccacagtgacgagcctcccatggtccccactggcctcggaagctgtcggtgacgccaggaaaaaatgtggagaacttgagagtttgctcttttcccaggagacgcctgcaccctctttgcagagtagcctttgctgtctcaacgcctttcatccatcgccaccctcccagctgcctaaagtcgcatccaagatactgcccagtgccttaagaggagacacatctgtgaaaggacaggctttcaagaactttccagcaaaccaggccctatccagtccagaaaatctcagtgttcctgggtaaaatcacacacggcatttgttcttcatttcgtagatacagggtaaagggcattgcttccatagtccacatccaaatacgtgattgtttattttttcattcactgtggaggctctggcaagggtaaattaatgcccaactgaggctcactcccagaaggcttagttggattcagaatggtagggaagggactgtcatagtcatagtaggtctgattgtattgtccaggtggaaaaatgagactcagaggagaggtgacattaccaacaccacaaatcagggtagactagaagtagggattggaattcagagcatttgtcctgtaccactggaccaagagcctcttcactgagagaatgaagctaccactgtacatcaggttggcccaggaacccctgctctttccttgcctctttggtacctgagctgctatggaaaggctccccagaggagccgtgtcattcagtcccagctactagtgggttccttactgtgtcccagagacagacagtctctcatggagggcctgcagcagggtagaggactttgcagaagacagttacggagtcatccccgcatctttggctcaaaactgcagtcagaaggaactgggaagccagtcgccctattatttcttctcatttcatccctccgatgggagccctgatggggctgcacctgagcattctgaaattcgactccataattgcttttgctccctaacctgagagtcgataaagtggcaggggatgttctcttctgtgaccagattctgttctttgcaattaaagcaagctttaaaaaatgcaagaggcagctggtctgcaggacttagccaataaggtaactgtgtgacagagagaattaggacaattcggggatcttgctgagatgataaatggctgctaggacttcctgggaagcacgtgtcaggcactggcctaggtgtactacaggtttcatcgggattccctgggcttattaagttatttctcacatgatgaaatttcgtttgaaaggttccttcccatgacactgtggattgggatgcatgacatcatcctgtggggctggtagtcacagggacagcaaagtcctaaatgcttagaatgaagtgaccgtggcttctcacgaagacttaagtctaagtggtatgttcttttaaagcttagaaaccaggtgaattaatagtctagtccccaagtcaagaaagcttttaaaacccagtacacagggcctgcataacatttgctgtgctacttaatagcccagcttcgagctctttcctcttgaaggaaaatgctttgggctttgccagacaaggaaaacgcccacagctcccttctgaagcaagatgggtgtacaggaaaatagcctttcctgtgactcttctgcagccatgaacctagatctggagtctatttggttgcaggcaggcatgcatgtctgcactgcgcccacagcttggtccacagtcaggtgcctggcaggtcagctcaccagccgtttgccggaagccggctgttttggattcctggtgaggcgtatgtgctgttcggtggcagaggggagcaaactgtcctttccttgaggaccgaatccaaggaaccccgtctcacttctctagagcttgaacatttgtggctcaggcttgcagtggactctctgcttccaagatgtggaggccacacataaatcttcttactagcaaacaaacaaaacctcatactctctgaacatattgtagtgttgctcccattcagaagcttgaagcacatttccatctttatttcctttatatacatttttattttatataagattttacattccccagtagattggacgagaatttgactggctggacgtgagagaggttgctgggtgtgtgaataaacagagtagtaatcggaagcctcaggagttgggtcttgagttccttacactgtagactagcacctgacaatgccagattcttattttaccatttaaaactcagtacccctgtctaatgtcaggaatgagagagatgacatcactgcagatcctgcagacactcagagactagtagtaataatattatgaacagcttcttgctaatacattccccagcttaagtgaaatggacagatacccagaaaattacaaaggaactaagcttactcagagatgaaatggccaatcgcaacagcccccagccccttttctaccggaacttggtagctctgagagacatgggactgacgctccggtaacaactgtccctcagtgtcatgccagcagacaagtcccattcttatgccactggccttcccagcctaagtttcaggctctaaagattgctgtcctttattctgggggaagtttttccagctcaaactacaccctcaccctcaccaccctttttaaagcactgtttttgtatttttattagaattacatgcattgtctttggaatccgtgttctttgtgtctcttccaccagcctgcactcagaccaacttggagagaaaaaaaaaatcttaaatgctgttgctgatgtaaatttaaaaaaaaaatgtgaagtttgtagctttaatcttttgtaacaaaaactaattaacactggctgtaagtgctgactcgaaatgctattttgtaaggtttggatgtaaataatagaggtcagctgtttgtatatgtgtgagacatagcttcttccactgccatttggtcttaacttgaggtacttcctgtgtgcttttatgttagagttgtcccctcatttctcccccaacacctgtcacccttgtgttaaataaactgtcctttagaccacagtctgtcccctttcttcacatgaggttttcatacatgtcagtgctgtgcagtgtgttgtgattcttgatgctactgggtggatattctggggtccagagccaggagagaggtcagcttgttgacacacgatgacagaaccagttggcaataccattccaatgaactggaatggacatagttgtgtgtgtatgtacgtgcgtgtgcgagatcttttaaaatgttttatatatatttactatataatatatattatctccccatacacatatacacacacacacatacacacacacacaaacatctccccatccttgcctctttcattcttcccatccccctcttctgagatgtcccctgagctttgaaggggtcctcacatcccacctgaggctaagcattccaccactaccctcagtgcttcctccagttgtaggtttctgcattaaccactgccggccgcaataaggaacttttctgatgaaagctgaaccctgggcttgtgtatgtagagggctgtttgacaatgccactgcttagcaaaatgatagcagttggtttcttcctgggtcagtgactagacatacccgaggagcagctgagcccagaagcaccactggggagactgagggaagtgtccagcctgtgtatgcagaggggagtgaccgtgctgctgaagcatcggggaagcatccagaaacgtgaaaagtgtagaagaagccaggccagcagagggtggggagggaggagagaatgccaggtggaaagacaggctggggcaagagcctgatggacagccactttgggccagcattcaagatgaagccgtagggccgtgcccttgggtggtacatcctcacccaggagttactcagtctaatgaccctgggttctctttagtcatagaaagttcaccagtagtggggaggggccgatggatgtggaagggcaagtgcggatcttataagtcaggctgtagcatttaacactctcattctgtgttcttctcttggagtggggcagtggcatcttattgcctaatgtgttcactccctgaaacaggaggcatacctttcagactctctccacggttgacacatactcctgttggtcagattctcagtctgagccgattgaggaatgatgctgtagttttctaagcaattggcatgtgacagacagtgcagagcctttcagatattccgtgcttcctttcagtggctgtaatgctctccgagcccacagggagaatatatgtgagtgcatgcgtgagaatgtgagtgtgtgtgtgagagagaatgtgtgagtgtatgtgcgtgtaagaatgtgagtgtatgtgtatgcgtgtgtgtgtgtgtgtgcatatatgtgagagaatgtgtgagtatgtgagagagagataacatctgaaaattttgaccaagggactggtatttaaagatgcacgtgtctgcagtgccatcatgagcgagaactcaagtttaatcaagaacatatcaaaacaagtttgctggtgctgcacacccacagttcaaacagaagaactgttgaaggtagctaggacgtggaagagcaaatttttgaatactggtgagcctacctgagacccagtagttcagggtgatccctcaatggaactgtgcacatatctctacaagacgtgcatgtatatgcatggcatggcattgtttattgtaaccatcgccgtgctgcccagtccagagtctcaggcattctgggatctcatacatgttaggtaagcactcgcccactgagccttagaactcttttaagttgtccaagctgtatccaggcaggctttaacttagcatccaccggcctcagcctcgtgagtagccggggttataggtctgtatcataagcctgtaacactggtattcccaggtggtctccatggaagaattaacctagcacattcgtgcttggcctcttaagatcggaagaagtcaggtacattcatggtggtatgaggtcaggtccttcatgttgtaaaaggaagccatctggatgcccagtgacagttgaatggataagtgacataagtcactgtactggagtactacacagcacggcaaatgaatcatcagtagctgttgtggggaaaagcagaggctgaccaaatgagagaagcaaaggtggctcatttagagcttgctctgtcacacttaaacttgtgcagactcagaggtggaaatgaagagtgggaaccttactctacggtggaaagacgtagaaggcttcagccttgaatggaggcgggcgatgggctgggatgctctaggcaagctaatgtgctgctagttggtcctcattggaaatgaaagacattatgcgagcctgctactaatcaagccctagccttcttaggctggtcctcactgaagttatggctcagcttcttgaattgccactagaggtagccacaagctggctgcctgcaaggtctagctagtggcaggctggcttcttgagctgtttgctgtaagaatgaaattggttttctgggtagttggtggtgggtggaaagtcaaagctctttgaatgctctgccccttgtccacttgtatgttccatttctaactatacacaaaagcctggctgatctctctgatgctagaataaagtgagactgtccattgttggatgaatggacagatttgatttatattcataatggacattactccattgaaaaaagatattctcacatgttacaacttggataaaccttggacattacaataaaagagcatatcaattattttgcttacagggtcctagagtagccaggaaagttaattaagcaagcccagataatgttttggttgtttttgtttgtttgattacttgcttgtttctttggttttttctggggggggggcacaagataaagagtatttctgttctacagttaagaatcgctgaatacttggagtagagttaagttggaattccaaagttggtaactggttgttgccaaattcacacctttatggaatttggggttggtcaagtgtgattgcaagaggcatagctgcaccgagagtggggagaagcccaaggccccataaaactgacacaaacagttcacgacctttcttggtggaggaaagctcccagattccttcttgctcaaggttgcttagctagaagtggaatcaatttagcctggaaggctaaaagtaaactgggcaggaaagaatctagggcatacaaaattgcaaacacttgttaattgataccatgggctggcggaaattttgtgtgtgtgtgtgtgtgtgtgtgtgtgtgtgtgtgtgtgtgtgtgtgtgtgtgatatttgattcagtggggaaaatgtaacttggggccatctctgattttgaaatggaatcacttaccagggatttggccttctccatgctagctccaggatctggctggcctctagcaaccaaatgagttggcgaatgaaacttggaccaaatgctagaccacatgaattgggccttacagaatccaaatccattggcattctgcagaggaagggaataaaagatttctgaagacagtatgctggactggacttatttgtggtttcttcccataaatcccactaagtatggcctccagtgaacccagcatgtgtttgccttgctcggaggaatgtctaggtcaggagtactgggcctgtctcaaaatacaaggtggagtcaagcaatcagggaagacttatgacatccatatgtgtgcgcgcgcgcgcgcacacacacacacacacacacacacacacacacacacacacacacacacacgtgttacgtacatctgccccagaaggaagatggaaaaaagggaggagagtgagaggaaagagagggaagaagaacggagggagagaaagtgacagaatttcactggtgcccactgggtttacctcccactttgtgaagggcacatcctctcctcatgcaacaggatccactgctggctcctgccttgtcgttgggctttgaggatgaatttcaggctaactgtggacatcaagtaattttgtgtccaaaggtgcccactgggaactgggcactgtgtcctccacctagataggaagtcaagtatgactggcaagggtagccacgggctcatgaggctgggctcaagtgtgcccttgaggtgtgctgtttcatgaggaggtaggcacagttggggaattgtgtatctgtcttctaatgaagcacagggacccacttgcagatagatccattgacccacttgcagatagacccattgcgtcacgttgctattgagttgtgcaagcttcaaggttttggtgcctgtggcagaatgctcccctaagggacacaataatgagttcctagagttggggactgggtctgtcacttgggcatttctcatcttatccccaggaatacaagtataaagggagttacagtgttgtgctaggcaatcaactatgccatcaaggggaaattccattactgctacccagaaggcatcaaggagttcatgtaaggccagggtattccctgaggcatcttatggctcccagcactttcaagggtttagattctccaggaataaagagtcaggctaccctattaaatagtgaatctcaaccagcagaagtgccagccaaagacagggtaaaatagaatccatgccagcagcagcctgtgtacaccacagcaatgggatgaagccatgatgtcttcctcacgactatgtcttttataggggtctctccagtctcatatacagaacacgctggaacagttcacttgctctttacagaatactgaggtagggtaagtggttcccatgggagaaattgttaccagtgaagagctggagccatccaacaggacatggtatggaggaggtgttttccctttggggagtgtttggattatatgtgaccatttctttatgttaggaacatgcatccgtgtgtgcatttgagtatgtgtgggtgttgattccccagagctagagctacaggcacttgtgagctgcttagcatgggtactaggaacggaatttgggtcctctggaagagcagtaagtgctcttaagcactgaagcatccccagacctcttctcctgcatcattttgcttacagatccagtttccctccaggaaggatggtggtttggcttttctctttgtgggactggaggacagaattctaggtttgcaaatgtagtaaatggaacaaaattagtaattcaaaaacacagccatgtgttggcacgtaagacacaaaaagaacaggtatccactacattgcaaacctggatttcccaacaccacacacacacgcacacacacacacacacgcacacacacacgcacatgcatgcacacacactcattcatgcacatgcacacacacggaaggtaattataagtgaagatttggagagcaatatcccctaaacagaaaggaggattctgggctgctactgaggtccccagaactcccctaattgctctgttgcctcaggccttgtcaggtttttttttttttatttgactgggggaacttgatgactcttttttagcgtgctagatggtagcctccaatgttaccttattcagtatgtgcgtctttgcaactgtgatgggaaggatctggagatgacatcatcttgaatcgtctccatggaccctaaatgccatcacaagtatctttataggagaaaggtctggggaaatttaatacacagtggaaaatgtgataccatgccaggggcagagactgtggtgatgccaggggctggggaggtgtgagcggggctggtgttctcctcttatagttcccagaagcagagccctgctaacaccttgactgtgtggacttttggctctgagaactatgtaagaataaatattagtttaagccacagagtttgtggtcatttgtcacagaaccactgaaaatgagtgtcccttccaattcatccgttgaggtagttgccagtttctaatgtttgcaaacacccacacctgctctcgcttatcgtcttcattatttgacttgttttcctttttgtgctgctgggaactgaaccccgggtctcaggcatgctagatatgtgctctctcactaaacagccatctcagcactttattttgaaacaggatctcgctaagctccctgggctgaccttgaacgcatcctgtagcctgagctgactctgagatctttctcagcctccctagtcacttggggttgcaggcctgtgccacaaagcctgatgagttacactttctgatgatgttcattccagcaggattcttgtcccatgcaaactgttccggctggtgcggccacagacatg

SEQ ID NO: 666 - DNA, 1566 bp, Mus musculus
ccgggaggatggagcattgaggcagtctgggcggctgccggcagcgccatggagaccgtgcagctgaggaacccaccgcgcaggcagctgaaaaagttggatgaagatagtttaaccaagcagcccgaggaagtgtttgatgtcttagagaagcttggagaggggtcttatggcagcgtgtacaaggctattcataaagagactggccagattgttgcaatcaagcaagtgcccgtggaatcggacctgcaggagataatcaaggaaatctccatcatgcagcagtgtgacagccctcacgtagtcaagtattatggcagctactttaagaacacagacctgtggattgttatggagtactgtggggctggttctgtatctgatatcattcggctacggaacaagacgttaacagaagatgaaatagctacaatattacaatcaactcttaagggactagaataccttcattttatgagaaaaatacaccgagatatcaaggcgggaaatattttgctaaacacagaaggccatgcaaagcttgcagactttggagtcgcaggtcaacttacagataccatggcaaagaggaatacagtaatagggaccccgttttggatggctcctgaagttattcaggaaattgggtacaactgtgtggcagacatctggtctctgggaataactgccatagaaatggctgaaggaaagcccccatatgctgatatccatccaatgagggcaatattcatgattcctacaaaccctcctcccacattccgtaagccagagctgtggtcagacaacttcatggattttgtgaagcagtgtctggtaaaaagcccggagcagagagccacagccactcagctcctacagcacccgtttgttaagagtgccaaaggagtgtcaatattgcgagacttaattaacgaagccatggatgtgaaactgaagcgccaggaagcccagcagcgggaagtggaccaggacgacgaggagaactcagaggaggatgaaatggattccggcacgatggttcgagctgccggtgatgagatgggcactgtccgagtagccagcacgatgagcggaggagccaatactatgattgagcacggtgacacgttgccgtcccagctgggcaccatggtgatcaacacggaggacgaggaagaggaaggaaccatgaaaagaagagatgagaccatgcagcctgcaaaaccgtctttccttgaatactttgaacaaaaagaaaaggaaaatcagatcaacagctttggcaagaatgtatctggctctctgaagaattcttccgattggaaaatccctcaggatggagactatgagtttctcaagagctggactgtggaggaccttcagaagaggctcttggccctcgaccccatgatggaacaggaaatggaagagatccggcagaagtaccggtccaagcggcagccaatcctggatgccattgaagccaagaagaggaggcaacagaacttctgacaacaccagcccagccttggtggcttctgggttgctagactcatgtctgttagc

SEQ ID NO: 667 - protein, 501 aa, Mus musculus
PGGWSIEAVWAAAGSAMVQLRNPPRRQLKKLDEDSLTKQPEEVFDVLEKLGEGSYGSVYKAIHKETGQIVAIKQVPVESDLQEIIKEISIMQQCDSPHVVKYYGSYFKNTDLWIVMEYCGAGSVSDIIRLRNKTLTEDEIATILQSTLKGLEYLHFMRKIHRDIKAGNILLNTEGHAKLADFGVAGQLTDTMAKRNTVIGTPFWMAPEVIQEIGYNCVADIWSLGITAIEMAEGKPPYADIHPMRAIFMIPTNPPPTFRKPELWSDNFMDFVKQCLVKSPEQRATATQLLQHPFVKSAKGVSILRDLINEAMDVKLKRQEAQQREVDQDDEENSEEDEMDSGTMVRAAGDEMGTVRVASTMSGGANTMIEHGDTLPSQLGTMVINTEDEEEEGTMKRRDETMQPAKPSFLEYFEQKEKENQINSFGKNVSGSLKNSSDWKIPQDGDYEFLKSWTVEDLQKRLLALDPMMEQEMEEIRQKYRSKRQPILDAIEAKKRRQQNF

SEQ ID NO: 668 - DNA, 129555 bp, Homo sapiens
ggggaagatgatcagtttggaaaatgggtgcctcagggcattaggatacatttcaaactcagagctctttgggccttgtgttaaggcagtagagataactataacctgttcaggcttgttggtctgctgggctggcgtgtttgtcattcttatgtgacagaaggacactgcgctttttgccattcaaagggaaccaagtatttcctcattcactcattccagcactgaacttgataacagacaaaagataaacaagaaatagctagcttctgcctcaaagaaatccatgctgtaactacttgggtttgggtggataaatggatggataggtgtgtattttattacaaaaagcatttaaatccaagaaagaaagaaaaaaaaaaaaagaaaagaaagggagggagggagggaacaagatgataaacgtatgataaatggattgaccaaaagttgtaggggcacaaaacacccatgaaagacatgagactagttttacctggtcaagccagggaggactttgtcagggaaatgataattgagctgggtgtgatgggagtacagagaacttaatcaggaaaaagtcttaagctaccccatggggagaattattagacattcttctaaggcagtccttaccctcaggaatcgcagaggctcaagtccttcactgtggccaccatgatctttatttacgtatttttttttgagacagagtcctgctctgttgcccagcctggagtgcagtggagcgatctccgctcactgcaactccacctcctgggttcaagcaattctcctgcctcagcctcagcctcctgagtagctgggattacaggcactcgccaccacgcctggtagagacagggtttcactatgttggccaagctggtcttgaactcctgacctcaggcaatccgcctgcctcggcctcccaaagtactgggattacagacgtgagccaccgtgcccaaccaacaatgatctttatttttaaagataattttcaaccacttcatacccactagtgtcggccattattttaaaaagaattgaaaacagggtctctttttgaaaattttgaaacatacagaagaccattatctcagaatccaccactagatttagcacgttatattagttcccaacttttttaatttttagagacagcgtctccctctgttgcccaggctgaagtgtagtagcacaatcatagctcactgcagcctcaaactcttgggctcaagtgatcttcccagctcagcctaccaagcagataggactacaggtgtgtacccccaagcccagttaatttttaaagtttttgtagagacagagtcccactgtgttgcccaggttggtcttgaatgcctagcctcaagtgatcctcccgctttggcctcccaaagtgttgggattataggcatgagctatggcacccaacccttaaaaatttttttgataagctaaaactccagccatccccatccttatccctgtgctccctccccagactcacagaggccagtacaatcctgaagttggtatgtaacattttcaagcatgttctacatttacatatatatgtatatatgtatatgtatatatgtatacatgtacatgtatatatatgtatatgtatatatatgttgtttgtgtgtgtgtgtgtgttaacaggaaagataccattttatgtctattaaagcatttcctaagaggcatcatattgcctatccttctgcaacttacttttttcactcagtatcctgttgccatgttgatatttgatatctttcattcaataccaacaataacaagcgttttcccctcttgttttgccaggcccagagacggaaagtacaaagactagtaaaatacatccttgcccttaaggagctaagtacccaaaacctgtaatccatcttgagtcaccagagtacggttgctcagaaacagcagtggtgcggtggaaagggcatcaaccctgcgatccggacaagtcactccatccctctgatcatgcgtgcccacctaccacatgaggatatcacttcatagacttgctggaagggttcattgtgttagcctgttccctgagctctcttcgtgatcaagaagactgatcagataaatcaagagacttgcccaaaattacctaggaaatctgtagcagcagcagaaccaaactccggtccttgctaaatctagataccaggctagcttttctatggacccagaattaacccatacaaatgtacaagcttttccagaccagctggggtgagatgaatgaaaatggcagcaacatcaatacctcagcttcttcagcaacttcatcaagtaaggctgccatgaggaagtgggcctaaaggagagttttctagaacaaagaagggggcaaaggagtggcttgaaactgcaaaaagtgcagacaaaaaaaaaaaaaaaaagaatgaaatctggagaggatgtgaggagaggtctagcaaaatgattaaaaatttggacttagcatcaaagtcaaacagatccatattcaaatcgtggctcttccatgtcttcactatgtaaccccgagggagccaatttaactctcttggactcctcctttctaagcattttatccacagggccataataaagatcaaaggagatcgtgtctaaaatgtctagcacatggtaaatcactcaagagatgctagccaagaaaaggaaaaaaaggaaggcggcaaagggaaataggtactgaacggtgactcacagaaaccaggatccaaggctcctttcaaaagtcaaggctttaaccaatgagggtttctgattaagtcaccctggagaaggggctttgggcaaaggtctgcggtatgctgacgaaagctggacgctgggagaactggtaagaatatgctatttttctgtttcaaactctccagtagcttcccatccagcagctttcatgccaagcttccagtttggcatgaaatccgaactccttagcagagtttacaacacctccacaataaataagggtctgccttcctaactgacctcatgtcttcctattccctgccctggctcactatgctttgacccctgaaacacaccatgtttatatcgtcttggagggggggcctttctcattgcagttcacttcaggaccgaaaaccttgtgcgcttggcttctcatcatttagacatcacctcaaatatcacttctttacagatgttgcccttgatctcccactccagtcaactctatcacatcaccctatttgtcttcttcctaaccctgattatcccacaggtctcgtttacttactgactcgcttaagactcacgtcctccccaccgcccccacaagaatgcgctgtccttgagagaagggactttttgtgtcttgttacacaggcggtatataacagctactcaacaaatactaactgaaaaatgaattgctgcgggggaggagggtttagctttcttctcagggctcagaacgaggcctaaataacttaggatgggggccaacagggcagttaacaagcaggtggaaagaaagggccgaggaagtttctggtaggatgccggagtcggaaggggctggaagggtgggagggccgggcaggactgctggccgccgcgcgaggcccgggcggtggttgcgggagttggaggagcaggcccggaggtgagatgggggccggggtcgtaccttgcgcctgcagcacccgcagcgcgcggccgtagagcgcggaggcctcggcgtactggccgttgcggaaactctcattgccggcggcgcggagctcctccacagagtctgggaatttgggggccatcccgtggccaggccggcgagttgggagctccttccttcctcccccgtgtggtgcggcacaccttccaggcgcaagcgccggcggcgaatatctccgcccaacagcgaacccgcggcgagggggcggggcctgcgagacctggaggcccggagcgtcccgccctctgcgcgtgctcggtttggaacttaggctcccttgcacgcggggcggcagcatgctctgggctccctgagttgctagaacgccgtggatgacgcagggaaggaggctggccccgctatcagggagattatgtcctagtggggtccccacaggcaattaactgataagcaaacgaagactctaatttcatgtgattagtgctgtaaggaaaacaaaacaggataatgcaatggaaagtgaccacgtgtgggctattttaaataaggggatgaaggaaggcctttctcagggggtaatagttgagctgagaccagacaagatttagggaatgctgttccagccagagggatggtaagtgcaaaggttccaaggctagaaagtacctggtacctagtgctctatagatatttatttaataaattaatgcacaggtggattgatggtgtcaaagtcaacatatagagatgaatctctaaagtttaaatattttatttgggaatcaagaattgcaattcagggcttacacacagaccaggttgtctttggtatgtcagaagaacaaagagaaggtttggagatttttataaaacagaaatgttacatattgctcttcaaggaagtttacaggcactagtaaagtgggggtttatcagcttcttggggagctggcaagctttgattggtaagtgatagtggtggataaaactcagaattgtagcaggctgtttcagtagctattagataaaactggttttaggttacagcaggcagttttagcagccaggcttgcaaaaaattacttttttggagcaatgttatatgccctgagtatttgttcccctggcttttcaattctgtcttagttggatatgacaagaatgacccaattcgtatgatcagctttcagaatggatgaagatctttcacagagtgtgacttcaatttatctccagcctcatctgacgactctatgtcccacgcattgctatctacacacactaaattcttgcttcctagcctttgcttgttatctccttctcctggatttttttttctaaatactttttctcctgcctaatcctgaattaacttataacattccattcaaacatcatcttctctgaaagcctttcctgcttccagccccctccccaccccccactatgctccctttgctccctattggtctctagctttatccctaactttgcattagtcaccctttgattgccagtttgtagttttccttaaacactgcgaggtctttaatggcaggaagtgggtcctttttatctttgtttatccaagaccctaatagggtctggcatccaataaaagtcattgattgataaagatctagtctctaccttcaggaattcagttataatgatctgcatacacttaactccaccagactataagctttctgagggctggatggctgttccatctgaaatgcttccccttgccctctgccccgaccaaggatgaacactgactgtggtgggaaaaccagatgaggcccatgctgctggctggctactcagtgacttccatctttgcttccaggagcctgaattttgcctgagactctcccagcctggggaagtgaatcaggattgctctaagccaattagaaaaatgtcattttctcttgccagtgattcatcaagggatgcacatgtgatgctgatctgggcaatgagataaaagggagtctgaggctggtcgcagtggctcacatctgtagtcctagcactttgggaggccgaggcgggtggatcacaaggcaggaaatcgagaccatcctggctaacacagtgaaaccccatctctactaataatacaaaaaattagctggggtggtggcacgcacctgtagtcccagctactcaggaggctgaggcaggagaatagcttgaacccgggaggtggaggttgcagtgagctgagattgcactgctgcactccagcctgggcgacagagcaacactccgtctcaaaaaaaaaaaaaaaaaaaaaaaagagtctgctgagtgtttatgggaaaggtttccctccccataacagagaggtactgggtcaagtagccattcttgctctttttctgctttgggtagtgctgggttaaggatatgatacctggaggtgtggcagtcattttgcaaccatgaggcaataaacacaagtatgaaaagccaacatgctgagtaggatgggaggggaaaaaatgaaatagatattgctgagtcattgaatcaactgctgacttattagcttattaataaacaataaaggcaaggtgtggtggctcacagctgtaatcccagctctttgggaggccgaggtggacggatcacttgaagtcaggagtttgagaccaacctggccaacatggtgaaaccccatctctactaaaaatacaaacagtagctgggcgtggtggcatgcgcctgtaatcccagctactcaggaggctgaggcaggagaattgcttgaatccagtgagcccagatcactgggctgctgtggtccatcctgggcaatacggcgagactctgtctcaaaacaaacagtaaatgccatggtgctttaagccaacatttagatgttttcacttgcttgcagctgaatatttcctgagtggtttatcggataagtgtagctgtggcaaattttattttccaaaaatggccccaataatatttctggttccccaagctcttccagacccttgccactgccctatgaggaggtggagtctacatcccttctccttgaaactgggtgggcctttgtggcccccctccacagtggtaatgacattaagtatcttccactaaaaggcactgcagcatcccacttggctctccctcgggaacatgctttagaacccaggctttattttgtgaggaagctcaagaaaaatggagacgcccctagccttcagacccaagtgagcttccagccaacagctagcaccaacctgtcagctgtgtgaaatgccttttggacagggctgattgatcctgattgacaccataaacagagatgagccttcctgctgagccatgctcaaattgtagatttctgagaagaaaaaaagactgttgttctatgcctataaactttggggtggtttcttacacagcagtcaatacctggaaatcccttcctgcagtgcttcctataaatgccaggactgataaaaacagtactgaaataatttgaaggagggacagatgagagggtcaggggagggacaagggaacagagaagtcttctgggaagaggtgtctttttttgtaaaatagctttattgagatataactcacatattgaaagtgtacaattcaatgccttttagtatattcagagttgtataaccattactacaaccaattttagaacattttcatcaccccaaaatgaaatctcacaccttttaatcatcccctccaattcacctatgctcccttccaccagggccttagacaaccacaaatccaccacaggatttgcctattctgaacatctccaaacctgccaaagctatgccattaaaaggcactacagcaaagagcatcatgcaacttgcatcacactgggggcctggcacagaagtggcggtggtggcaccaggcagggcctgatccacggggtccagggtgaccatgtgggtcatgcaaatggcattacacaaatatgccatgcttggctaagttttttgtagaaaaggggtttcaccatattgcccaggctggtctcgaactcctgttctgccttggcctccaaaagtgctgggattacaggtgcaagccatcatacccagtcccttgaatactgttatgcaattgttccccattttctgccaggtgttggtttgaggatctattaggatactaaaatgtgagtatactcatgtactatagttgaccctgcagaacctatggaaacgaaaagtcagcccaccctatacacaggtttcacatcccatactgtattttccaaccatgtttcattgtggatgtggaaccctctgatagggagggctgactgtatttattgaaaacaaaacaaaacaaaacaagggttgtattggtggacccatgcagctcaaacccttgttgttcccaggtcaactgtatatccagagcttataggaaaatacctctcccagtaaccctgctcaccatttctctcttaagctattattatgattagccacggtttgctatttaaatttaaatttaaataaaaatgtggcctttcagttatgctagccacatttaaagtgctcaatagccatatgtggctaatggttactatttcggacagcacatatttagaacattcccatcatttcagaaattttcattgggaacactctgcggaaaaagggggccatcataatgtgagtccatcttctggaaaaatcctgggaaggggacaaaggaggtctgtttggcattgtgtaatggtaatttggtatttaattttcaaaaatgtttacccaattcctattcatcagccaggtgtggtggctcttgcctgtaatcccagcactctgggaggccgaggtgggaggactgctgcagcccaggagtttgagaccagcctgggtaataatagggagatcctatttctacaaaacaccaaaaacaaaacaacaactttgatgttgtggagtcaggacagtcctgggttaaaacctttgctctccttagctgtgtaaaccgtgggtctcagctttcttatctgttaacggtaggtacttcttcctagggctgttttgaggattaagtgaaagtccaagattgtgtctggcacacagtagcttctcagcaaatgttttcctcctatgtcagggaatggctcctttatcccgttttgggcccatgggtggccctgaagggtgggtgctcaggtgttaagttctgtagatggcatatccttgggaaaagcaaggcaattaaaaacagtgagaggttgctctggttaagttttctcctataactttccccatgggtcaattgggtagaatctgccattttcctaatacttactgatggtagtggcattcggaagcacaatagctgaagccggagctctgagtggagagaaaggtctgtttctcaggcccaaaaagaggttacacacccatggctgtccagtttggtggtgcaggccctgaaatcagaccaaactggatttaaatccccaaacctatactctaagctatgtgaccttgggctagatacttcacctctctggccttatgaagtaggaataataataataccgtctaggttgttaggagtattaaatgaggtaaagcactgaaaacgtttagggactgtgttaaatcattaaataaataaaaacggggatgaccttatcggcttgacacaggggattaaatgagataatatatgaagacaagtacacggcaaatgcttaattaatgttgcttatttttatgtctgcaaactgacttaaaggggaggcctttaagaaagacagtggggcaatttgcgcgttgatgcattgtaggagaaaatgtgcagggggcccgttgggaccagagttcaaccaggtaagcggcagaaaaccacaaatacctccaggcgttcctggggcagcgccgcctccccaaaatcacgcaaaacttggtttgctaagaattgtcagctcttctaaaggaggcgcttcacgcatctcagtctgtgaaatgggacccaggacccaggtagaggtgcgttctcggcctggggaccgagtattttgtgcgctccggtaacgcaggaagacagcgccactgacactctagagaccagcgggcaccgcctggaggcgccttcaccacttggcggttccgggtccgcgccccaccgcgccacaagactcacgcccgaaccacgtgatcagggccgtggctccgccccgctcccgcgccgcgcgccgcttccggtaggggcggaaagcggaagtgtgggagggtctgcggggcgggctcaggaggtccgcgggaggatggagcagtgagcgggtctgggcggctgctggcagcgccatggagacggtacagctgaggaacccgccgcgccggtgaggggccactggctaagaggacgggcatggggtcaggggaagaaaaggcgggaactggttgaggggatacacctgtgtgggagtccccggagctaagcgacccagccgatggggcacctgctgagtgaggggggggacgtctggtgggtgagggtccggctgaggggagcatctgctaaggaggttagacttgggaccggttagagggagcactcgctgtggtgagactgtgctgaggaacgtggggacaagttagggagagtacctgctgaggccgggccactcgggggaacgctatccaagcagggactcacggaggtgggggcgaatgctgaagcagggtgagaatctgtgagggatctctttaagggggtggatcgagaactggccaagaggaaggccgggtggactttctaagggtctgaagtcccacttgaggggtgcggtggggggatctgtggaggggaaaagctttgcgcctaaggctgaaagcatgcgaggaaaggttgagggtctagcaagggaggggatggtggagggtagcatttcagaggatgctgttggtggtgtccccactgtaggatggcatcttttattactgatgttcagtgtcttcctaatggtcttcacatcctcctcagctcttcagaacctgacattgggaggtaggtaaggaaataagaggatattttcgagatggggagactgaggtccagagtagttgggaagtgtttccttctttactccgggtcactgaaccctgccagtctgtgcccttttcaggcctcagttgttttgtgaatatcagcaccaaatcctagtggtacctggaattgctttagttcaagatcaggatggtggctgatcctagaaaatctcaactcctggatttcccttgtggacatcccgggtcttttgccactctaccacatctggagaaaagtagggactagagaccgaaggagtcatgcttctctgaggttcagtgtggttacttctatttcacagagacgtctgacttcctgcagcagaatgagctctaaagaaggaagtgttcagggtgtggaagtgcagggcaaccaagaggtgaagagaagggattgactgcctgggcagcactcttaggggttgtttgagcttggggatgtttgaggtgcacaaacattgcagaaggcaaataggtggttgggatgggctttggattcaccctagcgtagtgtgctgagactgtaatagtaatgattattacactcatattgcacttaccgggtgccaggcactgttctaagtgctttccatgtgtcctgctgaagcatatgaaattgctgatatttgaccatttttgaaccataaaaacctcatttgaactcatttgaacctcacaacaatcctgtgtggtagatatccctatatgtctgttttacagatgataaaactgagatacagagggtagtgatttgctgggagaagtcatagcaagtaagagacagagctaggattttaatgtctatggggtctggtccaaagtccatgttctttttttttttttgagacggagtctcactctgtcgcccagtctgaagtgcagtggcgcaatctcggctcactgctacttccgccttctgggttcaagcgattctcctgcctcagcctcctgtgtaactgggaccacaggtgcgtgccaccacgcctggctaattttttgtagttttagtagagacggggtttcaccgtgttagccaggatggtctctatctcctgacctcgtgatccgcccaccttggcttctcaaagtggtgggattacaggcgtgagccaccgggcccggccatgctcttaactgcctcactctgatgcctctctaaaagtacccctgtttcacaggtctctgtgtatgttagcagatatttactatagtaccatagtgatccaattatgaatgcacactagttatgtttctttctgaactatgttcgttcgttcttcttggtttctttctccgaggccttggtttaattgaaaagaggattaggaatctgagttttgtttccccctttgccttgtcttacataatcttgagcaaaggactaaagtttcttggcatgctcattcctgtaccttttggattttaaaaaatgtattaaaagcacaagagaagagcattgcaggactgggttctgaagtggctggtgattcccagctcattgtaactagtagattgcctaatttgaagcagatcaattttattatcacgtgtatcagtttatcaggacaagacaaagtgtcatggagtgggtggtttaagcaacgtaaatttattctctcactgttctgaaggctagagatctgaaatcaaggcattgtcagagttgtttcttttgacgcctttgcttgactcgtagatggccatctccctgtgtctccatgttcttccttctgtacctgtcagtgtcctaatctcctcttataaggacaccagtcatactggattagggcatgcccatatgacctcattttatcttaattacctctttaaaggccttgtctccaaatacagtcacattcttaggtggtgggtattaggacttcagcatatgaattggggtaagctggggacacagttttattatgtaagattttgtccatttatcatgtatagttgttgtaatccatatcaaattctgtgtggaaaaagaaatagttacacataaaatgaactttatgggagttctgaaatgggagaaagctttgagaattagccagacctgtaagtgactacttcatagacaccattacttgtgtttggaaagatacaggtgtcttttcagaaattcagatggcatgtgtttccaataaccccagtgcaggaaatgccctttgtgttcgtgagtttgacatttgtgtgtgtgtgtgattaagtgaatgatgacagattggtgtctcatataggagttaataattttaaaaaatgagttgccattagattaatgttatagtggaaggcgtagagtgcattcctgggatgctggccatccacatggccatctgacttaggagaggagcatccaccagtatttggtccatggatgctctgttgatcaggcttgttcatttatgagcaagtgctgaaaccgtctggaacctggggaagtcccagataagagaactgtattatcagagtcaggctgttttggtaatagtgttttttctgtgaagagtcatggtataaaatattattatgaatcacttatcaaaatatttttatagaaatgttgataattcagtaatacttcttaggtgaaattctgttttattgtgataattcaaagattgctgatgaaattcgtgattcccatcattacatttgtgaatccatttcacaaatatattttgaccacctcttggttatcaggcaccagagatgtaatagcgccttaagttcaagttgtttttaatagccccggatcaaaaacaaacaaaaaagcacttagattgtttcaaagatgtattcgagccgtcatatgctaaatgacgagttaatgggtgcagcacaccagcatggcacatgtatacatatgtaactaacctgcacattgtgcacatgtaccctaaaacttaaagtataataataattaaaaaaaaagaaaaaaaaagtttgtcaaagtattatcagaggtttgcagctgtctatctcaaggcagtggcaatttcctttgttatgctgtggtccctgaagtagttgaaatagtgacttttgcattttgtaaaccacagagagtcaacacttcaaagaaacatacttgatcttcctttgtataagctgtttatacaactttgattatacttgagaagtgaggtattgtccaatgtttatacaattacaattcaggactttaccaaaaaaaccctggcatatgagatgttcgttctgacttctgagtttatagaagtttcagttctgaagtttaagaggagtttcacttcatcccttttcattttgaaggtaggagtttttatgatgtcattggtatttaatttttaggaccttttgattttcaaaggtcactgtgatcattttgttctgttgatatcaagttaaggcagttttgacttggagcagttctccatttctctagtttatagtccttgatattcataaactataagattgtccttctgagatcagtgtttattggtagatacacttgatgtggtcagggtttttgttggtttgttttattttttgtcttctaattttaatctgttttatttaggaaggtacacatttgtgtgtgtgtgtgtgtgtgtgtatgtgtgtgtatttaagtcttttgttgtaataattgatattatccagctagtctaaacctttttttttctacaaagaggtctccagtgtgactacttccatatttcaccgtttcctcagctctctattctttgttgttctttgtagtttcaggaagccattgtgtagactacacacacacacacacacacacacacacacacacacacacacatattccttggcaagttccttctttaagctcattagtaattttcagagatctcagagttttaaaaaaatgttaatttataacctcccatgtttgttatgattgtctagcatagtcagaaatctgaattatctggaaattgtgagcagccaagtacctttgatttttgggactagtcaaaggtatgtatctactcataggaaggtctttgtgagaatatctgaaactcacagctgcctagtgatttttcacttttgatcatatctaaatgtacactttccactttctgtttctgtgatacctacagaatttatgtgttttgacaaacttacaaaaaacttgctaatggaagagcaaaggtttcccgtgtcttccttagtctgcagtccaattcatagttatgtttcaattcatagttaccttacattaaacaccttttctgaagagataattacatcattttaattcatgaaatctcaagatttaaatagattttgaaggatacatcgaatgcttgaatctacagcatttcagccacatgactttttttttttttttttttttttttgagacagtctctctctgtcacccaagcttgagcgtagtggcgcaatttcggttcactgcaaactctgcctcctgggttcacgccattcttatgcttcagcgtcctgagtagctgggattacaggcatgcgttaccacgcccagctaatttttttgtatttttagtggagacggggtttcaccatgttagccaggatggtctcgatctcctgatctcgtgatctgcctgtatcggcctcccaagaaaccttgtttcttaaaacagtcttaactagtgaagtctgtatagagaagttcctgagatgctaattataaaaaaaagatatattttatgttctagttgctagcaaataaaatgtattttgtgtttatatttctttattcacaggcagctgaaaaagttggatgaagatagtttaaccaaacaaccagaagaagtatttgatgtcttagagaaacttggagaagggtgagtgtaaagaaactataggtaggtcattgggtcccagtctttttcctgccccagaagaagcagaaggatatgaacctttcagcattgttctaggtggggtggaaggtaaatttacagcttgtgatgtccttcttcgctttactccaatccctattatagacagatttagtgattcctggtctttttaacacgaagaatatctattgttttctcttttgtaggatctgtatgattttatctacttaacagatagcactaattagattaaaattctataagaaactttttaatttgctgttcataatttctgattggtatgcaataactgtttcaatgaaaatcaatgtaatttagtattttaatatttgcacctttgtgaaatatagtaaataaattaagcactatcaccaccttcacagctacttaggagatccacaatcctgggttgggagccagtggatttcctgaaacacagatttgttaatgcgtttataaaatactgatgaaatgatattagtaatgtgcagtgaccatcattgactttcatgatacaattaagtttacataatttttatacttttatatatcattttaattcaatcctgtgtatttattccttcttctgtaatgaccaggaaattaaaatgttaatgacaccatttcttaagtttttcttgttaatttttgaataggcgatacaatcatatgattcaaaatttaaaaaaatattaagacgcatacaataaaaaaaaaaaaaaactgcctcctacctctctctgtctcttagccacccagaatcaccaagggtagcggcttcttgtgtgtctttcagagacaggctatgtgtgtgcgagcgcacactcgtgtttgtgtgtgtgtgtgtctgtatttttaatcccttgggagtatttctggatcaagggaagacctgacatactaacttgtaaaaacaactactgactgatgactatatgctctttaaaataatttcctttatgtcattagattattttttgggtttagtattttttatgttaggagacagatttacaacgttaaacccaatcctggattacatgaaatggtttttttatgatttacctccttgtaaaaaacattagtcatcgtctttttgtaagttggaaaaatactctttggaatccagcaagaaatcaagcagagaagggaagtaaaaatgacacaccagctgtgctgtgaaaagacaagtccaagatgaatctgaagactgccagttgactggcatcattaaaggtatggggaaatgacagtccctctacatctgttgcctgccattttcagctttagcttgccatccttgctattttccctaaggcagcaaggctgtgacctttaatctaacaatgctcataagttatacttagaataagttcaagactgataggcataattgactatgtaacttatttctctcatttctaatacagtttgctcttactactacaatgtgaggctgacctgggttaaaatccttgctctactgtttactggtcataatagacaagtgggcttaagcaaattgcttactattttggaggctcacaatcctcatctgtaaagttgggataataatatatcaattcatagagttgtgttattacctgaggtaattggggtaaagtatagtgcttatcacaataataaatgttcagtaagtggcaactattgctattctattttaaatgtatcaactgaagcattttcaagacctcatcatgtcaagtcttaaagtatttttaggtgttgttataggtagctctgagctgattgggtttgtggaatgtcaaaggaagactatagacagagaatatatcagaaatataatgtaaacaaaaaataagctaattatgattttttaaattgtattttatttatttgtttgtttatttatttttgtagagacgaggtctcactgtgttgcccaggctggtcttgaactcttggccttaagtgatcctcctgcctcagcctcccaaagtgctaggattagagacgtgaaccactgcacctggacaaattgcgttttagatctatggatgtcttctgcaaggaatgtggaaatttccctatgaagatatcaccagggagaaaacaaagcttcagatctttcttcccatactatcaccttattgttcttctaaataataccagatttctggtatttcttggatttctgttattctgactgaatgaacctaagcaagcctcatttaactaggaatattttgaaggaagaccttcactgcacttcttttccaaacatgtgacacaatgctattctttttttttgagattaagtcttgctctgtcaccaggctggagtgcaatgtcacaatctcggctcactgcaacctccgcctcccaggttcaagcgattcccctgcctcagcctcctgagtagctgggactataggcacacaccaccacgcccgacttattttttgtattttagtagagatggggtttcaccatattggccaggatggtcttgatctcgtgatcttgtgatctgcctgcctcagcctcccaaattgctggaattacagatgtgagccaccacgcctggccaatgctattcttaaattgttcgggaggatgaatggtttgtgaactctcactgacttgtatcttgtgaaatgagctatggctaaaaaaactgttggattctggaggctgcaatcattctgtgttatgaggatcatatggatctgtggcagagtagagccaaagctccagaccaggatgagtggagagcacttgggaagtgttttcaagtggagcctagcaccttttttcttctacttaaagttgtacacattgactcatttgaatttttatcatagaatgataacaaaagcatcttgcccatggtttcataaaaaatgagtgctattgttaagacttgtatctgattaatttggcctcagatactgtggtatttccatttttctacatagatccttgccttgcatggcttatgtaaaacacctacttctccattctctgctgtcagttgtaattcattgaatcatctcattttgttgtagggaatcaagttttaagggacttgcttgtgagtatgattgctgaaatcttctaaccaccccctatccctgccttcagattactgtagatgcagtatatggaatcaggaatcttaatttcatgtgagctattggagttttccttgctatcaggatgcatagggaggtatgaagagtgttctggtcaagattgctgagtgagtgtatgaagagaactttctaatatataagaataatgagtgaaaattattttaaatataaggatatatagacagctatggacaagggataggaaagaaatctaaataatcagcggagactaaagcatgccttatccttgtcaggagattgcatttgagcttcctgcatgaagttgggggctggaactcggctctccatctgtgaactaaagctgaaataaatttgcctgaccacaaccagaaagtgtcatttgcctgtggcctagggaaaaaatggatatactggttcgataataggaactgagcttggattgtatttaagtatggtatcttgaagggcaaaaaccccaaactctgaatataagacctggtttaagttgtatatcccagactactgtactgagaaaaccatgaaatcatcgacagtgagtgtggtatagaggaaaatcattcaagagaaaatgaaatccatgcaaggaaatctactgccatgagataatcagcagaatgggagaattcacactgaaggaaaaagaaataatgaagcaatctcaaaaacaatttaatataattacaattttcaaaaagatcaaggaggagataacatttttaaaaggacatcagattattgacatgattattaacatatttgcccaaaggcagataaaaagttgggaatcttgacaatgaaaactacaacaattgaagttttaaaagcccaataaattggataaacagtaaactagacaaactgaaaggagaatttgtgaattgaaagatagaaatgagactgatcacaacatgcagaaatacagtgttggaaaccaggaagacaacatagattgaggaggtctaatacagttttggtaggaattctaaaagaagatcctagaagtggtagaggaaataatcacataataatcctgagagtttttcattcttgaggaaagacacgagccctcagattgaagaagtttatgaagtgccagatcaactcctagttacattacagtagaatagtagactgttaaggacaaaggaaaccttaaaaactatggggagattacccatggaaaatgataatctgataaaagctgacttctcagccacagtcgatgttggaacactgcaacaacagtgctgagggaaagctgttgtcaatccggtatccaaccaaactatcattctagagtggaggtgaaataaagacagtttcagacatacaggagctaatttatcaagaatgcctttggatggaagtaacaatacccaacaaacagtggctaaccaataaagacattaagaactaaataatacatctgggggtgtgagattcgagaagccgttaattggcttgacaatggtttgacatctgggtaattctcgtagtctcaaatggctgcattagtttcaagcatcatccctcacatggcagtaaccaaagaaagaagggaagtggcaggtggaaatgggccttcttgtgtgcttgtctcctaccagggaagaaagtctttcccagaaacctttcagcagaattatcttcaaatttcagtggccagaactgggcgacatgtttgccactagttcagtcactggcagaagggaataggaattctgtgagtggcttggactaccatggtatatctcctgggacgaagcacatcaccactgtaacaaattaggaagttattttagcaaggaagaagggacacatgctcaacagttgcctctctctggcaaaaagtatttggtgtaatatttaaggatgattatgctagttttgcaagtatgacagcttctaatggaatggaaatatttttatgtgctctgcatagacttaaaaagttttatgttactttcacattgaaacagttcatgagcatctatttggcagctagagtattgtactttgacatagtaggtggcactgctattttgattttttttttcaccaagacagtgtgaagatacagatgtgttgggaaatatgaaagacagtttactcagtattatttcactgacagctgcccaggattccaatgaaaatgttatctgtataaagtgatgatggtatctcatttgaccatcacaaatgagataccatcacatcttgtaaggtagtttgtattattgtcattttacagatgagaaaattcaggtacaacaaggttaataaggtgtaaatgatagctaaatgtagtgttggtaggactcaaatccagcttctttactttcaaaatctagtggatctgtagcctccaaattgactagatacacaaactttattttgatattaagctgttaagggaagatggagtaggaagcaaagagtgtgtgtgctgtgtttacctgatactaatattaaacaggcttagattttaattagtttccataatattttaagtattattgtaagtaagaggagcaaggacagaaagatcttgtggtactagagtgaatacaataaaacaaagactgccacttccatattgtaccccagtatagatggggagacaacgtaagctttgttttcagacacacccgggttcaaatcctggactgataacacaactggtttcaaatcctggactgataacttatgtgaccttgggcaaatcataaacccctttgaacctttttacatttacctgtaaaatagggatagtcatctcatcttcattttttgtaggaatgaattgagatggtgtacagtctctagcagatagcaggcatgcagtgcatggcagctactatattaccatctcataagaatacattcattacagttttgaatgtgaagctttcaagatgccattttgttgtagttctcttgacagttttttccccaaaagtattttagctatcttagttttgcaagtgtatatgtattaggcacttagggatatatgttagaactatcagttgcttgtgttttaccacttcttatatcttggcttgctttgactttataaatgttcttcttctcccaaatgtataggtcctatggcagcgtatacaaagctattcataaagagaccggccagattgttgctattaagcaagttcctgtggaatcagacctccaggagataatcaaagaaatctctataatgcagcaatgtgacaggtaaaggcatgtgggcttcctttggggagaatgtggttttgaattagctatgattgtgtagagtttgatacctagagacacatttacttagatattttgcagaagggagaattcgatggaatcactgtgcattttcttttcagaaaaaaatatgatgataatggttgtttttgtagctaaacctccgtaatttttatgcatggtgttttgtttttttttttcaatttttctttttttttttttctgagacaaagtctcgctctgtcgcccaggctggggtgcagtggtgcaatctcggctcattgcaacctccacctcccaggttcaagtgattcttgtgcctcagcctcccgagtagctgggactacaggcatgtgccactacgcccagctaatatttttgtatttttagtagagatggaatttcaccatattcgtcaggctgatctcaaattcctgaccataaatgatctgcctgcctcggccaagtcccaaagtactgggattacaggagtgagccaccatacctggcttttttcttttcttcagtgagcccttttagaaactaggaagaagaggcagaaggtggtgcttgcttttttttgtgtgtgtgataatgatcttttttacttcctattgagaaaacatttctgcagagatagccaagaacagataattcaaatgttttttagttctagaaaccttagaatatcaggtaaatctataaaaaaagagtagttatgtatatactactgtttgttccttcacattaaaaaaaattattctagctgagagtacctacgtatttatttttgaggaactaagatttgtcaaatgttgtaagcaggaagtcagaccaaaagacaaccacagaaaaccacgtggtttgctctgaaattccatgacaacatgggttggtcactgatagagcaggcttccccagcactatttagattagagacaaacacaaagttaggggcaatgccagctctagggagctgaagatgggtgagaaattctctcagttgaagctgcattcattcttctgaaggctttttggtcagcagatcaacttagtacctgctgtttgcaaaacttctacattagggtttaggtggggctacctaccaaaaaattagtccagaagcctttcagtctcacagacttgggaatgtagtcctttcttttttctctcccttctttttttttcccttctatttttgtgattactgtctactagataaaatccccatttttcttgattggattgaccagatgaaggtggcagttttccatttgctcctttttcagatacattttggaagttctttccatttggcaaattgggactttgtcactttcgatagactgtgcgggagctgtgttccaaacagagtatggaaatgtctttaattaaagaagagatattttcaagcgtctactctgtgctaagcactgtaaggaatacagtgaaatacagagcagagtccttgtgctttgggagtttatagactaattggacaggctaagtatatatatatgtagaggagaatctagccaacagtgcaagtctatagagaacatattccagtagtaaatacttgatagtaatggcctacagtatttaactcctgtcagtactgtattacagggagagtaaatgtgttgatatttaccttagacacttttttcattaatatttaatgtgtgtgtgtgttttgctgtccttgtcactggcatgtttcctaaggtttgaagaggaaattctaagagttctgagttaatgaagccaatttggttttaacatcagttgttaggaaacttcatttggccatgataacaatctagccagttaaagctggcagctctcagagggcacattattttattttaataggatatttgatttttctctgaatttcttgtttggtatctctcttccagcttgagacctaaaattccaggtttgatcctgaacattttttctttataatagattgtagtatgtgtatgtttttattacaaagtacatatgacttcttagaaaaattcaaatgaaaagaaaagaaaatcacttttccctttggagaaatcatcattttttcttttttttgagacggagtctcctcactctgttgcccaggctggagtgcagtggcgcgatctcgactcactgcaagctccggctcctgggttcatgccattctcctgcctcagcctcctgagtagttgggactacagggcctgccaccacgccaggctaatttttttgtatttttagtagagacggggtttcaccatgttagccaggatggtctcgatctcctgacctcgggatccgcccgcctcggcctcccaaagtgctgggattacagatgtgagccactgcgcctggctgaaatcatcattcttaaacactgcttgatacacatattcttccaaatcactttggagttttacagtaattcctgttttgtagcctgcttttttgtttgtttgtttgtgtaaacacagtatcttctcatgttatcacatagtctataacatttttcatggattcatgatattttattatacggctatagcattctttgttttttttgagatggagtcttgctctgtcgcccaggctggagtgcagtggcgcgatttcggctcgctgcaacctctacctcctgggttcaaacaattttcctgcctcagcctcccgagtagcagggactacaggtgcacactgccacggctggctaattttttgtattttagtagagacagggtttcaccatcttgtccaggctggtcacgaactcctgagctcaggcaatccgcccgcatcggcctcccaaagtgttgggattacaggtgtgagccactgcacctggccctgtatcattatttcttaaataaactccctaatgttggatggacatttagatgatatctaaatttccacttttgtcaatagtgctatgatggtaactgttactttttgaacatttataattcttttttgaggataaattgtagacatagaaatgctggttaaagaactcaccaagttttttatacttttgtgatttattaccctccagaaaagctataccattttgcattcttatcaggaggttgtccattttatccttaactatgaataattgatctttccagatgaggaattaatttgtatatacttgctagcatgaattaagagatatttgaaggccattttattaatttgtattgtctctctctctctagccctcatgtagtcaaatattatggcagttattttaagaacacagacttatggatcgttatggagtactgtggggctggttctgtatctgatatcattcgattacgaaataaaacggtaggtttaccttctagaacatgcaactgagctagtttcttatgccatcttcttttctctgcctctttttcagggcattctcctactagagagacgactgtcagatttccccttttccatggttattttccatctttattcttttatgtctcctaagtgtgacagcttttttttttttttttttcaagagaccagagtcccctgtcacccaggctgtagtgtagtggcacagtcatagctcactacagtcatagctctacctcctgggcttcagtgatcctctcacttcaggctcctgagtagctgggactacaggcgtgtaccaccatgcccagctaatgttttgttttgttttttaatttttttttttttgtggagatggggtctcactgtgttgcccaggctggtttcgaactcctggcctcaagcaattttcccacctcggcctcccaaagtgctgggattacaagtatgacccccccatgcctggcaatgtggcagttttgacaccaatttagtccagtgatttttagcatgctttggttatttcttactgggaagaaaatgactgttagatcttagttatagaatgaattttaaatgtttaaatttggatttggatttgggtttctgcttctacctagcgtgttcacaaattaaattcctgtatttcctgttaatcagagaataatccccttatgaaagattatttgctgatactgtggttgcagtataagacctaggagtcatgggttctagttctggttcagttacttaatgtctttatgtattcattcagtaaatatttcttgaacactgttttaggcctgaaggatctaatagtaaataaaacagatgacaactctgctgtcatggtagtgtacttcggaatagggcaacaaaagcaaattaatagtaactattaatagaaaagatataataatgatatatactatgaggaaaatgaatgaggatgaagtgatggtaaagttgtggagactggtgggctattttagagtagatagttgaggaaggtcactcagaagtggtgacgtttacaggaagactcaaatgacgaaaaggagctaagagtcctgaaggaacattgtaggtgggcagtaaccagtgcaaagaccttgaggctggaatgagtttggcatgtctgagtgatagaagggctaccatgactagaagggaataggcaaaggagaagctgtaggagatgaggtttgacaggtgggcagggctagattgtattggatattgcaggtcatgggaatgagtttgaattttatcccaggtattataggaaaccattgctggattctaagcaagtgagcgagccatctgatgtatgttttagaaagataactctggggctgggtgtggtacctcatgcctgtaatcccagcacttggggaggctgaggcggaggattgcttcagtccaggagttcgaggccagcctgggcaacatagcgagacctcgtctctacaaaagaaaaaagaaaaacaaaattagtcaagtgtggtgtcatgcgcctgtagtcccagctaacttttggggtgtgatgggggttgaagtgggaggattgcttgagcccaggaggttaaggctgctgtaagctgtgattgcgccactgcactgcagcctgggcagcagagcaagactctgtttcaaaaaataaaaaagataactctgacttctgggtagattgtgggtggataagtggagaagcagagaaaatcttagcctgtggtttttttgtcttaataagaaaaataagaataataatatctgtattccatatttgcaaagttgggaaaattaatttaaatatgtaaaagtactttgtaaattgtgaggtgctacacaaattataaggtgagggtgttttaaaactgagttataacttttggattattcatatactatcttcttaatttacattattcagaattagtgtgtttgcttaatcgaatagcaagttctttaggaataatatcctaacataagatatatgtaaagaagttccaaaactggaataatttattgaattaaacattggatttcagggcttcttatatgcagcattaagtcaatttatttcaggtattttaaactagtccaaaattaattttgatggcacttttggtttttttttgccattgtaatagtaggttattatatttaagtaaattttaacttaattactaagtgctggttttttgttgttgtcgttgttttttttttttttttttttttttgagacagagtctcctcgctctgttgcccaggctggagtgcagtggtgtgatctcggctcagtgcaagctccgcctcccaggttcatgccattttcctgccttagcctccctggtagctgtactccctagtacaggcgcccgccaccacgcctggctaatttgttatgtatttttagtagagacgtggtttcaccgtgttagccaggatggtctcgatttcctgacctcgcaatctgcctgcctcggcctcccaaagtgctgggattacaggcgtgagccaccgttcccggcctaagtgctgatttttaattactacacgttattttgccaaatgttataactctgccctgtccaccgtgatatccactagccgcatgtggttattaaggacttaaaatgtggctagtctgaactgagatatgctgtaaatataaattatacaccagagtttgaagaattattgccataaaaattgtaaacaaaaatctttgattttttcatattgatgacatggtggagtgataatattttggataaatatggttaagtaaagcagattatcaaaattaattctttctttttttttttcaaagatagagtcttgctctgttgcccaggctagagtgcagtggtgtgatcataggtcactgtatgttggaactgctgggctcaagtgatcctcctgcctcagcctcctgagtagctgggattacagcaccagccactgcgtctgcttgtttcctttttcaatgtggctactagaaaattaaaaattatatttgtggttcccattatatttctattaggcagtgctacttcaactgattaacttaactggttagaataaagaggtggtaagtcaagtcatgagctttgttctcttccactatagaaggtaccccagactctagcctactaccttgccagtagtgtttgcctggactttagtgaaagctttatcatttctctctgacttttggcataaatgacttaacttgtctgtgccctcagcttcattatgtataaaatgatgatgataataatagttcctctacctcatttagttgttataaggatgaaatgagattacatagtgcttagcatggattaaacacttagtaacggttagcctttatttatttatttatttatttttgagacagagtctggctgtgtcactcaggctggagtgcacacaatctcagctcactgcaatctccgcctcccgggttcaagtgattctcctgcttcagcctcctgagtagctggattacaggtgcctgccaccacacccagctaatttttgtatttttagtagagacagggttttgccatgttggccaggctggtcttgaactcctggcctcaagtgatctgtccgcctcagcctcccaaagtgctgagattacaggcatgtgccactgtgcttgactttttttcatattattagcatagtacctggtgcttattaaatattgattgataatatcaaaggtgttaaattatgacatattaattgattttcatgacactcttaaaagttatattcctattttatagattgggaaacaggctaagagaataagagaaggtcagtaacttgcttaagtcacatgaaagtagagccaagagtaaaagctacgtcttcctagtcccaaatcctacagtttttgcaccagagcacactccatttcacatctgagttgtttgtcagaaggggaactatgtaacagtttgttgatagattgagtttgtttaggactggtgttgggtctgcagaaagtctatattggccagatcagatattctatactagtttctagcattctcactttcaacagatatttttttcagtgcctactgtgtgccaggtggctttattggtattagggaaacaaaagtaaacaaatcagacatttttaggagcttgtgtttctaacagggatgatatcacatacatagataaataatgggtaatatgtcagatggtagtatactgcagtgacaaggtaatttaagggaatagagtatgagctagaaatggagtaagaaagccctctccattttctgaggaggtgatatttgggcagattacaaactgaggaagcatactggatagacatcaggatgaagagaataggcagttgaaaagtcccagaaaggggagtgtgcttagagtgtttgaggaacagcaaggaagcaagcccttgttgaaacagattgagcaaggtagaaagtggtaaaagatgaagttaaagaggtagctgagagccagatcatgtaaagccttggtaaggactgacttttattttaagtgggttaggaagacattggtaggttttgactctggcttacattttaattatagcttctgtgtggaaaatacattgtagagtgtcaagagcagaagcaaagaagccagtcgggagattatgagaatagtgcagtcaggacacgatggtgacttggaccatggtgattacagagggtgtatttggatatacagtgttttgaagatagagaaaagtcaaggatgacttcaaggtttttgaccagagcaactgaaagaataaagtttccttttactgagagagggaggactgtgggagaagtggagtaggttggaaggatcagagggagaggggtaaggtgatagacatagagtttgattttgacatgttatgcttatgatgctggctaggtattctagttggagatacataaatctgattgaggggagatctggtatggaaatatagccttgggagtggtcagtgtatctatggtataagcagtcaaatgctgttcacaggttgaataagatctgtttatattaaagaaaggtttggatctgattttttctcctttttctaatgcgctgatgtaaactgatagaatttgaacttcttattcttttttcagttaacagaagatgaaatagctacaatattacaatcaactcttaagggacttgaataccttcattttatgagaaaaatacaccgagatatcaaggcaggaaatattttgctaaatacagaaggacatgcaaaacttgcagattttggggtagcaggtcaacttacagtaagtaaaaatattacttgtattgataattttcatttctgtcctgagaagcagttccttttatttacctatttttaaaatataatacttgacttaattgtattagtaaaaaatcacagaatctgccaataggttacaaaagagctagttagtgggttattttagatcttttcctggggttcaggtcacatagcttaactttgttcaacttttataaagatgaaaagtaaagcaagaaatgatagattactctagtgcactacatcaacatatttataaaaggaagaaaaattaagaggaagaaaaattaagtccaaactgctttccttgactaagacataacatcatctcattcaacttccaggtagtacttggcagttactgtactgaaaacactctgttcgtttgagtccaggatacagtctcttgattcttctcctgcctaactagtgcatggaagtgaaaaaagaaaaaaaaaaacttgttttcaaaataggaagtctagaattatttgattctacataagtatatatgaaagtatatatagaaaaatagaaatagttttaggcaggtatactctaaaatttgcaaaaatattacatatcaagtggttttcttgggtggtagaatgaatatatatagtgtgtgtttagaactggtgttatgtacggttttttttttattattttttttttattataagtctgcctgggacatgttagggagcctcaggtattgtaacagcacagaaattgctttgatgtttaaaataaatcagaaccttattcagtatcatgatttgtgggctctccaaaaggttttgttgttaacacaaaagtaaacagtaccagacaatattacctaaaccacagtcttagtcaggaaaccaaattgaaaaaatacaccctctgatggtctataaaataatataatattggccgggtgcagtggcttatgcctgtaatcccagcgctttgggaggctaaggtgggaggatcacttgaggttaggagttcgagaccagcctggccaacatggtgaaaccccatctccactaaaaatacaaacattagccggacatggtagcgcacgcctgtaatctcagctacttgggaggctgaacctgggagattgcgccattgcactctgcactccagcctgggcaacagagtgagaccccatctcaaaaaaaaaatgtgtatgtatgtatgtgtgtgtgtatatatatgtgtgtgtgtgtatatatatatatgtgtttatatatatatatatatatatgtatccattccatttagtaattttagtaattgattgattacccaataatgacttacagtgttcttattgctataatgcctgccttggcagaatttttctccccttttaatatgtacaattcagtgtttagtatattcacaaaattgtgcagctattgccaatgtctaattccagaacattttcatcatcctcaaaataaactgtaccctttagctgttagtccccattctcttcccagcccttgacaaccactaatctactttctgtcactatagatttgcatattctgaatatttcatataaatagaatcatacataatgtgcccttttgtttctggcttcttttgtttaacataatgtttttgagttcatccatgttgtaacatgcatcaattcttcattcctttttattgctcagtaatattccattgtggctgtaacacattttgtttacttattcattagttgaatatttagattgtttctgctttttggctgttaggaataatgctactgtgaaatttgtgtacaggtttttatgtgaaccgttgttttcatgtgatacacagagttgctggatcacatggtaactctgtgtttaattttttaaggaactgccaaactgttttccaaagtggctcaccattttgtgttccctgctgatgtatgagaattccaacttctctgcatcctcgccaacattttcttttttgtgtttttgattataaccatcctagtgagtatgaggcagtatctctttgtggtcttgatttgcattttactaatgactagtgatgtcgactgtcattttttctgcttattggacattcgggtatctttgggaaaatgtctatttaaatcttttgcccatttttaattgggttatttaccttgttattgttgaattaagagttctttatatattttagatataagtctcttatgtacatgatttgcaaatattttctctcattctgtgggttgtcttgaaggtgtcctttgaaatacaaaatttttaaattttggtcgtgtccagtttcttttttcttttgttgcttgtgcttctggtgtcacatctaagaaatcattagctaatgcagggtcatggagatttactcctatgatttctttgaagtgtttaatggttctagctcttatgtttagatctgtaatctgttttgagttagttttcatggtgtgagataggcatccaatttcattcttttatatgttgatatgtagttgttccaacatttgttgaaaagactgttttttctttgttgaaatgtatgagtttatttctatgccttcaattctattccattgacctatatgtctgtccttgcaccagttctgtgctgtcttgattactgtaagtttgaagtaatttttgaagttggttaagtgtgagtgttccaactttgtccttctatttcaagattgttttggctattctgggtcccttgtatttccacataaattttaggatcagcttgtcaatttctgcagaaaaggccgttgggattttggtagacattattttgaatcgtaaatcagcttgaaaatactgccattttggcaatattgtcttccgatctatgaatataagctgtctttccatttatttagattttctttaattcttttagcaatgttttataatttgcagtgtacaagttttgcatgtatttggttaaattcattcctaagtagtttgtactttttgatactattttaaatggatttgccttattttcagattgttcattgctagtgtaacatacaattgatttttgtatattatcttgtgtcctggcaccttgctggacttttttttttttaaattaactgtgaacatgtatgttgttttgttaaaaaaaatgagattttttttccttcactaaaataaactgaaactgtagtacaagatgatctgacttggctgtttggttgtgaaacctccagtactactaagtttaggcccctctccggtctcttgtctagaggctgtaggccttgttggcagctttctgggaagtggtggtggtggtggcagtggggattgttaacatgttaatgctcatttaatgttcctgattcacaacaccacccacactctctatagtctagagatcctcggtttcactccccagagagtacacctccagtctaatgccagggtggggcgagggaagcccactagttgcttgatgggagaggaaggtttagggtgcttagctgcttcttaactctttcaacccaggcttcctatttggatgtccgttttcacccctcttttctctgcctgatgccaccaatttctaagtcttttggaggggttggtgttaaaatcaggttgtttcctagttttcctggcgactgactgaggattccatctgatagtctgttcagttagttactattgggccatctgctctccagcttttaaaattctgtggctgtagttattttcccctttgtttttttattcttgtagatttattcttaaaaaacaatccttttagtatctttttgagtgagttttgagagatagtgaaagtaaaatgtatttgctcaagctgtcatctttacccaagactctgtaatattatttctggtggcaacatgggtatttcattgtatggatatagcatgatttatttaactctttccctacagttggatgttgggtgcccattaaggttgcttagagttttcccaccactataaacataaactctgtgattaacattcttgcaactaaatttttcagcatttccttgagtaaatccttaggataatttatttacattggaatctaggtcagaaaatatgtgaatgtatattggcaaagtgcttttgatgcatagtgctgaatttcttctagaagtgaacagtttcagtttccaacttcagtatataaatgtgctcttttcccctcatatttgctaatgctgaatgggcagcaacttgtatcttccctgctatttctcaaagcagttgacatatttttgcatttaattattggccatttataaaaattcgtttgtaaatgttcatttttgtgtcagttttcctaattgaatgttgtactttttttttttgtttttgggagacagggtcttgctctgtcacccagcctggagtgcagtggcacaatcacggctcactgcagcctcaaccaccaggcttaggtgatacccccacttttggcctcttgggtagctgggactacagacgcacaccaccacccccagctaatttttagtagtttttgtagagacatagtttcaccatgttgaccaggctggtctcaaactcctgagctcaagcaatctgccccccttggcgtgccaaagtgctgggattacaggtttgagccattgtgcctggctgagtgttgcatcttttaaataaatcttattaaaaaagataaactaaaaaaatttatgttaaaattgttactcctattttgtatatgctgaaatatcttctagtttactagttgtcttttaattttgattatggctttttaaaaaaatactacataagtttccaaattttatatagaaaaatccatctaccttttatcttatggtttctatctttgatgtcatgcttaaaaaatccttttctccttaacattatagaatggttaatctatgttttttttattttttattattttattttattttatttttttttgagacaaggtcttgccctggcacccaggctggagtacagtggcatgatcatggctcattgtggtgtcaaactcctgggctcaagcaatcctcttgcttcaggctcccaagtagctaggactacaggtgtgtgccacttcgcccagttaaaattttaacattttttatagagataggctctccctattttacccaggctggtccggaactcctgcctctgcctcccaaagtattgggattagaggtataagccagcacacctgctctgttgctcaggctggagtgcagtggcatgatcatagttcactgtaatcttgaacttctgggctcaagtgatcctcccaccttagcctcccaagtagctaggactacaggcatgtgccaccatgcctggctaatgtactgttttttttttgtttgttttttgttttttgtttttgagacagtctcgctctgtcacctaggctagaggacagtagcgcaatcttggctcactgtaaccttcacctcccaggttcaagtgattctcgtgcttcagcctcccgagtagctgggattacaggtacctgctaccacacccggctaattttttgtacttttagtagagacgggatttcgctatgtttcccaggctggtttcgaactcctgagctcaggcaatctgcccacctctgcctcccaaagtgctgggattataggcatgagccaccgtgcctgactgtctaatgtacttctttaaagtattcgttgggctttgttttttatgtttaaaatttcaacttatttgaacttattttggtgaaagtataaggtaggcatttaagtgtagagttctacaaatgactagattcccagtgcttttttttttcataatctattctttgcttgctgattttaaatgacattttaatcataaatcatatgtatatgtggtatatataacaggttattatatatacatatatatgatatatatgtacacacacacacatacatatacacatatgccatagtgaacttctggactttatattttttattgctatgctattgtactaatataactttataatacaaatctaagtggggttagtgtacactcattgctcttattaattttcaaaaactttctagctatccaagtaaccatttctaattgaaataatccagtgaaaacaattttgactagcaccatttgaaaacacccttgcaaatttgaagtttcagagctaaggaaatgactaagcagtaagttagttcctgtgttagttttttacataggactgacaatgagattgatttaaatgacctgtcatttgcttctgactggcatagcctaaatcacaggcatttcagaaggaatatcagtgatgatgatcggaagtcctttttcgtatttagttctgtttaaaaattcttcttttgctgggcattgtggctcatgcctgtaatcccagcacttcgggaggccgaggcaggtggatcacctgaggtcaggagtttgagaccagcctggccaatgtggcgagaccttgtctctactaaaaatacaaaaattagtcgggcatgatggtgggcgcctgtaatccaagctacttgggagactcagtcaggagagtcgcttgaaccccaggggcggaggttgcagtgagccaagattgtgcctcttcactccagcctgggcagaagatcaaaactctttctcaaaaaaaaaaaaaaaatccttcttttgctaaagcataggaactgtagggaggttctctttcagtagggccatgccatcctgagaaagtatgcaagtggttatttgctgtaatgtgtactgtatccacatattcttctttagcccataaactaagatattttgtatattattttttatatatcaagtttaaaatttttttattgcacatgtatgctcatataaaccttcagaatgttacagatgtatacaggatagacagtaaaaatctttagtgattctgcctactagatataattaatggtttggtgtgtattactccagattttttgtgctatgatataacagtgtttcatattattggttattgttttattattgttatgatcatcattattatatatattttccttttacaaaaacagggctatattatatataattgtacaacttttttttgctttgtaatgtatgttgtgcatttttttcatgctaggaaaaggtatatatcttcttttttttttctttttaatatggtgtttcagtatatggttatttattatatttaacttactatcttttgatgatcatttgagttgtttccttttcctcctcatctcccccattacagacatttctacagtctttgtgcatatcgtttgagatacttgaacataagatagatttcaagaaatagatttggatcaaaggatatgaatatttaaaagttgaataaatattgccaacttatgtactaaaatgtaccaatttatactacagtaacattttatttcggtgcctgattttctatgctattatcagcattaattattaatttaaaattttttgtcagtcattttagtttttgttttaataattgattgagaatctttttgtgtttctttgtcatttgaatttcttctatgcctgcttgatcatgctcagagtatggtttttatatgtatttcaagtacaaggcatttttttattgttggaaaagcctctttttctcagtagtttttttttttttcttctttttttttctgtagacttcctctgtggacatctcagtagttttaagcttagtgtcagtctctctccctttctattttaggataccatggccaagcggaatacagtgataggaacaccattttggatggctccagaagtgattcaggaaattggatacaactgtgtagcagacatctggtccctgggaataactgccatagaaatggctgaaggaaagcccccttatgctgatatccatccaatgagggtaagaaagtggacagaaagccagtggggtggttagttactgatcatcattaaaaagtgaagttcaagccaggtgttgtggctcacacgtgtaatcccagcactttgggaggctgaggtggatggatcaccagaggtcaggagtttgagaccaacctggccaacatggtgaaaccttgtctctactaaaaatacaaaaattagctgggtgtggtggcgtgcgcctgtaatcccagctgcttgggagactgaggcatgagaatcacttgaaccccagaggcagaggttgcagtgagctgagatcgtgacactgtactctagcctgggagagagagtgagactccatctcaaaaaaaaaaaaaaaaaaaaaaaagttcaatggcttacttgtttaagttgcaaacaataaatgaattatgtgtaaatttgtaagtgtcgctatagatgatacacctctactgactctagttgtagtcattaattaatttaagtgtgttccacccctctccattccagaggttgtgtattgatagccctctggcaggacataggccatagaaatgcttagtttgatttgtgctactctctctctctgtctgtcactcactcattttgaatagtttagacaaccacattttaacatgtcaacattcactagagctgagtagtggttcagagtatgaactctctactttatcagtctccatgattccctgttgtgtcaccaagtattagctgccacttattacagtatttctctaatgtttttcttataatagtgttaagaagaaagcaaactgtatttttgaactcatgtcactgaaacccagccttgttcattttttatctttcttctgcctggcccctataggtgttttgaatttgtaagttttggtttgtagatccccatatcctcttcatctggaggctgtgtactctccaacccctgtctccttctagaatgttaagggcccatagaatgcatctccagtgaagctcttccagtgctcacaccctaagcagttcccaggcttaactgtcccagaacccttcatcacagcactgttgtaatacacccccccgccaaccctgccttcctcaggggctctgtggtcctctccatccttccttaccacagctcttcctcttctctgactaattaattctcctattaaaagacttacacaaattcatgttcccaaggtaagtcctccctcttttttgggagaaggagtgaggagatttactagttacaattttagatttaaagaatataatttaagctgcttatttgtatagtgttttacttttcaaaaaacatggcttttttaaaattggaaatttaataaataatagtcttatttttggacatagtagaatgtaactgcaacgtagtgggccaatttttaatttttccccctcacacatgcgttgatttagcttactttggaagttaatgaccccattgtgatttttgggacttctggttgatgaccttattgtgtagttgctgctgacatctgggggtggtaataacttttaagaggcagggaaacttgacaactatggggtcaaggttatctttaggatgtagatactcttaggtctcgcctttctactttgaaaggcaatgtactgtggttaccaaaataataataataaaaaagcttgattgatgttgtgaggtttagggaacaagacccatatatgagagagggaaaaggagagagggagatatatcaggttctttaaccatcagatgcttagacttttgttggaatttgggtgagcttctcagtgggtaagtgaaaaatcatttaccaagcttcaaatgtaattccacatgtattttttattggagcattacttttattttaccagatctttttgtttgtttgtttgttctaaccaggcaatcttcatgattcctacaaatcctcctcccacattccgaaaaccagagctatggtcagataactttacagattttgtgaaacagtgtcttgtaaagagccctgagcagagggccacagccactcagctcctgcaggtatgaatcaccctgtgatgccatctcgctccatttcatttacttgctgaccaaaagatgccatgaggtcacctacgtggagatagtaaagaagtataaggcaggctgggtgcagtggctcacgcctgtaatcgtagcactttgggaggctgaggcaggtatattgcttgagcccaggagtttgaggccagccagcatggtgaaaccatgtctctacaaaaagaatgcaaaaaattagccaggtgtggtggcgcatgcctgtagttccagctacctggaaggctgaggtgggaggtgggagaatctcttgatcccaggaggttgaggccgcagtgaggcatgattgtgctgctacattccagcctgagcaatagagtgagacgctatctcgaaaaacaaagtaaaagaagtttaagacattctctacctctagggaggtttgaatctatttgagtagaaaagaatgttaaatcattgaacaagacaataatgtaagaaaatacagggcagtatgggattagagaaagggaactgacatttagtgagtacctgctgtccgccacatactttgcatatgtgccatttaatcatcacatagaccctgtgaagggtgggtattatttcagttttatagataaaaaatggaaacttagggaggtttactcatttcgggtcactcagctggtaagtagcacagtcagtattagaacttgagccttttttattccaaagcaggggtaccatcaagcctacccgagtctgacaaagaattaagagcagtggtgggtactgttgtagttcagggtgggagaaggcctctttggactggagatgcaaaaagtgttttcctggaggaggtagcttctaggcctggtccttgaaggacaggtggcatgtggcaggcagtatgcttagtggttaggagcttggatcctggtcagattgcccaggtttgaatcctggctcccaatttactagctttgtgatcttgggcaagtaacttaatctctctgttcttttggttttgtgatctgtgaaatggggatacagtacctgcctcatgtgttgtgatgattaaatgatataatgtgtgttactttgaacaatgttcacatgtattgaagacagtatggtatgaacgtgataaatattagctattataattgggctaggccaaccgtttgcagtcatttcagacccagtgccccctttttataaccaatgtatatatttaaaaactctcattacttttctggaatgaaactcacatataataaaacctttttatgcccataatttaaaaagaatcaatattgtctatgatgtgatggagaaaaataaagataatttataatgaaataatatggctttcaacgtgcagttacttcagcctgacccagtttgcagacataatgaaatagatacctgtgcctggcatcatgaatgagtttagatttaagagctgtaagaaaatcagaaactagccaggtgcagtggctcatgcctgtaatcccagcactttgggaggctgaggcaggcggatcacttgaggtcgggagtttgagaccagcctggccaacatggtgaatccccatctctactaaaacaatacaaaaatgagctgggcgtggtggcgcatgcctgtaatcccagcaggaggctgaggcaggagaagcacttgaacccgggaggcagaggttacagtgagctgagattgtgccactgcactccagtctgggcaacagagcaagactccatctcaaaaaaaaaaaacaaagaaaaggaaaagaaaatcagaaactacgccatttaagaaatacagtaaaaagaatgagtggacactagcatgaaactgatgttaaataataacaggccagatttatttgtctcttattacagaaggtgggatatgatcttacagattttctaagtggaaagaacaaggcaatatgatattattgcaaatgagctgggtcttatttctaagtggattgccaaattctttttctacctggatggggtagtgacaaaatgttacggaaatgtatctcctgtgttgcattctgaccacattttgaggtatactgtccatctctggagttcttacttggaacttgtatcctttgacgggtgatggagaacagagaatggattgccaagaaacaatggggacaatattggagtaagtttggaagacaacaggcaattccccaaaaagaatttccatatgtaactttcacagcatagatttcttatcacgtgctacaaatacaaacaataaaaacatatgatggtattaatattaaaaacttataaagcaaattttattaatgaaattcagcaatacccctttgtttcaagtatctttggtgattgaataatatttgggtcaaaatctgttacatatatatgatcagttttagtatgtctgcagcaactgcatttttgcactaaaatcctttttacctaaatgtgtagttggaaatgctaccatagaaagaacaagtcagatgagtagatttttcagtgatttctaaataatttctttattccattaagctcccctctctaaaatcacctcccaaatcactggcctttttgcatatctcttgaaaacatttttttagtattatctactaaggtgtatacacaccctgagacatttgaaaaatgtgcagaatctgccacagttcatggtcgtacaggacagttctgtactttgcaaaattgctaatgtcccatgccatttgtgctcaccaaacattgtggcagctataacatgttcccaacatgtttacacaagttcctccaggagatgatactccctattgagaatcgctagatttgacagagagaaatggcataggcatttcagccaggctgaaaaagataggcaaagactgaatttgctctactcagagttataaagcgagtgtggtttagctgttgtccgaagcacaaagagaaagatcagattcgttgattgattcaacacatgttatccagtacctactgtgttccaggtactgttttggcactgtcaccatataaactgtctccagtattttctactttgttcttttagcacccatttgtcaggagtgccaaaggagtgtcaatactgcgagacttaattaatgaagccatggatgtgaaactgaaacgccaggaatcccagcagcgggaagtggaccaggacgatgaagaaaactcagtgagtggcagccgttgctgtgggcctcagacattgatgcttgttattttatgattgccaaaccaggtaagatgagtaggaggtattggatcaacttggagctggagatgcttccagcataactatgtcctaacctggatcaacgcatgctagagggttgttgtatctgtgcttattcttctcccagtgcttcctaaaacacttttaaattttactctttgcccctcttttactcaatttaactttttattttagagagagaatgctcaggtctgggacttggcttttcatatccttttggggaatctgggatccatacttaacatgtagcttttacatttatagacttcctcacaaccctgagattccaaagatgttcacatgagtttcttagatctatgtcacaaaactctattaagaagagtagaggaagaattcctttagggttagatacactgcttattatcacgtggataaatttgtcttctttgcttaagtaacagcgctttcatttctggaaggtgagtttaggacctgaataagtgttaaatctcgaaatattttcactaagacaggtagtagttattcagaaaactcaaagtcttttgtcaaattagccccaatttgagattgtatccttttacaggaagaggatgaaatggattctggcacgatggttcgagcagtgggtgatgagatgggcactgtccgagtagccagcaccatgactgatggagccaatactatgattgagcacgatgacacgttgccatcacaactgggcaccatggtgatcaatgcagaggatgaggaagaggaaggaactatgaaaagtaaggctctgagtaaattcactgacttcttagaccaagcatacatatttcagagaagacagattctcatggttcatgcaggcttagccttgggttctttcttttgtcacaaccaaaggagtagaaaacttggaagtttgcgatggggacaggaggtttggtgagggggaaagctggcctgtggagtcaaagtcaagaaagcatcaacagtgagaaagaattttgcttttgaaccagagcagccattttctcattgaatgttgttattattttccttccttaccttgatctttggaggcaagcacatgcattgtttgatgcataattcctgtgaaggtgtaatgacattctgagttatttactgtacatacatcttcagtttattttcatgacagtttgggtctaacccaagtttaccaatactgtcagtcaatgaaagatgactgtacaagttgaaaagttctatccagtttcttctagtttaaactcatctctgcttctgtccgtatctggctgatccttttttgcctgtgactaggcctaacatcttgtgttcagctcctatcttagagtgaaattcttgtgtcattcagtgctcgtggtgctttatgtttcatcccctaaactcaagattaaggcactgtagaaatcccatgtttgatgatgtacaaattatcaactaaatgccatgtactagattgcccttctcctcccctcctgttttaaaagtagccagtatgatttgttagtaatgttcattttgcagtaatgagctactgacctctagttattttcattgactctgagtactaaattgtctacttgtcttaaggggtttaattatgtagatgattataaccgctgtgtaatacaactaggccaacctgttagtatgtgttgtacatgcacgtgttagggaaattgtgcccatttttatttaaagaattaatttttttccaaatgtgattttcataattcaaatgctaattcaatgagttgtttattcttttcagtttctgaacttgttttcagaactggatagttttagcatgtctaatgagaaacatgcatcttttattataatcatgaagagaactgtttaaaaacctaagcagtcacagtctgagtaacattaaatacaatttgttcacagacagtctgttgcagattttgtaattctcccttttggattacagatttgacagatttgccacttattttgagatttttaagaattccttattgttttaggagttacttaaatttatcattatggaaaattaaaacatacatacaattacacagaataatataatgacccctatagacctatatcactcagcttcagcaatgatcaactcactgcccgtcttatttcagccccacctcaccaaaaagcaattagtaaacactttgtaaaagtattcatttttaaggccataaaaagcagtgagaggagtaaggggtaaaaaagattcttaaggtaatgcaggcttcaaagtcctgatttataggacatgctatgacatcagtggtattttgggcaagatttttttttttttctgataataactctagaaaatagtaaaatgaattaattcaaagtaaatctgagtcatcataccatttctttataattgattttaagtatttatttaagttattatttttttaacagatagggtcttgttcttgcccaggttagcgtacagtaggtatgatcagctcactgtaaccttgatctcctgggctcaaactatcctcccacctcagtctcccaagtagctgggagtatgtataggtgtgtccagctaatttttaaattttttgtagagacagggtcttgctatgatgcccaggctggttttgggctcctggtcttaagtgatcatcctgccttggcctcccaaagtgctggaattagaggtgtgagccacctctcctggcctgatttaatatttaatattggaccaggtacaagcctggggctcagatactgatctatgtggtgttagataattcactttcctcctatgggtctcagtgccctaatcagtaaaattaaattattactaaacttgtttattttcattgtcccttattcctctaatagtcaacacatttataaaaattgtgtaattcatgacttgcagaactgaaatttctagaggttaaaatttgtgaaaatggatagactttcatttagttccttatttgaacctctatgaaatgtttatccttggaaattaaaattataaatgttaagggaggctatgcatgtgtggcagggagtatatgggatatgggaaccctcctttccttcctctcagttttgctgtgaacctaaaacgtctctaaattttttttttttttttttttggagacggagtctcactctgtcgcccaggcttggagtgcagtggtgcgatcttggctcacagcaacctccacctcccgggttcaagtgattctcctgtctcagcctcccgagtagctgcgactacaggcgtgtgctgccacacctggctactttttttgtatttttagtagagatggggtttcaccatgttggccaggctggtctcaaactcctgatctcacatgatctgcccacttcagcctcccaaagtgttggaattacaggttgagtcactgttcccggcctctaaaaatgtctttaaaaaaatgataactgttggttagtccgagtgcagtggtgtttacaactaattgatcacaaccagttttttctttttttttgagacggagtcttgctctttcgcccaggctggagtgcagtggtgtgatcttggctcattgcaacctctgccttctgagttcaagtgattctcctgcctcagcttcctgtgtagctgggattacaggcgtgtgccaccatgcctggctaatttttgtatttttagtagagatggggtttcaccatgttggccaggctggtcttgaactcttgacctcaagtgattcccccatcttggcctccccgagtgctgggattaaaagtcatgagccactgcgcccggccacaaccaattttttctttgtttttctccactcccactgtttcacttgactagccttaaaaataaaaataaaaaaaaaataatcttttaagaaatgcctgttcatgtcctttgcctaatttttcatggttttttttttcttgtaaatttgtgtaagttccttgtagattctggatattagacctttgtcagacgggtagattgcaaaagttttctcccattctgtaggttgtctgttcactctgatgatagtttcttttgctgtgcagagactctttagtttaattagattccgtttgtcaatttttgcttttgttgcaattgcttttgatatttttgtcatgaaatcctttttttctcctttttttttttcttttttcttttttttttttgagacggagtcttgccctgttgcccaggctggaatgcagtggtgcgatcttggctcactgcaacctccgcctcccaggttcaagcgattctcctgccccagcctcccaagtagctgggattacaggtgcatgccactacactcagccaatttttttttgtatttttagtagagacagggtttcactatgttggtcaggctggtctcaaactcttgacctcgtaatccgcccgccttggcctcccaaagtgctgggattacaggcatgagccaccgcgcccagcctcctttctttccttctgttggattgattgagtcctcaccgccatcacttcctttcccttaccttaatcccctctctccactctcttctaccaactggcaaagtgtatgcataagtatatgcttacttaaatttctactttcctaataaatttcaaagttaatcagtatctctctcctcttcctgaataagaaaaaggatttaagacacttcgcctttttttcaaactgcctctctcatattttgttattgttgtctattgctttggttcaccaggtttttaaaaaacattagcagctgggcgctgtggctcacgcctgtaatcccagcactttgggaggccgaggcaggcggatcacgaggtcaggagatcgagaccatcctggctaacatggtgaaaccccgtctctactaaacaaaatacaaaatattagccgggcatggtggcaggcgcctatagtcctagctactcgggaggctaaggcaggagagtggcgtgaacctgggaggcggaggttgcagtgaaccgagatcgcgccactgcactccagcctgggcaacagagcgagactctgtctcaaaaaaaaaaaaaaaaaaaacaaaacgttagctactataatcattatttagagtcaatacaatttatgaacatagtgagctactaatatgtttgcttacctttgcttctttaagcttatactttatcttatgggctcatttttcttctcctttcagtaggatgtaatgggtagcaaacttttataatttgtatggttaataaaagtcttaatttttttctcttttttgaatatagtttactgaggcatggatttctaagtggactcttattttctctttgtactttgaagagatcattttgatattttctggtatctgttgatggtgatggaaattctgttgtcaatattgttcttttctagatgatttacttttttctctttttttcattttcctgaatattttctgttttaacttattgtctctatgttggattttttttttccttctaattctgcttcttctggctctgtacttttcaatctaaggacccaggactttattcagttttagaaaattctctttggtttctctattattattattttttctaggatttctttttctccttttttattttatttttgtttcattttgtttcggatgtatttatttatttatttatttatttattcccagaaatgtggtcttgctatgttgtccaggcaggtcttgaactcctgggctcgtcatcctcctacctcagtctcccaagcagctgggactacaggtgcatacgactgctccgggcttgtcttacagatttttttctgtttatctctttgaacatttcaatttccctttaaaaaaaaactttcagatcctgctattattttgtgttttttgggtctaatttttctgtttattgtgtttgttatctctcatattgttacatttcttcttacactttgtaaattttgtttttgagcttatgtttggtgagaattatcttgctcggaggtcctttgtattccttgggttgtacaggcatccctagggccctatggggtatttctttctagagcagtctttagattatttctcagttccacattggacttgtggtacagccaagggaattgtatttctagaagttgattttttccacctcttacctaccgaagcagaagccatttttaagccatcttcttaagcttctgggcagtattgtcctggctcctatctttatgctgggaattgagttctggcttcccctttaacaggtatgtcttgccttctgccttatcctgattgctatttgcacatctgccttaaagctaaagtccttgtgatttggttttcccagtaggccactcggctcagtgctgtgggtttctttcccgcttttggcatctggaagttttcgttttctggttctgagcgctatgggttgttttttgtttgtttgtttgtttgttttttaagtcttgagtttctgtttgtttataacaggaggggaggccttagcacttcagctcattccgttatcttaactgtctacagagatgatgtttctccactttctctataaaggaacaggttcagagagattgagattgttgcttgttcatggtcacatggctagtaagtggtggagctggaaattgaaagcacttcagagttggctggacgcagtagctcacgcctgtaatcccagcactttgggaggccatggcgggcagatcacaaggtcagaagatcgagaccagcctggccaatatggtgaaaccccatcttaagaatacaaaaattagctgggcatggtggcgggcgcctgtagtcccagctactcggaaggctgaggcaggagaatagcttgaacccaggaggtggaggttgcagtgagccgaaatcgcgccactgcactccagcccgggtgacagagcgagactccatctcaaaaaacaaacaaacaaaaaaaagaaagcacttcagagtctatgctctcttcattccacagagcttctgatttgttttggttgcctattatattcataggcgttagatccataatagaaaactcatcatagttatggtgattctggtgctgtctttcactgagaatccagggatggcttttgtttgttcgaaacaattgtttattcatttatttatttaaaaaatttcaacttttattttacatacagggggtacatgtgcaggtttgatgcataaatatattatacccaggtaatgagcataggacccagtagctagtttttcgacccatggtcccctttctccctctcacctctagtagtctgcaatgtctgttattctcatgtttatatccatgtgtgctcagtgtttagctcccactaagtgaacacatgcggtatttggttttctgtttttgtgttagtttgcttagaattatggcctccagctccatccatgttgctgcaaaggacataattgcatttttttaacggagtcttgctctgtcgcccaggctggagtgcgttggcacgacctcgactcactgcaacctctgcctcccaggttcaagcaattctcctgcctcagcctcctgagtagctgggattacaggcatgtaccaccacaccaggctaatttttgtatttttagtagagacagggtttcaccatgtcgtccaggctggtctcgaactcctgacctcaaatgatccacccgccatggcctcccaaagtgctgggattacaggcgttagccactgcgcctggcctaattgcattctttttttatggctgcttacacggatggttgcgtagtattccatggcgtatatgtatcatattttctttatccagtccactattgatgggcacctaggttgattccatatcttcgctattgtgaatagtgtggtggtcaactcatcgtatgaatgcatgtgcatttttggtaaaatgatttattttcctttgggtatatagccagtaatgggattggtgttttaagttctttgagaaattagcaaactgctttttacagtggctgaactaacttacattcctaccaacagtatataaccattcccttttctccatagcctcaccagcatctgttgttttctgaccttttttttagtaatagccattcttactggtatgagatatctcattgtggtttggatttggatttctctgatgattagtgatgctgaacattttttcatgtatttgttagccacttgtatgtcttcttttgagaagtgtctgttcatgtcctttgcccattttttaatggaattgttttttgcttgttgatttgtgtaaattttttttttatagattctggatattagacctttgttgaatgtatagtttgtgaatattttctccctttctgtaggttgtttacactgttgatagtttcttttgctgttgtgcagaagctctttagtttaattaggtcccacttgtcaatttttgcttttgttgccattccttttgaggacttggccaaaaactttctgccaaggccaatgttgtgaagggtatcgcctaggttttctttttggatttttatagtttgaggtcttacatttaaatctttaatccatcttcacttaatttttatatatggtgaaagataaggatccactttcaatcttcttaatatggctagtcagttatgccagtaccatttattaaatagggtgtcctttacccattgcttgtttttgttggccttgtcgaagattagatggttgtaggtgtgcaggtttatttctgagtttcctattctgttccattggtctatgtgtctgttgttgtaccagtacaagaacagcattctggttactatagtcttatagtttgaagtcaggtagtgcactgcctctggctttgttctttttgcttaggattgctttggctatttgggctctttttggttccatataaattttagaatagttttttctagttccgtgaagaatgtcattggcaattttataggaatagtatggaatctgtaaattgcttcggagagtatatacattttaattatattgattcttcctatccgtgagcatacaatgtttttccatttatttgtgttgtctctgatttctttcagcagtgttttgtagttctcctagagatccttcacttccttggttacctgtattcttagatatttcattttctttgtggctgttgtaagtaggattgtgttcttgatttcactctcagcctggccattgtttgtgtatagaaatgctactgatttttgtacatttttttatcctgaaactttactaaatgtgcttatcaattctagtagccttttgacagagtctttaggattttctaggtatagaatcatattgtcagtaaagagagatagtttgacttcttcttttcctatttgagtgcattttatttcttttgcctggttgttctggctaggacttcccaattatttatttgtttatttatttttttctgaaacggagtcttgctctgttgcccaggctggagtgcagtggtgcgatctcggcttattgcgacccctgcctcctgggttcaagcaattctcctgtctcagcctcctgagattgggattacaggtgcatgccaccacacctggctaatttttatgtttttagtagagatggggtttcaccatattgggcaggctggtctccaactcctgaccttgtgatccgcctgcctctgcctcccaaagtgctgggattacagtcgtgagccaccgcgcccggcctcccaattatttattatatgtaacttatgtgttatactcaataggatagatgttataactgctaataataattattagtgattaggcacttaatatataccacacactgtgatttatcctttaagcatttcacatattttgatcattacaaccatgctgtgtggtaaattgaaccattccctgtttaatagcagttgaaacccagttgcagagattaagtaacatacttgtgattatataatgagtaatagagaagccaagatttgaacccagatatgtttgatttcagtggttatgttctgaatcattagattatactacttctagcagagcccctttatcaagtgttgggagctgggactaaggcttatgttacagatcatgtgttggtgagtctcagcttgtagtaatgtacttctccttgctggttattttgataaccagttactctacatatgtcctcagtatttccagaaagaaaggacagatggttttcaaagggagcatgcctctgataagctaatgatattgttacctctgagggaatttgttttggatgtatgtatctgaatctataggaaggagtcagattgcagttggagagaagggattaaggtgggatttgattgattttaagtggcctcaagcatacatgtgagaacgaaagaggcaaaccatggtccacgttacttggaaaacctctgtctggataaaatattagattggggattttggaaggcttcttctatttgtctagatatgttcttgtttttgttgttgtttttgtttttgaataagggctctagaatagccttgtttacctccccaaacagcaggacacattattgaagtgacatgagagggtctgtgtcagtgttaggatcattgtgcattctctgggccagcagagggagctctgtattaagttaatgggttataatcgtgttcccatttgagttcacaaatcccctttatataaaagtaggctttatgctagaacaagaccattacttattcattcttaagtgtattttaagtaaccgcagtgacactagggcaatgtctttattttatttagttgggagattggatacctcatacttggcaaagttcaaataagaagtcagccaaaacatctcaaaatagtcactttttctctcccttcccagatttctcagtggacttgacacaattggtgttctttttctgtagcatggtaccatgcatatagtttttaaactgtaatcagctaaaatggccttacttgaataactgaataaattttttaaaaaacctaataattcttgtgtagaactgatttgaaagttcttgtgtagaacatacatatatatatatatatatatatatatatatttttttttttttaagtcaagttgttgggagccaggactaaggcttatgttacagtaaataacagtaaaaatatatatattcctgatatagatcaggaatttgtttttgtttacaatatgagctctagtagtctgttttatttttccatctgaaagacttgcttcctccctctatccaggtctttgatcctgtcaccttctcagtccttctttgactatttgtctgcaatagatttcccatccccttatttttcttttcatcacagattacttcttgaaatttatatcactcttctccgatacaaatttttttttttttttgagatggagtcttgctctgtcaccaggctagagtgcagtggcgcgatctcagctcactgcaacctctgcctcctgggttcaagcaattcccctgtctcaacttcccaagtaactgggactacaggcacgcaccaccacacctggctaatggtttgtattttagtagagatagggtttcactgttttggccaggatggtctcgatctcctgacctcgtgatccgtccacctcagcctcccaaagtgctgggattacaggcgtgagccactgcacccggcctctcccatataaattttaggatcagtatatcaaattttataaaatactactggaattttgacttaattgcattggatacacagattaattaggcagaattgccatctctgtgttaattctttctatgcatgaacatggtttatctttcaatctgtttggtctatcttttatattcttagataattttataattgtaccaacaaagatgttttagagctttttgttaaatctatttttagatacttatttgttgctattacaaatggcatagtttaaaaaacttttgtttctaacatttttcttctatagacaactactgtagatatttatggactgttttattcattgtaacaggttttatggagattgcctttttaaaaaaatggagacagtcttattgtctatgaattatgattatagtttttccttttgatctttatatataatcttcttcttcttcttcttcttttttttttttttgaggcactgtctcactctggaatgcagtggcgcgatcctagctcactgcagccttgaattcctggggccaagcaatcctcctgcctcagccacctgagtagctgggaccacaggcatgtgccaccacacctgtgatttttttttttttttttttttttttttttttatagagatgggatctccctgtgttgcccaggctggtctggaactcctgggtgcaggtaatcctccttcctcaacctcccaaagtactgggattacaagtgtgaaccaccaagcctggccaaggtttttttcttattaagacctccaatacagtgttgcatagtagagctggtagtggacattcttgtcttgttgctcactttaaagaaaattcttgggattttttaccatggagtctgattttgcagcagaatttggtcgataccccttaacaggctaaataagttttggtttatttttagtttaagaggttttatttaaaaaaaattctttaattaatgttgttttgtctttttttaatttgaatagttagctttttaattttcttgcttactaatacatttaatcaacattgtaactttttctcttagttctgttttagctgtattccatacattttcatatgtggtatattgtaaatatttttttccagtgtgtagtgcttgtgctatacacatttattttttaacccatgagttattcggaagtgttttttaatagcaaatgtatgatttttaaaaactgcttatttaaaatttttaatttatagaattgtggttgaagagtgtggtctgttatatcaattctttgttattttttgagacattgtggcctaacatgttattaattttcattaaatgtgctttgtgtgtcttaaaaataatgtattttctaattgtttggtgcaggaatctgtaattagcaatcagttgctaattgtctttcatttgtctatctttaccaatttttgatacttgatcttttagcttctggagatttgttaaaattgttaaattgttaaaattgtcactgtgtggttgtgggttttgttaattttggtattactcacatatgtcatccaaaataatatactggtggcactgaatacaattggtagtactgtgaaaatgatggaattttttgcatattttctcttttatattaaattatatattttctctttcttttatcttaatatgcagaagaatagtttcaccattatccgttttcaagcaaccatttttttaaagcagaagaatttcttctgttttatttgatcattatgaaatagggtgttaatatttagagctaaaatgaaaacggtccaggatgtggtggctcatgcctgtaatctcagcactttgggaggccgaggtgggtggatcacttgaggtcaggagttcgagaccagcctgaccagcatggcgaaaccccatctctactaaaaatacaaaaaatcagctgggtgtagtggggcgtgcctgtaatcccagctactaaggaagctggggaaggagaatctcttgaaaccgggaggcggagattgcagtgggccaagatcgtaccactacactccagcctgggtgacagagcaagactgtctcaaaataaaataaaataaaataaaatggaaaggattaattttatacttgatgtagaaagaatccaagctttcacaacattattaaatatttaaaaagtatatatttgaaagcaaaaaaatattttttttttagtggcaaagataacaaaaacattttggagcaactgaagtagcttgatttgcacagacttgtagtttagcagttaaatgcttttgcccctcatgaggaaatgacaagccaaaggatggccacttgcagtaacatgtactcatccactaaagatttgacatgcggcggttcttcctctcaggattcattggcgataatgtcatggttttcttgtccttaccacattcccaagagatgcatagccctggtcacccctcctcatctccaggcttaataggtcaatgggaggcagaacttggactactaattgaaagaatgtttcccctgaccaagccttcaaattagattcagtgaattgaagggagtgagatgatgattcctctttaaaacttgtacttagtgcataagattctaatttttctcccagagcaacagccacattaatctctttgaaacagaattttaaagcataatgacataattaagttagggcaactaagagacatgttttagttaaattactgagatagtattttgtggtaaaaacattatgtgtttatagttcctcagaaagtcctaagtttcatgaaggcacctattgttgctgtgagtttcctcatgttgaaatcaggtgaaaggctaggctgttgtcaaaatgattttacttcaacaccgtccatcagatactgatttcagagctgcataagataggaattcttgactcagagcctattttctttccatctgcagtttgaaaggggttgttagaacattgtctcccttgtgtgttatctgtcttattctcactgactcagattatggcatttgcaagtacagtaattaggacataaagtactgcaagtattttaacacttcttttaccacggtagccttactgtccaatttctgatcccttcaggatttaaacatctatcatcagagtattgtgttggtgtatgcttgccactcacagtcagcatcacatgagagtttcagacagcattagtccagttatgcaccccaaaactaaagctgaaaacatttgattttgttggaaccctatctctgagtaagggcaagagaaggacaaaggagtagtggagtgaacattgatttttagcatcagtctttggcttgaaactttgctcagggtcttacagactacgtcaccttggtcaggttctttcttttttgatcctcagtttccttgtctgaaaaaatggggcaccaaagttcctattttgtagttttgtcaagatgatatgagattgtatgtgtaaaatatttaatgtgtaaatgctcaaaaatggtaggtattatagtaagtcttttaatgtatgagagtgtttttttcattggacgtaaacatttcttcaacagtgctacttttcttcttcctaattccttttctcttgatactaactttttactaacttttagtttttgctcttggtattgatgatgttttgtaggtgccaccccaggaatgcctgagtgctggcatgaacatggttgagctaagggaaggtcacttgtcagtttcagtaacattttaccattgtgccgagaagagagagggaggctctgtgtggtttgtgtctgtgtgtgtctgtgttttaaattccttggcaataagatgatacatgttttgagaatctattaaatagcccagaatacaaggtgacggatttttaagagggccagactttagatacacatgagccttcttttgtaaagtttcagcctcttatcttaatacagtggaatttattaccgactggattttttttccacccccgaaagataaccactgtggttcactgtgcattttatcagtagctccctcgtgggtgagatttacaatagaagagcagacatcttggtacttaggtttttctcacagtttcaaaaataattcaaggttgtcctgccagagtggagactaaatcctaattgtttgtgcagtttttcttattgtatccagatgttgggcccccttttatctttggaaaccattagcattcttgattcttttggaatgagccaaaaagcacagaactcctgatgcctgaaaattcattcagaacaccctgccagaccacattttaggatatgaaagtaccagatctcagtataacttgagtgaagggctcaaggcctatatattttgaaagatagctactccagtatagttatattggtaaaaggagagccaagaacagccatgagggaaatacatttttcaagagagggcagtagcataatggtaatgaagaacataggaaagtgaatcacaaacaatatactttggtccttaagcctaagaggcagataaatctttcttcatcagttagtggaatatattatttctctgttgctctaagcttgctgttctgaccttcttttgttcagcaagaaaatggagatacatttttaaatatcaatttaagtggatctataaagaaaaagcagatgattcttttcaaatgtttatgctctataaatatcaatttggaatcagtatttgtttataatgaatatttaataccaaccaagaagcatttattaaatagtcactatgtgtcattaacatgtagagtatgaaaaccaaatgaggcattcactgctttcagtaacttatatattaaaaggggaagatgacatttgtcattatcattatctaatacttatggcatgtgtactgttctaattgttctaattccttatgtgtatagagcattactctaggcgcttcaaataatagtatttgataatgatgcgacgtaggagaaaggacttctacatatgaaggtaataatatactaagacaaatgctaggtaagtggtacaggaaagcgttaaaggatttgtgaaaaggaaggcaatgactcagatatgcaggaaggctggggaaggatgttacaggcaggtgcaaagtcagaaaggtagaaatgtgttttcattattcaggttggccgaagcagatgtgggtgttgactggattttggaagactttgaatttgaaagtaaggagtttgaacctgattctcttgttaatagggtatctgaagacactttgactaggaaagtgataaaatggagtttcaaaagactgtaaaaggtgagaccaattaggaaattcttgcaagaaccaagatgtggaccattctcacctgtgaacattttttatctttttagatgtgctgccactattgctctagttagtaatcctttgaattttggatttagctctctttgaatttatatatttcagttcaccagaattaaaacagctagagcaccattgcccagaaattaagtccattcatatagaggcagttactgaaactgcttaactggaagagttattctgggctccagggaaccttataacttatgattccagcaattcttagtggtttcaaaggacattcaaaggaatatttatggctgtacacagctacttggatagtaaccagtgtaattaaatgagctgatacatgtaaagcacttaggtgcctggtaacaaaaacaaaacccaaaaccacacactcataacaaatgttagaaaaaaacaaaccctgtgataagaattgcacattaaggcatactattccaagccagaggaaaacatttgcaggattaccagagttgttgttgttgttgttgttgttgtttttcctgcaaacattcatgcatgaaacagagaaaaaaaatcaggctctgcccagttctctggtttgcacagaattaattacaatttaagtagaaaagagtcattgtaggaattaaggaaacagtaggttgaccatattggtttacttagtgacagtctggaaaatgaaggtttgaaattgaaggtcatgaagtttaaggtctagtagatggtcattccaatggaacagtgggcttcagtctttggtcaaggtccttcccagttatgactacctagacattatgttgtagttcatatgaatccagaaataagagcaaatagttaaggaaaggtgtcttgctgcttaaaaaaaattgagttactgacatataatttacacaccatacaatttgttcatttaaagtgtacagtttaatggtttttagtttattcacagagttgtgcaaccatcaccacaatctaatttttaaaattctatctaatttttaaagttctactttttttttttttttttaatttggagacaggatcttggtctgttgcccaggctgaagtgcagtggcatgagcatagcttactgcagtcttgaactgggctcaagtgatccttctgccttagcctcctgaatagttgggactacaggtgtgcaccactatgcccagctaatttaaaaaaaaaatttttgtagagacagggtctcactatgttgctcaggctagtctcgaactcgtggcctcaagccatcctcctgccttggccacctgaagtgctggaattacaggcatgagccaccatgcctggccactatttttaaattgagatataatttatatgtcataaaatttgccattttaaagcatagaattcagtgtttttttaggatattaacaaggtgttgcaactttaagcactattgaattcaagacatttttatcatcccctcaaaaaactctaatcctgttagcagtcacttctcatttgcctctcacccccaggcaaccattaatctactttctgtctctatagatttgcctgttttggacagtttatgtaaatggaatcatataacatgtggccttttgagaatggcgtctttcattttgcataatgtttttgaggtttatccatgttatagcatgtatcactatttctttttgttgctgaataatattccactgtatggatacactgcattttgtttatctgttcatcagctgatagacatttgggttgttgattccttctgcttttacgtagcatttttcaaagaaaaataaatggaagatacagttgcttatgaattcactgctttgtctgtaggcttagacagattgttcatttagcttgacaaatgctgcttacaaagaaaaataggccagtcttagcataggaattcatgcatttccggcatcagataaaagaatcagagcaagatgtggtattttcaaggcttgatttctctcttcagtccattctttctacggctttaggtttcttgtattatcattcagctgaacatctttatttcttgggatacatctgaaaaaatatgctagctcaagttaaaacaaaaaacccacaagctagctgaagccctgggggacagcatggcctttaatcagcttggaatgattctcttacacttttcaacctgacaagctgctgtccagcacacttgatcatctatctagctaacgggtgctgaaagaaaagttcaaagataaggttactgggaaaattacatttccccactctttctgcacttagtttaatggcagttctaacatgtcaagaatctttattttgattttagagactgtacaatatgagatgtagatcactaaacttaaaacctgacatttggcattcaagtcccatccttgttggttactagcttagaaatctgcaaatttctcacttgtaaaaggggcataataaataacatatatctcaaaagactctttgaggattaagtgatatagtacattttctggcacttgatagatgcctattaagtgtaaggcttttccccctctactttatatggtggtcatgcagtttggatgtgcagtttggatgagaccattatgtgaaagcacctagtagaaagcctgaaatgtagaaggtatttagtgaatgttagttaaatttgaacctaagtttccaaagaatagaactcttttttccagatttaggggtgtatgtttatgcgtgtgtgtgtgtgtgtgtgtgtgtgtgtatgtttatgtttatgtttatgtttatgtgagatagagatactgaaactgtgtcagttagcttttgctgcattgtaaaccaccctaaaatttagtggtttaaaatagccattttatttaacttgattcatgattctgtaagttggcagttaggttggactcaggtaggcaggcaattctggtctgagctggttagctctgctctgtggtcagctggtgcaataacagctggggatggctgatttatttgttgagacatttgttgacttgggcctctccacgtagtatttcaccatctagcaggctcaatcaggtttatttatattatagtaaaatatacaagactttttttttttttgagacagggtcttgctctgttacccaggctggagtacagttgtgcgatcatagctcactgcagccttgacctcctgggctcaggtgatcctcctgcctcagcctcccaaatatttgagaccacaggtgcgtgccaccacacccagctaatttttttaaaaaattattatttgtagagaccaggtcttgctatgttgcccaggctggtctcgaactcctgggctcaagcagtctacccaccttggcctccaaagtggtgggattacaagcatgagccaccatgcccagcctacacaagaatttttaagtctcttcttgctgtacatttgctattgtctcaatgcccaaagcaggttagatagccaggcccagagtcattgtgagagggagtaaggtaaggatgaagataccaagaggaaattgttgtggccatttttaaaaacaatttatcttagatactaattgtgataggaatgcaaatctgtttactgagaattattatcagtctataaaatcagacttagtacaggtgctgcaatgtaatgacagtgttattcacaataggaatactgctgtcttcttcatataaacttaacatgtcagtaaagcactctcacacatgaagaaagaatcattatggtggaggcatttattttctggaatcactaaatacaaggatcagctaattgtttttgaatgtctgctgtttcttgccagttaaggtggcttcccctatcagtcagttcattcagtttttcactttagttccataaaatatttcatctgcatctctagacgatatctttattacagtttgagttacctcttccatctgttaaaccaccaacaacaaaaaatccaaagaatcagagatactcttgtcactaaaatatttcttgagtcttaactatttttcactttggtctttgctttatgcctgtacacatctagttgtagcatgttttagatgagaggcatccagtatcataatcctactagagataagaacttcttcttttgaatagttattaataactgagcataaatatgttttcatatgctactgccaagtcataaaatcacggaatttttcaaagctgcagggaacattagatataatctggccctgtgtcttctttttgcagattgggaacctgtggttttaccaagatcgtgtagtcagaaccagaatctaaatctttgaactgcaggatagggattactttccatttttttttattgtggtaaaatatacataacataaaatttgaggagaggaatttttccgttcttctgtctccaaaatcaactttagctttttggcaatctgataaatgtaacattttaactaatcattttgctataattaaatttctaatacatatgtgcattttacttacagcttatatctgaatatgtggttagataaaaaaaattctctttttatttcactttagtttttggaacttcgaattctaataaatgtcaggtataatcaggtccctggtattgatatcagaaggtaaaagcaaatacattttagatagactttcttatttgtggattttcattgttgaaagagacaaagaacagttggtgttttaactccaaaaattagaaatttttaagtgggttggtaagaaagaagaactcaaatatgaggcaagcagatgttctcactttttcatctgaacagtgacagaaatagacaaataattatattctcacttaacagacatttctttgatttttatgacatggtttagaattagaccacagaaatgttatctttagtgtttcatcatccttggtttaaagattcaatttcttaagtccacctgtattgcaactgaaagtaattaatgaagaaccatagaaatatattgttttattgttggatataatacattttaaaaaagaatgacgcccttatggtttttgtaaattccattggagaaaaagttttaaattacctgttatttctgtccagaagtcgccatttttattgatgaactcaatttagtcatttatctgtgcatatataaaaatgaatggatggatggataaacagacgtgaatgacagaaataatgagacaagagaggttggtgcgtgatatatgcagcttactctcaaattttaagtgtgtatttcctaagaaagaagataccctcttttgtttgtatttcctacaaaggagttgctcttttttgttaccacaataaagtggtcaaagactgatttttcctttttatttcttgggaccgtgtctcactctgtctcccaggctggagtgcagttgcatgatcatggctctaacatcatacctagagcacacaaaacaaaacaccatatacttgctgattggtcctagcaaataatgtatttaattcttaattagtgaggagaaaacagtgtagtaggaaaccattggcagtctgtggatatgggcagatacgggattggctgctgttgaacttagcaatggtgatagtgagaaaaatgacaaatgttctgagaggtagggtggctggcctgaaactggactaggaagtgtcatgaaataagtaagattgcatagaccaagggtgcctggagagaaacacttgctgttctttatcttctagataccttctcatctacttcttaaggtgctgagccttctggttgtttttcctgattactgtaggaaagggccgtataaacccctatgttcatggaaagcaatgaaaaatacttcctgtatttccctgtattagaatactaatcagaggcacaaagatacttcaacctttgaaacaggtacattcagctagtttgatttttaaatcatgccaggtaaaattattctttctgctcttgttactaataactaatagctgctgtattctgctctcttaacggttactgctactatgtaactgctgatgcttttctccaggatggtttgaggccccatctaagtccccttttaccagtcttccctgaccacacagcatgcaagaactgggcacatataattcttttaatcaattctatttattttatacctgttcaatactaacttctttttttttttttttttttttttgagacagagtctcgctctgtcacccaggctggagtgcagtggcgcgatctcagctaactgcaagctctgcctcccgggttcacgccattctcctgcctcagcctcccgagtagttgggactacaggcgcccgccaccacgcccggctaattttttgtatttttaatagagatggggtttcatcgtattagccaggatggtctcgatctcctggccttgtgatctgcccacctcagcctcccaaagtgctgggattacaggcgtgagccaccgcgcctgacccagtactaacttatttaaaaaaatgttcatgagaagtaaataaaatcaccaatagtcctactaccagagataaaccctgttaacattttgggtattttcccctagttttttttttttcctatatgtatgattttatagagtcaaaatcatactgtatatataatactgtatcctattttttcctgtaagtttattgtaagccatatgtagatagtatttttaaagttacctaatatttcatagagtggatgaattgtgatttatttatgttttctttttcatgtatgtttttctcattattccagttagattatgagattatcaaagaaagtcaccctactgtatcatcccctcttcctacttaaatgcctatagagaatattgtatgtgatagatgctaaatatttttgcttgcttctgtctcattctaaatattataggagctgtttgctatgggagactccaaatgtattatttgcagattatcagaatcattgcatcacccaaatctttccatttagaaagagggaccccagggaaatttctgaatgtattttaggggaaatcttaactcctctggaattccatgagaattttttgggcaaggatttgtgcattttttgtagtttcactagattcttgaaggagtcctttatctaacagaaatatccactgatccagagattgtagcccatctggagatatgtctatttattaaacttacctaaaatttagaatgtttcttttcatttttcatttttctttgttttcaggaagggatgagaccatgcagcctgcgaaaccatcctttcttgaatattttgaacaaaaagaaaaggaaaaccagatcaacagctttggcaagagtgtacctggtccactgaaaaattcttcagattggaaaataccacaggatggagactacgagtttgtaagtagtgttggaagtaaatggttatgtcttcaggggaagttatttgaaatatcacacattagtgcccaagcattttcttgtgcattttgagtctcctaaaccatccctgacagtgtctactgagctgaaggacagtattttgactgatgtttgggcagttctctggtccctgattagtggcatctttttcgctttcgaagtccatattcagtttttatttttgtccagttagaaattgttcatggtgagagaagtattcaatcatcaaatgaaattgcaactgtctttaatagtttatttggggttttgattttatatttaagaattagattggagggcaattgacactgttttgtggtgtccttgttgttttgctaactattctcctaattttaaccctgctgaaaggattattctcagtttttttcagaggatgaatgtataattattccagtttcatatgaaaaactggatgtgttttcctttctctactgtggaacattttccctcaaccatagacacttattaatgttcataggcatttaaggagtagagcaataaaaattttgggaaaaagtaagctaaggagtctgcattttcttcttgactattactagaaaagatttttctcttcaggagctttttatttttacattctaaaattctgaagtttgatcctccatctgtcataattctgttgtttataaaagaacttagattgggcattgggcttgaattctggtaggcctgtctagttctggctttccactatactactgactggcctagaggaaatgacgccattcttccataacttaatttctacttttataaaatggcaggaatatcacagtttatacaactaatggtagagatcctttgaggaccagaataactcatctgaggtaaattaactgattagtcactgaacccatgatagaacccaggttcatttgttttattacctgtttgttcatttacttacttatccagtggtttttttttttttttttggatgtcatgtgtttgacactattctagggatgtggtcattaacagaacagccaaaaacccatccctcatggaggtttcattctaggcgaaggaaaataagtatttagtgtgttaaatggtagcaactattgtaaaaaatataaagcaaaagggaggttaggagacagaaagagtgtgtgtgtgtgtgtgtgtgtgtgtgtgtgcatagttttttaaaaataagagtagtcaaggaagttctcactggtaagaagatgaggatgtgaactatgtgaatatctagaggagagatttttaggcagcaggaatagcagatgcaaagatcctgaggcagggacttggctggtatgtttacagaacaacgaagaaacagtctgttttggaatggcatcaataggatgtgcagcaggaaatgatatcagagatataatggagagcgagataatgcagggctttttgtgtaataaaaaggactttagcttttactcttgagtggaatgaaagaccattggaagggatgacttgaccttatttatatttaaaaggtattattctagttgctgtattaatacattataggagaactgtagcgtttctgaacacaggtgcagtgtttttatttactattcaaaggtggcaaattatggggcacatctgctactattctcctcttctaggcctttggcacccatctgttccactgaatcagggttcagcttcagaatccttcttaacacagcacaccaggctgccactgctaatcatagtagacttacgaaatttgaattattgtgcgtctgttccatgttgcctgtatagttgtcttcaacatgtgtataaggactgatttctcagtttagccagtcttcaggcaaagatgtttaactactgggtaccaaatcacatcattattgtgatagaatgcttgagaatcctcaaatctgtagtacttctaagcttagtttccttgtttttaaatgttttagaagttagcgattttggctaggcgcagtggctcacgcctgtaatcccagcactttgggaggccaaggccggtcaatcaccttaggtcaggagttcgaggctagcctgaccaacacagagaaaccccgtctctactaacaatacaaaaaaatcagccagtgtggtggtgcatgcctgtaatcccagctactcgggaggctgaggcaggagaatcgcttgaacccaggaggtggaggttgtggtgagccgagatcatgccattgcactccagcctgggcaacaagagtgaaactccgtctcaaaaaaaaaaaaaaaaaaaagaagttagcaattttgaaaacccagtcactttaatcctttttaattttaaaaaatattgtttatgatatttttaggatacatgtaatattttagtacctgttcataatgtgtagtgatcaaatcagagtaattgggatatctattacctcagacgtttttctttgtgttgggaacattataaatcttcagccgttttgaagtatacaataaattattaactataattttcctactgtactatcgaatactagaacttattccttctctctgacatatttttgtaccccttaaccaacttctcttcatccctctttcacctctttcccagccactgctaaccgtcattctacactctgtctccataggatccacttttttagctcccacatgagtgagaacatgtaatatttgtctttctgtctctgtcttattgtagctaacataatgacctccagtaatatccatgttgcaataaaagaagcgacaacatttctttctcttttctggcggataatattccattgtgtgtataccacatcttctttatccatttatccattgatggacacttgggttgattccatatcttggctattgtgaatagtgttgcaataaataggagagtttagatatcttgttgatacattgatttcctttcttttggatatatgcccagcagtgggattgctggatcatatagtagacctattttaattttttaaggaacctctatactgttttttataatcgttttattactttaaattcctaccaatggcgtatgaacattcccctttctctacatcttcaccagcatttgttatttcctgtcttattgataatagccattctaactagggtgagatgatatctctctttttttttttttttaagagatagggtcttgcttattctcccaggctggagtgcagtggtccgatcatagctcactacagcttcaaactcctggcctgtagtaatcctcccacctcagccttctgagtacctaggactacaggtatggatcaccacgcctggctaatttttaaattttttccaaagatgaggtctggaaatgttgccccagctcatctggaacacctggcctgaaataatcctcctgcccgggcctcccagaatgctaggattacagatatgagccactgtaccggctctttgtggtttcaatttgcattttcctaatgattagtgatattgagattttttcttatgactgttgcccatttgtatgtcttttgagaaatgtctattcaggccttttgcccaactttaattctaatcattattcttggatcagtagtttcaacgtgtaaagaatttatttctctttgccacagttttctcatactaagatcattggcaggaaacttgttttggtgggcaagctacttatacggaggagctttaggagcttttagagagagtactttttattttggaagtagatgacttctagggggagtgggcccatggtgcacagtgaccaggttagcacattgcatgacttgtattcctcctgagactttcttctaaatctgaggtcataaactggcagcaaccagctcacagacctttctgtgtgtcctatacggtgtttaaatttttaatttttaaaaattagttgcttatgttaaaaacttatgagattttacacaaaatgttggatctccagcttattttgaaaatgtgaaagatctggctacagtagacctacattattggttaatggttgtctggagctgagtggcagctgccctctttaggtatgacctctctaattcttcacactatttgacctacttcactcatttgtattaactgtctgacctgtctgacacttaggggcatttgatattgggactcttgcactaaattgtttggatttatatatgcttgagccagcctattctgatatatgacattctactctatttgtaccttcagaatgttaagataatttacttaataaaagtctcttacagaaaaatttcaaactaagcaataaaattgagatgagagatacatgagctgctctcccaacaaagatcaaatgaaaactgtcttcatagttgatattcttgttacatagcttttaccttgatcctaaagcaagcatttgaaataatagtctagaacagtggttctcaaagtggtcccagaccagcagtgttagcatcacctagagactgttagaaaggcagttattcaggccttaccccaggcggactgaataggaatatctggggacagcacccattgattggtgttttaacctgtcctcctggtgactcttacccactaaagttgttctaaaaggtttttacagtagtatatcttcatatacatttcttgttttcttttctattaggtactatagaaattcagagataaggatgtatttctattttattaacattgtatgatttttaaatttccttgttattccccttttgagtctcctatactcttactggaggtaccaaagaagcacataaaatatggaaaatgtatgtttgtaagtgacatctggcaaataaagagctagtcctttgagtgaagaaagttctgaataatctcctgaaagcttaacgaaggatatgtgtcagacttgctaacatgtttccctcacagttgcttttttttttttttgagatggagtctcactctgttgctcaggctggagtgcagtggtgacatgatctcagctcactgcaacctctgccgcccgggttcaagcacttctctgcctcagcctcctgagtatctgggattataggtgcctgccaccacacccagctaatttttgtatttttagtagagacagggtttcaccatcttggccaggctgatcttgaacacctgaccttgtgatccactctctttggcctcccaaagtgctgggagtacaggcgtgagccaccgggcccagcctccttcacaatctcttacagactttctgatttctaggcagatagtatttaattatgaaaaaagataattctgtttcctcctatgaagagaattgctgctttccaatgacctttttgcccaaaatggcaaataggaagtaatttaatcaggagtagccgaattttgtactgacaaaacttcatattttcatctgaaactgaatatttgtctcatttctaaaagtgaattgcctgtttgccaagttgagaaacccctccaaaaatttctaatagtgtttaagatacatagtgattaaaatataaaaggtgcttaaaaatgcaatagtctctaaaattgatatttcatattctattagcagatcacttttttggaaaaaaatgtaatattttgtgagaattcagaccttcccattttgccattcataaagccacaaacagctgtaaacttaaatccaatttggctcatgaatcttccaaaaacacactgtaatattttagtttaagatgacccaggctgggtgcagtggctcatacctgtaatcccagcactttgggaggctgaggtggaaggtttgcttgagctcaggagttcgagaccagcctggcacatagtgagaccccatctctattacaaaaataaaaaaaagatggcccaagtgccaacagtggtgaacaaaacagaccaggcccatgttctcatggagtttacagtgaaggaaatagacattaagccagtaccctagtaggtatcagttcaggtaataatagcgaattttttttttttttaaagcacagttaagagatattgtgagaaaaggcctgtggagagacaggacattcagctgagacatcagtgaagaggggaagcaagtcacaggaaggtaggggaaataagtacagagactgtgaggcaagacatagactatgtgtaaggaaggaaaggagtccattgtggctggagccgagtgacacatgggatagcagtttaaatgtaaatgcatcagtaatcacagtaaatgtgagtgcactaaaatctcctattagaagagaaagagtctggataaaaataacagtcaaattccggctaaatgctgtttataagagatgtaacggaaagaaaatacaaccgaaaagtttaaaacagaggaatggaaaaagatacactaggcaaatactcactaaaagaaagtgggtgaaacaatattgatatcaaatgaggccaagcatggtggctcatgcctgtaatcccagcactttgggaggccgaggcaggcggaccacgtgaggtcaggagtttgagaccagcctggccaacatggtgaaaccccatccctactaaaagtacaaaaaattagttgggcgtggtggcagatgcacctgtagtcccagctactcagggggccgaggcagaagaattgcttgaacccaggaggcggaggttgcagtgagccgagatcatgccactgcactccagcctggctgacacagcgagacttcatctcaaaaaaaaaaaaaaaaaaaaatcagatgaaatagaatttaagacaaaagaatgttacctgggaaggatatgttttatactgttaaaaggtatactttatctagaagatgtaagtcatgcacctatatgaaacatacatatttatcccaaactgatagaaatagaaggagcaatgagaatactgcaattatagtttcaagaagttaatcaagaagacttaaatattcttctctccaaaattgacatttcagttagacaaaaaactaacgcaattaacaacactgataaaacagaaaatagacaaaatttctaatatatatgaaactttaaaaacatggaatatttgtaaaacaactattttattcttttttttacctttatttcaggttcaggggtacatgtgcaggtttgttacacaggtgaattgtgtgtcatgggggtttggtgtacagattatttcatcacacaggtaataagcatagtaacccataggtagtttttcgatcctcaccctcctcccaccctctgccctcaaggaagccctgatttctattgttctgttctttgtgtccatgtgtactcagtgttgagctcctacttacaagtgagaacatgctgtatttggttttctgtccttgtgttagtttgcttgggataatggcctccagctcatccatgttgctgcaaaggatgtgatcttgctcgtttctgtggctgtgtagtataccatgtcaacatgtaccacattttctttatccagtctgtcattgatgggcatttaggttaatttcatgtttttgctattgtgaatagtactgcagcgaacacaacacatgcatgtgtctttatggtagaacaatttctgtgcctttgggtatatactcaataatgggactgctaggttgaacagtaattctcttttaagttctttgagaaatcgacacatggctttccaccatgattgaactaatttacattcccaccagcagtgtataagtaatcccatttctctgcaacctcgccagcatctgttatttttgattttctaataatagccattctgactggtatgagatagtatctcattgtggttttgatttgcatttttctaatggttagtgatgttgagtatttttttcacatgcttattgaccatgtgtatgtcttcttttgagaagtgtctgttcatgtcctttccccatttttaatgaggtcgtttgctttttacttgttaatttgtttaagttccttacagattctgaatattagatctttcttggatgcatagtttgcagaaattttctcccattttgtaggttgtctgttcactctgttgaaagtttattttgctgttcagaagctctttagtttaattagaacctatttgccaattttaatttctgttacaattgcttttgttgccttcatcatgaaatcttcgccaggtcctatatccagaatggtgttttctaggttatcttctagggtttttatagttttaggttttacatttaagtctttaattcattttgagttgatttttgtatacggtttaaggaggggggtccagtttcagtcttttgcatatggctagccagttatctcaggatcatttattgaataaggagtcctttctccattgcttgtgttcgtcaactttgagttactatgttttttttgttttttgttttgagacagagtcttgctctgttgcccaggctggagtaatgcagtggcgtgatctcaactcactgcaatctctgcctcctgggttcaagtgattctcctgcctcagcctcctgaatagctgagattacaggcacctgctactctacctggctaatttttgtatttttagtagagatggggtttcaccatgttggccaggctggtctcaatctcctgactttgggtgatctacccacctcggcctttcaaagtgctgggattacaggtgtgagccaccatgcccagccaatgtttgaaagggttaaaaaagaaatcaggccacgttacctgactataatgcaataaaattagaaattaacattaagaaagtagtcaaagccactttatcccacctggagatataaaaatatattcttaaatcttactttaaagataaaataaaatataaattataaacaatttagaaatgaataataagaattatacaaaattcaaatccctgtaattcagaacctgtgggaggcagtaaacaatggcacttagaagaagatttatagccttaaatgaattttctttttagaatacaagaaagattataaataagttaaaaataggataaagataaaagcagaatttaatgaaaatagaaaacaaaccaaaaagttgattggtaaaaaccaacagcaagatatttgaaaggacctgatatttggtagatttgatcaagttaaaaaggaagagtgtaccaataaactgcagtaggggaaaggcgagagacagttactagaaacagaatatggcagtgtgattagagattattatttataattttatattattaaatttgaaaacttagataaatagatgtttaaacactatgccatatttacttcccatgtggaagtgtaaatgcataaaaatatgcaagatacttttgaacaagaagaacaaggttgatcttattctttcagagaccaaaacataccacaaaaccacaataatgaaagcactgtgatattggcataagaatagaacataggccaggtgtggtggttcaccctgtaatcccagcactttgggaggttaaggcgggaggatcacttgaacccaggaatttgagatcagcctaagtatcatagtgagatccccatctctacaaaaaaaaggaaaaaaaattagctgggcttggtggtatatgcctataatctcagctacttgagaggctgaggtgggaggatctcttgagcccaggagttcgaggctgcagtgagctaggattgcaccactgtatactgccctgagtgacagagtgagaccccatgtcttaaaacaacaacaacaacaaaagatcaatgttaaagagtaggattaagaaacatacctatgtatgtatatgtgtgtgtgtatatataatatagataaatttttaaaaatatatacacctttgttggatgcatagtttacattatatatgagtgtattatataatgataaaatacaaaataatgcaaactgtaaaatttgtgtaaatttaataaaacacaaatcatgctaccatttctatgtatatgcacacatacagctgcatagataaaaaaagacaggatctaaaaataacttgaaagtcattacctgtggagagaactttagttttagctgtctttacacagagagagaatatattactatatcaatatattacttgcttaacttaaaagaaataaatagagcaagatacatttttaaactttcaattgagattttttttctggttttagtctaaataaagttaaccaggttatatatatacagattaagagaaccacaatacttttcagtcagttatcagctttgcaagtattgttgattattagctttcagtatccttagcttttagagtaaatttcctatttattcaaatgaagttgctttcagatttcttatgacttcttctataaaaagagttgatagtaactggccctcacatattaattcaatctatatttattgaggttctctgtgtgtactatgtgtgaatagataagactgcgagatcttttacagccttcactttatcttacccgtctttgtattcataacacctagcaattgcccagcttagagttagcacaccatttcaaattaaactcagacatagtctctgaattcattcattattttattcaactactagttgaattaaactcaaatatagtcattacgcttagagagtttatgatgtagcagaaaataatcaaatgattttgatacattatactaatgatagcttacatttattgaaaatgtactatgtgccaggcattacatatgttacctcgctctcagaaccatcccatgaagtaggaatgttgttattgccattttaggggtaaaaaaactgaggcttaataggaagaataagttcaagagatctattgtacaacatggtaactagttaataaacaatgtattgtattttgaaaatcactgagagagtagattttaattaagtgttctcaccacaaagaaattgtaagtatgtgaggtagcacacatgtaaattagctcgattgagccatttcacaatgtatgtacatacagtatatccttatgaggttcattttatgaggtttcagttacccactgcagtctgaaaatattaaatggaaacttgtagaaataaacagtttctaagttttaagtagcatgccattctgagtaacatgatgcaatcttgtgccatggcgcatcatcccgcctgggacatgaatcatccctttgtccagcatatctgtgcagtacacggtacccactcctagtcacttaggagccaatttggttatcagatcaccttttgaggtataacagtgcttgtgttcagggaacccttattttgcttaataatgtccccagcgtgcgagagtagcgatgctggcaattccagcttgccaaagagaagatgtaaagtgcttcttttaagagaagaggtgaaagttcttgaccaaaaataaggggggaaaaaccatatgctgaggttgctaagatctgtggtaagaacgaatcatccatccatgaaaattgtgaacaaatgtgaatcttccatccgcgaattgttgttgtaattgttctattttattattagttattgataaattcttaactgtaacaactttataaattaaacttcattataggtatttacgtatgggaaaaagctgaatgtatagggttcgttaccatccacagtttcaggcatccactggggttttcagaatgtatctcctgtggataagggagggactactgtatttcaaaacatcatgttgtatacaataaatatgtacaaactgtatttgtcaattaaaagaaaaccctgagactaaaagggaggtggttgactacagttatacagacagttagtggcacagtgaggattttaaccaaagcagtttggctccagagcccatcctcttaactatctgtactgtgtggcatttttctaggctattctggtaagttctctccataaagtacataaagaaggggctgtaggagcccaaaagagagagcaagaaccccagggaaggcaccaataagtgtcattggaagtgtgttttgaaagatgaagtgtgtctgtggggatactaaggagtgtggcatgggtccaggaagtactgagtaattgagctggagcattaccagtgtggatgtgtgcaaaaggggaggaagggagcgaaggagagaacttcaggtgaagtaaattaatgcccaatgtacccttttttgctggaaatatttagtactcttttagattttttccttggtatatcagagaaattaaaaatggagtcctaatgcagcacagagagctaatatccatctgacgttgtgtgataatgggtccatcaggatataaaaccaccaaactgttaattcaaaattaatttgataaaagtaacagaacctgaacaaaattgattgtttgaattccctggatagttataagccattcagttggctttttgtggtaaggaaggataaattttagccctgagtttttcccaggaggccgataacaacctatgattccatgaaactttatcttaaccattctctcctagatcagggctccaaatctgattgtaagttgagatttctttgggtttttacaaagaagctttactgaattgtcagaacatagtcagttactcatttattattaggttgtactttttgcttttggctgcacatgttagaaatcagacacttgctgggaggcaagaattattactaccttatttataattagaaatcatgattgaaatggtagaagaaatgctttatttgcctacgcttaagtcaatactgtcaagaatgcatcttgatgtttcctgggaactcagttatctacaatttgaaactttatctgccatttcatagagacaaaaataactctcccaaaacatttggtgaaattattgttcatttatttcaaagtgactctaaaagttagtgcatattcttaaatttaccagcctttaatggtaaggtaaaatttaatgtcccattactcagttacaacaatcatcaagtcagctattcttgttttatttaatccttcacctccactattcacccacactgcttgattgttttgaagcaaatcccaggcatatctcatttctaaatatttcatgtgtatttataaaatattattgaccttttaaaaattataattataatacctttatcatacttttacaaattaggagtaataaatttccttaatgccaaaaaatgccttgttactgtttagtctcctggatttatatatattttttagcttgtttgaattaggatccaaatgcgatttataggaagttggttgatatgtctcttaagccacttttaatttaaagcccttcctttctgctacccctgctcgtgtactctgagatactgttggagaaacccagttgttatcccatatagtttcaaccttcattcgggatattgctgattgcatctaagtggtcttatttaatatgttccctgagtttcttataaattggtagttttatctagaacagaggtcctcaggaccgcttcatacttataaacattattgaggaccccagagggctttcgtttatactaatatttactgaattagaaattaaaactcaaaaaatgtttaaagaatttatttacttaaaaaaaaagctaattatacattaatgtagtttttttcaatgaaaaatgaccattttcccaaaacaaaaacaaatgagtaagaaaaatagcattgtttacatttttcaaattttttggcttagacagatagatgatcctatctgttttgcattcagtctgttgtaatacattgttctgtttgaagtataggaagaaagtctagcctagcaaaaagaggtgtagttgaaaaagacagaactattgtaatagctgtttaagataactgtggatagtctttgaccctataccaaaactcaacaagtagtggtttcttataggttagttgcaatgtagaatataaaactaaattcatgaaattttcttactctgtatattaaaattcattgatgttttaaaattttgagtggaacttttactcacacatgattttgtaacatcacgcattgggcatttggaagatgttggttcattcagttacatggatcttctaaatgttggcacatttcattaaacaatataaaaaaaccccacattccttgaagttatgaccagtctcatcagaagagtagctaagtgtagggaagttgtcaagctcacagtggtagattcaagttttccagaatacttattttcatttgaaggtttgaattttatcatcagctacaacactcttagttgttttcctttgagtgacagactcacttttttcatttctgagaaaatgtctgccagatacccaagtctgaatactcacagtttgtcatttttcatgtaaaatggtgctctgtggaaaaagcagctggttgagcttgcagctcaattgcacaagtgctttgcttcaaaatgaccattgtatttcagttaaaacagaagtgctatatgcggacttcccatttcatcatagatactattaaaaagacatgaacttttttactacttcatcaaggacattcttaaggatttttaaaaaactgtagccagtgactgtaaagaatgcaataactgctgacactatttggtgccactttttgatttctactgaggctaacagttttagcccccactgcttttgtgtaatcagtacagatgtcaacacagtagaaaagtcaaatagtgtcttaagattaatatgaaaatagtttggtcttatagagtcccctaagagtgtgtcagggatcttccagggatctgcaagccagactttgagaattgctgatctagaagcttgatcagaatcaggttcgattttttttttttttttggcaagggtatttcataggtggtatgtatacttccatcagaaggttcataatatctggatatatggtcatctctctttttccgttgttagaaaccagtgaaggtcattgtctggatgccatttcattagaggttacaaagtggtgacatttgatcatttcttctccatttaccaattgaagtaaagaagcatttcattatttagataatctcaggtacaatgtatacagaaaagacagaatatgcacttgattttttgatttttattataattttcaaaataatgtattggttccctggcattctccaaagatataaccagggattttttttgtatcataaattcgtggatttaaaaatatttgatctgtttcaatcctttcatctatttcttatgttcaaatggttccatcttgatataaccccagtagttacttttaaatgttttattgaggtatgctttatatactccctggtagtttgtgagagcatccttgctttctagtatgatgagatgtgagatgttccaggctcatcttgtccatgtcttgctccaaacctggaaacagaccttttttttttttttaaggaactcaggtttttaaaatgggaaatggtaattagagaccacagtctgggtgcaagttgtgctcattgcagttaggtcatttttttctaagccttttcaatgtatgaatccaggaaatgtgtttattacaaactcatgcgttcttatgctatttccagtgtagattgaatactactagttttttccttaaccactttcatcccacatctgtaatcctttcccccatgccaaatatcttcccagcaattctaatataattactcatttgtttttcaattcacaataaatgtcagcctcggaataataataccagtacttctgacaacaatactgaaaacagttaaagatttgtgttgcagcttgttgtccttagggacatcccatatagatgtacaatgaaattattatatgttaaagctactgggaataatttctacgtggttatgccacaaacttaattggccaataggtttttttgtttcattttgttttttgtttgaggtattgctttttattgttttgctttataattatataaactatatggttccaaggggcaagtctacaaaacaaagttgttcagatttagtttctattcctatctcctctgtttcctcctttttttaatgtttgggagatatacacaagacacatgtatgcatgcatgcatgcacgcacagacaaatacatgtatgtttgtactaccattctgagataacagtagtgtcctgtccatacttttctctgtttgttttttgttaattatatatcctagaaattactccatagccatacatagagatagtcctcattcttttttcctatgcttagtattctgttgtgaggatgtattgtagtttattcagccagtcctctgatgatacacatttaggttgtttgcaacagtttttaagttgattgcttcataaacctattcataaatagggaatgcaattttttatgattgttttggttttttaggttcatgctttgtcagttttgagaagcaagttacatgttttaagcgtgtttagcttttttttttttttaaacagcaaggagtggatttattcagaggtctccctctgccacattttagtgctgtttgtataaagcagcccctaagactctagtcataacatcacgtgtcacaggaagagtgagtaatcaatctcctggcaaacattgtttgttagcctgccgcaggcattaaaatgttgccaggtgttaacaacctggaggcctggaattcctaattgctgtaatcagaacctgaagtttttaaagtttgaatctcattacaaccaaagccagatttggttcagttactttaatttttctataatttgaagtcagaaaagaaaaagaaaaacaactgtaacttcagtgttgtttattattcatcaagaaggtttcaatggctgaaatttaaaatgtaaattagctattactctagaaagcacagtttttagttttcagctgagatgaatgtatttttcttattcctggatctatagccacgcttttgaattatgatctcattcacttagacacatatttttcactcttcttttgagctgttgaagatattttcttcagtctttcttttcagctttacctcctgtttttttttctcacacgaactcttgacaattcagtaatccttattcctgggacatgaaatgttgagaagacaaaggagatttatgcaagttttcccactccatccaaagaaagggtctctattagagctcttgaaagtgatatttgcttatgtagcccagtgcctctgaaagaaaaaacatgatgcagaacttttctcattatctaaggtgtgttcctggtgtcatttccctctcccaacaggaccacttttacctaatacaaatctggatcctccactactcaagtgaaatacaacgcaattagcatcttttgtctttgataacacacctactccaagcaccagtaatgctggaatggaaagcatgtttcatttcctttcttcatttctctgttggagtttgatgctgatattactgagatttctaatggacagtgtagggaggagaaggctgattgatggtaatttattgtactgctactgagaaaaaaacacaactcagggtattggttgttcgatacatccagattttttgactgaaaatgttagattttactttttcttttttaaaaatttccaacttttaagttcaggggcacatgtgcaggatgtgctggttttttacataggtaaatgtgtgccatgttggtttatggcacagatcatgccatcacttaggtattaagcccagcatccattagctattcttcctgatgctctccctcctcccaagcccccaccctctgacaggccccagtgtgtgttgttccccaccatgtgtccatgtgttcttatcattcagctcccacttataagtgagaacatgcagcatttttttttctgttccgtgttagtttgctaaggataatcacctccagctccatccatatccctgtgaaggacatgatctccttcctttttatggctgcataatattccatggtatatatataccacatgttctttatccagtctatcattgatgaacatttaggttgttcattacagcactattcacaatagcaaagattttacatttgtttagaaggcttgataaagttgcagttgtgtaccaagtgtaccaaagtgactgttcttttagtgaagaagcagtagatttggtagttaagatcattggaatcaggctttcagcgttcaaatcctgacttcaccatttgctgagtagctgtgggccacttacctctcctctctgagcttcattgtcctcatctgtaaaatgaagtaatactagaacccataggatacattttgaacctatatgagagttaaatggagtaatgcacatcaggggcctgcaatataatacagattgagtatcccaaacctggaatcctgaaatgctctaaaatttgaaacttttgaacagtcaaagaaagtgctcattggagcatttcaaatttcatatttttggattagagatggtcaacaggtaagtataatgcaaatatttcaaaatcctccaaaatccaaagtttaaaacacttctggtcccaaacattttggttaagggatacttcacctgtagtcacttcataaatgtcagcttctcctccctccttccactttcccctcctttcttgaaacattgtccatggagtaaatttcactacctaaacttttcccccagtgatttgccattgccttctgttataaaatcagagatacattcccaaagaatacttgctcccagagggactgatctaaaactactctaaaacaaaggaattaaaactattactgcttggaaattgattaccaaagtgatcataggtatcagttttagaacttcctaatgctttcttcctttcttttccttacatctctatacaataatacagtgtttctttctacccacctctcaaatcatgaactgttgaggttaacggaaattttcaaatcttgaagctctgaaactacttcccttacagtaacacacttctaccaatagatgccgccctttcacttcttgagtgcacaatctcctgtgtggcatttgcttaaggcagagcttgctggctatgtaaaatgaatgataaaattattgaaccaggccgggtgaatgataaaattaccgaaccagtggctcatgcctataatcccagctttttgggaggctgaggttgcaggatcgcttgagcccaggagttcaaggccagtctgggcaacatagtgagaccccatctctacaaaaaataaaagcacattttaaaaagccaggtagggtggcatgtgcctgtggtcccagctactcaggtggttgaggtgggaggcttgcttgaacccgggagtatatggtttgcagtgagccgtgattgtgccactacactccagtctgggcaacagagcaagatcgtgtctcaaaaaaaagaaaaaagttactgaatcactttagaaatttgacattgtgtgaagtgagtttgtttgaaaatagggaaaacttgtaacacagaccagtagaatgaacattacattacataagaagaagggtgaatggcccaggctttagctgggaccttgggtgagtcaccctcctctttgaattttagtttgtgatctgtaaaaattaaacataatagtacctatcctgcttttcccacagagttggagaaaggatcaaatgaaatatacattgggttatttgaactaagtttactttcaaaactttggtagaattttattagccaagaattataaggccgttgatgtttattttcggttcattgtgtattaagtattatcacttatttttatttcacattttattttactattataaaaaaattaactctttgaatgatgacaaataattcagaagtgaggaagacaaaggagcagttaagcctggatttctggtatgactccgtttgctgatgatagtaacattatcactttagatctaggtagcatttaatatagttaaagatgcattcatagtttgttcttttgtttggcaatgcttacagtgtttctgtgaggtagcagggtggggtttcttatcctcttatagtttgaggaactggagcccagagacattttacaaaggcatctttcctacttggtgccagaatcaggtctggaacccagacccctaagtggcttcctgtctgcgttaattcataagtgtgtgtgttttctcacatgaaaacaaaaacaaaaactatgcttacatattaaatacccaatgttataaaccaggaaaaagaatcttctttcaaataacatgtgatagggactacagtaaccaggaagaatgatttcaggtttattgcatcttcctgggaatttcgtgacattagaggagtatttattattaactcacagtgttttttttcatgcttattgagaacacaatgcagattgacaagctttgtatttcattaattgtttatgcaaacaattcttattggagcaatttaatttgtactttcttttgctgttctttcttatttactttctaattatgggttgtacagtaattttgctattgtcagaaagtgtctttttttttgtttgttcgtttgtttttttgagaaggagtctcgctctgtcgcccaggctggagtgcagtggcccaatctcggctcactgcaacctctgcctcccgggttcaaatgattctcctgcctcagcctgctgagtagctgacattacaggtgcatgccaccatgcctggctaatttttgtatttttagtagagatggggtttcaccatgttggccgggccagtcacaaactcctgacctcaggtgatccgcctgcctccgcctcccaaagtgctgggattataggcctgagccaccgcacctagccagaaaatgtcattctaactaaaaaggcattattattttaagaacatttttggttttcgccaggtgcaatcccagccctttgggaggccaaggcaggaggattgcttgaggtcaggagttcatgactagcttgggctacatagcaataccctgtatctacaaaaaaaaaaaaaagaaaaattggctaagtgtggtggtgcgtacctgtagtcccagctactcaggaggctgaggcagaaggatcgtttgagcccaggaagttgaggctgcagcaagccatgactgtggcactgcactgtagcctgggtaacagaatgagaccctatctcaaaactaaaaggaaaaaaaaaaaaaagcaaatataacctctgaaaacaaaggtatctattgtggaggaatcttaatggatacaggaaatatttgatatattttctggttatatctctgtcacagtgtgcttgtcagtctcattcaggcacttgttcctgaatttttcttctcttctactctgttatctattgtctaatcagtatgggcttttctgctaatttgcttttctttttttttttaaatttatttatttattttttttccgagatgaagccttgctctgtcacctaggctggagtgcagtggcgtgatctcggctcactgcaacctccgcctcctggattcaagcaattctcctgcctcagcctcctgagtagctgggattacaggcacctgccaccacatctggctaatttttgtatttttagtagagacagggtttcaccatgttggccaggctggtcttgaactcctgacctcgtgatctgcccgcctcggcctcccaaagtgctgggattacaggtgtgagctaccacgcccagcctaatttgcttttcttactccagtgttagataatgaatatttttagtaatcttcatattggttgctcattatcttgtctaattttaaattttattggcagacacacttggtctcttaagactaactacattttggattttgacaaggaaatgatgaaaatagcagttattgaatgcttgttgtgtgttaggtccctgtaaatgttttataccatcttcttttcataatatcctcacatggtagatcttatagatcttattcccacttatttgacagagaggctttgaggcgctaggtgacaagagatgctaggtgacctgtcccacccttggtgcatgattaataaaagatagaccattatttttctcagaataacgcacgtttgtttgtgtgagaatggttatatatgtgccgatggtaaacattcatctaattcagatgctgcatcttttctttctctaacatgtgcagcccttagcgaattgccatagcatgcaggtgctcagaatgtgttatttgattatgttatttgggcccattgtgcactctttggaaatctttttaaatttcttcagattttctttttgtaatatccattcatctatgtgtataggaatatgttaattggactataatttcatagatgtggaatttagatttcttccctgcttctttggtaaaactgtagtaaaaaacattgattggaaatacagtgttgggaattcccttgatcgaattggataaagcataaagcatttagcaaagtgcctggcattcctaatctattattaatatgtgggttccttttagagtgatggcttatttatagtgaagaagagcagtgggttgggaatcaggtctcagctctgactgtaactagctttgtgtccttaagtaagccacctaacctttctgggactctgtttctttgtctgctaaaggtaagattaagccttcaagagccctcaaactctcttggtctttgtttgccaatttaaaaaatgcagctaatgcgtctctctcatagggatcatgtgagcctaaaataaagagcttgtgtaaagtgtgtaaaagatgctcagtatatataaggttcttttcctgttcttttaaaagcagagaaatgcttaggacacccaggacgccaacatgagcatagaaggcagtctgatatactgaccaagagcagatagacttggatccattgctggtttcattatttatgggaccagtaactctaggcttctcacccaacctaaaatgaagatactaatcatatttacttctgagttattgagaagattaatttaaaaatgcttttaaagtgcttagcagagtatctgacacagagtaggcattcagtaaattttatttacatgtgtaacacttagggtgggagacatggatgaactactggaaaagggaaagatactgaggtgggctgccctaaaaaaggaaggtaagaggaagacctacacttatttcacacttttgttgcaggccctgctagttcacacattgtttgctttgtgattttttttttttgagacggagtgttgctctgttgcccaggctggagtgcagtggcgtggtcttggctcactgcaacctctgcctcctgcgttcaggtggttctcctgcctcagcctcccgccaccatgcccggctaatttttgtatttttagtagagacggggtttcaccatgttggccaggctggcctcgaactcctgacctcaggtgatccatccgcctcggcctcccaaagtgctggaattacaggcgtgagccaccatgcccagccatgatatttattttatacctaagatgagcttaattctgttatgactttcttgttcctagggtgagcttaattctgttatgactttcttgttcctagggtttaaatatcaaggatactcactaaaacactgatagaccttttgtgttttctctgattgcttcccttctgtgcctgcctggaggctataggtcctggacagttcccacattgatgttttttttttcaaaacagttttttcctgatggtacatttgttaatgtaaaatagctcaagtaaatgtatgtgcgtatgtatgaaagagacagagagagacagagagagctgtatgggatccatcagctgccgagggtaccctttcatctagcagagttcacattgcagagcattggatcagagggtggccagcagctggagggagagcaaacttgaatctactttatagacccactagtcacttccatttgccctttacttaggagaaaatacacagcaaaaactgttctttagacatggatgcatctagtttaataaatcttaatgtagtgctattaaaaatgaggtaaagtcaggaaattttctaccccctcccaagtgctcttattcctagatatgcaggaccaagcataaagttattttcacacattgggaagaaatgttccattccaatttcaagtggaggttttccacttttggaagtgctgctgagactgcaattataaactacaactattcttttaaaacagttcctgggatgaattaagatcttgcagtaaaaataccatatacaatctgtcacattatctgtggaactcttccctttgccagcttggtcagtgagggtaacagctgcccagagttcattgctaaacggatgtttaacaatggtactgtgaattcagcacttcatattagaataatgcttgagttcctggtattcggttaatggagttttacgtacagtgatacagaaaatatgtgatgcacaggatttcagctttttaagaattctcaccacttctcctcccatctcaattttgttgttgtggaaaatgaaaatcccacaggaaagccaagtgtagtcctcattccctgacttctggctttgtactccatcactttccacttccttcccctcccctctctacactgttcacctgggcctaaacgtctgaatgactgcagcctcaaggaaagcttcaagttagactagatgacctttaaggttttgttaatcctgagaatccgtttggccacatcaatgagctcctttgtatctactcaaatgtgatagaacagacgagcattcagagtaaggggatcttcctaggctggctgcagagagaacagtcagcagtgctcgtgccatggctacagattacacatctcactctgggggtgtgtggggactgggaaagggggagccagtttggcctgtggcacatgtaatttttatactttgaactactgaaatgggtctgagttctccagctcttcacagaccccatcacttcctgtttttgttttatgagcagactgttgagtttatttctgttgtctttgccagtctctcaaaacatttgtgtttgtgatctctgatttaaccagtctccagctgatggtcatttaggtagccttcagctttttaatattaataaatattgctttaataacatctttgcatggtacgcccttagaattaattcctgcagtagaattattgggtcaaactgttcacaaatttgaaattttgatacatattgttaaatttccctatcgtttttggtatgtgaattgttgctttatattatttactgaattttccatggaattcttattttctttattgattttaaagacttcttcagctatcaagtcaggttatgaaccttttaacatatgtggtaaagatattctgctagaatatcttttaaagctttgtatatggtatctaacttcagacatttaaatttttatatattttgatttattagctttttcttgtggtttctggaattttatgtcatctttgggaaagtttttcacattctaagattacaaaaatattaacccttactttgttttagaatgttttattattttttctttctcaatatttaatctatcatgtatttgtcttggtgttaagagtaaggtagcaatcgagctttatatttttctaacaaccaagggtttaaaaaatacataattaatttagaattaccaaatcttaatagcttatagtacctaaaagtggcttgtttttacagatagaaactttccacttcaaactctgagttttaatgtttttcggcttttaaaacctctagaaagaaactgtgaacagaacaccgtattggttttggcattaaccttaatgcatctcaaataggctgattctacagaatttgatccaaagtacttctatgtcttgatcctttttttgccaagcaaaattgattgtttctaaccaaaaggcctttagtgctagactgaaagaaaagtaaggtggtccttctgtgctggttgtattttatataatttggcatcaagtacaatgctttttatttttctctttagtttctttcttttctctagcctttgatggtccaggcctcttgttgctagggggctttttgggagacaaattcaaatccttactgtctagctcattgttattgtatcttttagtgagttccttttttcatggtagttcaataagtggttaccaggggtctttctttgacagttattactagcttctcttgtatagtgggatttagctgtgggttgatttgttgtgctggtatgttttcaactgcagcgatgcattgctctatcacatggattctttttatagcttcattagaggtgttttagttcctcttttgaatatttatctgagtatcttagtaccttggcagtcacactatcctaaattattatagtgccttctaaagtagattttgtcattgaggcttatgtttaggtcaggcttgcaggcagggagacagattatgccattgtggttgagaggcatatagtggttaaaaccactggagttattctgttagggctcatagcctatcttctccacctattatgccacctgtctaacccttgattgtcttatctgtcaaacatggtaaagtcatacctctttcatagggctgtcgtgagtatcaaatgagatgcaggttgcgtaatcccaaatccaaaaatccaaaatccaaaacacttctggtcccaggcatcttggataagggatactaaacctgtaatgcacgtaaagcacctttaggacaatggtccttactgctggcctgcaataagcacttaataaatgttattattttcttcttttttggtgttggtttgctcttctataatgttacaatgctattttgttaaccttctagttgtaaaaacacactcattatagaaagtttagagactgaagaaaagcttaaagaagaaaatgtctcttacaactcttccaccccccccagcaataataattacattttaacatttccttccagttttttaatacttagatattattttacacagctgagatcattctgcatgcataataaatcttgattttttttcacttaacatatcttaaacattttctcatatcattaaaaacacttgtgaaatcatttttaagggtcacatagtagcccatcacattacattcttttgattgatttaatcatcctctttttacttggcatttaacatttggggcttttttggttggagttgggttgttttcaggtcgttctaatatattaagccaggcttttttcttgtcaacaggaggtttggggattgagtctttgtgattgtttttattgttgcatttttttgcctgttgagtgtgtgaattaagctggggttttaaccatcagcacctgcgctctcagactcttgccaccacctttctggacaatctccatgctctgctttttaaactttttctgatgagtttcttttcttctgtgctagaagaaagatgaatggagactatgtttggtgtttaggtttctgacccggcagtgccatgtgaatgcccagtagctagccaaggtcaacagcactgcctgttaatggctttttactgaagtagtcctgccgagcagtttctggtgagaagactatcctaaattgttcttgacagggtacactatttttgtttcaacttcttatttttcctgtaaagcttggtttaaagtatgttgagactgaatttatttgtgctttggaatataatgagattttgtgctcttttctttcagaaaactagccaagaacagcagtctggaaaagacatatgtatccaaaattgccagggaaacctgctgtgtagatacgctttctgagaaaccacatggtaaatgaatgtcatctttgtctcagaaccacagtagcctggttctgctggtggatcgtgctagctgatttgagctgggtttttaactcagttattgaaatggctttgagagcaggacttaaatgcctgtggtttttgacctcaagaggttgcttaaaacagtatcagcctgtgtgagcctgagactgtttttcatttcctttgtttggttcggagactgcttgatccatggctgcttggcaggcttcttctttagcgttcattcttgtggccatttattctctgatattaaactacaggatgattttaatctcaactacatggtgagaaaaagagctgagtccagactggctcagaaatggagcctaagaactgcaataagtatcctagcaccttaggccctaggaaggactgttccatagttaacttctgtgtggcttcactgtaagcacaggtgacagatgggcatgtcttgaattcctagaagccattgtctctctcaatcatctgttccaacactgtatcagagaatgataaactttcagaattgaaaagggtcttaaaggacatattttccagctcttgctatatttccaacaagaggcatcatctcacatttgcttgactacctgcagtcatttctgagaagagggaattccacaagttggaagtagttcaaatcattgctcaaagctgtgtgtaaagatagtagtttttttttgttttttgttttttttttcagccaaaatttgtccccagggaacctctatccatgaaattttgattacttctcacaggaactttagcaaaagttagttgggattgtctggattttccgttttgcagatagagaaagccaccatctctttcccctaactacttagtactatggtaacttgggtttaggaaaatttgccagttcattgttaccaaggcaagtgactaaatcgtgggttctctgtatgctaatgctgccccgcatataggctttactgctgtccgtgcttcattctctctctgtttagctgagaaaatgagtgtgaaagcacttagccaatagtagtagatgttgggtgacatttcattaaaagtgcagactcctggccaggtgcggggctcacatctgtaatcctagcactttgagaggccaaagcgggaggatccctcgagcccaggagtttgagaccagcctgaccaatgtagctagaccttgtctctacaaaaaattaaaaaattagccaggcatggtggtgcccacctgtagtcctgctactcaagaggctgaggcaggaggatcacttgaacccggagtttgaggctgcagtaagctatgattgcaccactgcactctagcctgggcaacagtgggacaccctatcttttttttttttttttttcaaaaaaaaaaaaaaaggaaaaagtacagaccccagagtcagacagaacctgattcaattttgatttcaaccacttgcgggctgtgttaacctcaatggattatataattcttcaaacctcaaattccccatctgtagcactgggttaataattatagctgtaagatttaatgaagagcaaatgagattaatacatataaaatacttaatgtatggctgctaataatgaacagttaatgcttaaaaaattctggcttttattattgctattgttactattcctgtaatcactgtccaacaaggtccctgaatctgccctctcattaaggcaatacaggcagagcttaaccttctctcccacctgtccttgtgatttcttctctccataggactacccttggtattcattttcacctgatttaccaagaatagcaatataagcatcaaaagaaggggtggggatgggcatgtacacaatttctctggcccctggatatccctgcttctcttacatggggaggtttcaggagtgaccttgttactctgccgtgttgtcagaactggaggttgggcgttaacttattttttctcattttcctgcctttagggaaaacacgtatattcagaaatatcatggttgtctctattttcagagatggtttcatcctctgtggctctgtcatttgagtatgtgtttttaacaatctactcattccactttgtccttgtggtctagatttcttagtggtcagttttgtttggtttcactccagatgtaggtctctgccgcttcccaagacatcttaatttcatgcacatttaaaaatttattggcatcaagtttcagattttaaaatttgcagtatctgtatttatagcttgcttttcattcctgttatttgtttcttcttttttttccggggggtggggatcagtcttatcaaagtgtaattttttttttaagcccaaaccagcttttggttttgttgatccttgctactgcacattaacttttgaattcattaatttatgttcttacatcattttcttctttctgctttctatgggtttatttctcttttcttcacttggacagttcagcttactaatttttaattatctttcttttctttttctttctttctttcttttttttttgttttctttttccccgagacggagtcttgcactgttgcccaggctggagtgcagtggcatgatcttggctcactgcaatctttgcctcccaggttcaagcaattctcctgtctcagcctcccgagtagctgggactagaggtgcacaccaccatgcctggctaatttttgtatttttaggagagacggggtttcaccatgttggccaggctggtctggaactcctgacctcatgatctgcctgcctcggcctcttaaagtgttgggattaccagcgtgagcccccgcgccgggcccaattatctttcttttctaacatacatttaaggctgtaaaatttcctttaaatactatttcaactacctgccacaattttttgctatgtaatatttttgtaaagtcagatttgttgaggtttaatttatatgctatagaacatgctccttttaagtgtacagttggatgagttttaatagaaatatacagttgtataaataccaccataatcaagctatagaacatttctaatatcccatcaagttcccttatgccctgttttttgtccctaaagttttgtcttttctgggatgtcagatgaatggaattgtgcagtatatagccttttgtgtttggcctcattcacttagcatactgttctgagatttgttcatttgttgcatatgtctggagtttgttcctttttattgctgagtagtttccattgtatggatattaccagaatttatctgttcactactactttattttcagtgggagaaaatgagagtattttaattctgcatttggactgtaaatatcatccagactcttctggattggaaagtatcttggcatttttcaaatacaaatatttatttaggttttatcattttgaaagttcttccattagtgggcaaacatgagctcatgtgtattcacttgcacgcttcctcctgtagcagtctgggttcagagaggagatagaaaccacacagtagattaaagaggggaaatttaatataataagtattacctatgataaaagagtaactatcagatatgaagaaactctgtagcgttccctaaggctgagggcgtatatccaaggaaggacaaactgccagggcttcagacctcattggagaagatgtggttcagcccatggaatcacagaggagtttgctggtttgacaagactggagctgatccaaagtctctgggcaagccgtcgtttaccttctggagtgctggcagagagcaggccatccagtgggttactggccatccggtgggtagcagggtgtgggccctggctgggccaggaggcctttagaacacaagagccatgtggaggctttagtggccatgtcagctgagctcccaaaacgttaggataggctgagtctgcaaggtcacagaaagaccacgttctaggctgtcgctgggccacagtgtcgatggtcctcacacccacattgccatctcccatgctggacacttaggacagcctcttcctcccagtgctctactgagaaaacttcacagcacacgttcttcagagaaatgattatcacagaatgcatctagaagggtgcacttggatcttagaggtaacacactatccctattcttttaaaaagaagtgctatcaagtcaagagcagtaataactatatgcttgtgttattaacaatcagacccttcatgaggggaaaagagtttatgaaaattagaacttacgtagttttaagtaacaaagatatgtttatagacaaatagaactataccttcccatgggacctgtgttatatactaatcatgatattgtccctattctcccctctcccagtcattggaatcatagattccaagttgtaagtcagaccccagattggaagcactttctttgttcaagatgtttgctcattatagaaaacatttaggaagcacattttaaagaacggttttataccagagaagctaagtgtttttaactctgagcctagatgagcttactgctaggagtatagtgtttaaacctttcaaaatgaaaaactaggacacatggtctttacaaaatttttttctggtttaggaatttatacacatttgagaagtattaccatggcataaattaattcacatttgattataccaattaaacagttgccgaaaagaataaaagactatcctaaaatatttaggctatatacatactaatgcttttacagaataaggattaaacaaacctatcttttttagagtcttcaaccagaaaaatgaacaaatgataaaaacttatatttagcagtttgaaggtcacacacacacacacacacacacacacacacccctacccctatctagacctattttatgtttttgacactgtagagagttcaagtcctaagactttatggccattataaaaagattctgacatgctttgtggaattcttgtctgcttttgttgcagatttttttttttctttcaaaggattgcttgagagggtatttcttttttgggtatttaggttgtgaatctcacccttcattacatgggagtacccagcagtaaggcttacagagtgttatatactttccagaaactgagtgctatgtacttgcaatcttttccacgctaagaaatccccaattttaaaacttcaacctgcaaagtagcttacttagggaatttctatttgtattcttgacaagttttctgtaagcattcttttttcttttatgtgtttaaaattggatcctatttagtctgaagatgccttttaagactgcatctattaaataaagtgagatcaatttgcattttagctttcaaattttgctggggattctttgggctttttttatttggcaggaagagagagaagcagcttggcctttttgctatctcggaaatttccagcccaagaaagcatacagagacatagctcgcagggtttcttatgtgattagctagctcttttcctgaattattaagctgcattaaaacagtagctcggtgcagttggtgttttaggttttcataccttctgaaagattaatattcctacaagaataaggttatttttgatgcctccctttagtgctttcaaacatcaagagcctcgcattcttgtactctaccttctgtagacatttacaattattctaggaggtgtaatgggtgtttactaacttcctgaaagtgtttctctcacagattggcttccttaagtgtgaaatttatacaccaatttaaaactacagtgtcccccttgtcaatgggggaatatgttccaagaccccccactggacacctgaaaccgtagatagtactgaaccccattgccatcagtcagaacgtttctgttcatgtctttcacccacaaatttaatcccttttctatcttaaccaagcgcttatcacacaactgtggttgaaacttttgctccttgaggtatgacagcaaaactagcatgtatttctttttccttcttcacagtatcatgggtagaagattcattcttactgtaatcttagcagccttagtgtatgattttttgttgttagccaacaatgttcatcttttcacttaaaggaagcacatcatggtttctcttcggcatatgtgaattgccagcatcactactcttgcattttgggtctattattaagtgaaataagggttccctgaacacaaatactgtgataccaattctgcaacagtccatttgataaccagggtgactactgagtgactgaggggtgggtagtgtgtatagcatggttatgctggacaaagggatgattcacatcccaagcgggatagagcaggacagcgcaggatttcatcatgcgtctcagaatggcacacagttaaaacttaggaattgattatttctggaagtttccatttaatattttcagactttggttgactgtgggtaactgaaactacagataagggggaatataatatactcttaaaatagaatttttcttaaagagcaatcataagcaaccaggactagagaatttttttcatttttttccttgtaattttattgcaagtaggatactgaattagttgcttattttgattttggtatgcatggatcaattttgagtaattgatacaactttatttaatgaacttaaattatcctcttaggcttatgtattgattacatactttcaaagctgaaatgcttgagagaacccagtaaaaagtcagtatcattttcaaacaaaggcttaaagattaaggatctatttctttattaaatatttattaagaattattttttgctggcctgctctctgaaaatatattagatatagtctttaatctcaaataggtcctactttagtaaaagaaaaagatacaggattgagagaggagttggagcttgtgctgagctggaaggttgaatgggcagccccctaagcagaagacagaattagatccagcagaagcttggaggtgtaaaaaagcatggcacctgaaggaattgggagttgttgttagtatttctgactaatgagctcataagtcttttcgtttatttaacctaatttgattagttctctgtatctcaaatgtgttacttgatataaccaaacttgcatttcatttttaaaagttaaaattcagacctttccctgatttagaatgaccccctcttctctgcactataaatgtgtgacgagataaagttttttttcccatagactctgaccacagggattcttccatctgtcaattcctatagcacatgttgccttgacacacagttggccaggctttacagtcagacacgctaaggttcctatcctaattcaaccacttacaacctctgggaccagaggcaaatgcctatatctctctaagcctccagtgtctgcgtctgtaagatgaggggtaagagcacttatttcttggactgttgtgaggattactcgagataatgcatgtaaggtgctgagcacaatgtccagcacatagaactcaattaaaagtatctctaattaatgttagtgatcattagccctcactaataccctagactgtagcttgttttcatgacttccctacctcttttctctccacaactagcgtgaagggagcatgccatatactttttttgtcccatacccactcttactcacccatactcctcgatccttacatgggttctgacacagagtgggtactggctacatttttaaaaagatgtaatgctagatatcagcaagtaaaccttgggggataggaaagtttctgatgggttcttgctgtggagaatcaaggtcaaaatgatagggaaaaaaatctgtgtttggtcaaaactgtattacctttggtcaaaggctgttctaaaactcacagaacaaaaacaaaacaaaacaaaacaggtgctttgtgaattccatagcaagtcgtaaaagctcatgccagaatagagttggaataaattctaagcatgcaaaatactactttaagaattttgtcctgtaaatttgagaatgttttttaattacggtagctcccaaaccttaactatggttttgctttccatggcttcagttacccacaaccaccgaatattaaatagaaaattccagaaataaacaattcatgaattttaaattatgcgtcatcctgagtagtatgaggaaaccttgtgccatcctgctccatcctgcctgggacatgaatcattgctctgttcagcatatccactcggttgcacccattagtcacttagtaggcatcttggttatcataaagactgttgtggtattggtattacagtgcttgtgtttaacccttttgttttattttagtatggaaatttttttttttttttttacttttaggttcaggggtacatgtgcagttttttacataggtaaactgcatgtctctgaggtttgatgtagattatttcatcaccaagtaattagcatagtacccaataggtgatttattgatcttttcccttctcccactctccaccctccagtaatcctcagtgtctattgttcacctgtatgtactcatgtttttgttgtttagataagtgagaacatgcagtatttgtttttcttttcttttcttcttcttcttctttttttttttttttttttttgagatggagtcttgctctgtctgtcgcccacgctggagtgcagtggggcgatctcagctcactgcaacccccgtctcttgagttcaagcaattctcctgcttcagcctcctaagtagctgggattacaggcatgtgccaccacacccagctaatttttgtatttttagtagaaacagggtttcatcatgttggccaccctggtctgaaattcctgacctcaaatgatcctcccaccttggcttcccaaagtgctgggattacaggtgtgagccaccgtgcctggcctcagtatttgtttttctgttcctgtgttagtttgcttaagataatggcctccaactccatccatgttgctgcagaggacatgatcttgttcttttttatggctacacagcattccatggtgtatatggaccatattttctttatccagtctaccgttgatgagcatttaggttaatgccatgtctttgctattgtgaatagtgctgtgatgaacattattgtgcatgtgtcttcatgatttatattcctttaggcatatacccagcaatgggattgctgggccaaatggtaatgctgttttaagttctttgaggaatcaccacgctgctttctgcaatagctgaactaatttacattcccaccagcagtgtgtaagcattctcttttctccacaacctcgccagcatctgttattttttgactttttagtaatagcaaaaaattctgactgatgtgagacgataatcttactgtggggtttttttttgttttgttttgagacggagtctcgctttgtcgcccaggctggagtgcccagctttgtcgcccaggctggagtgcgatcttggctcactgcaagctccgcctcccgggttcacgccattccccggcctcagcctcccaagtagctgggactacaggcgcccaccaccacgcccggctattttttttttttttttttttgtatttttagtagagacagggtttcaccatgttagccagaacggtctcaatctcctgacctcgtgatccgcccgcctcggcctcccaaagtgctgggattacaggtgtgagccaccgcacccggccttttttttttttttttttttttttttttttggacacagggtcttgcctgtgtcactcaggctggagtgcggtggtgtgatcatggctcactgcagcctcgacctcctgggctcagttgatccacccatctcagcctcctgagtagctgggactacagggatgtgccactacacctggctaattgtttttgtatttttttgtagagatggggtttcaccatgtttcccaggctggtctcaaactactaggctcaagtgatccgcccacctcagcctcccaaagtgtgattacaggtgtgagccactgcacctggcctcattgtggttttcatttgcatttctctaatgattaatgatgttgagcactttgaatatgcttgttggccacatgtacattttcttttgaaaagtgtctgttcatgtcctctgcccactttttaacaggaaggtttgttttttgcttataaattcgtttaagttccttgtggattctggatattagatctttgttggatgcatagtttgcaaatatttcctcccattctgtaagttgtctgtttactcccttgatagtttacctcttgctgtgcagaagctctttagtttaatttggtttcatttgttgatttttgtttttgttgcagttgcttttggtgtcttcgtcatgaaatctttgccaggtcctatgtccagagtggtatttcctaggttatcttccatggtttttatagttttagattttacttttaagtctttaatttatctcaacttgatttttgtgtatgatataaggaaggggggggtccagtgtttttatttatttatttatttatttttgagacggagtctcgctctgtcacccaggctggagtgcagtggtgtgatctcggctcactgcaagctccacctcccgggttcacgccattcttctgcctcagcctcccgagtagctgggaatacaggcgcccgccactatgcccggctaattttttgtatgttttagtagagacggggtttcactgtgttagccaggatggtctcgatctcttgacctcgtgatctgcccacctcagcctcccaaagtgctgggattacaggcgtgagccactgcgcccggccaagggggggggtccagttttaatcttctgcatatggctagccaattatcccaggaccatttattgaatagggattcctttccccattgcttgtttttgtcagctttgtcgacgatcacttggttgtaggtatacagccttatttctaggctttctgttctgtcccactgatctgtatgtctgtttttgtaccagtgccatgctggtttggttactgtagccttgtagcctagtttgaatttggttaaaccaacttcaaacctgcagctttgttttttttttgcttagcattgccttggtgttttgggcttttaaaaaattctgtatgaatttttaaactgtttttttctaattctgtgaagaatgtcattagtaatttgataggaatagcattgaatctgtaaattgctttgggcagtatagccatgttaacaatgattcttcccatctatgaacatggaatgttttttcatttgttggtgtcatctttgatttctttgagcactgttttataattctttaagtagagatctttcacttccctggttagctgtattctattcacatatcttttatttccctggtattttatttttttgtggctattgtgaatgggactgagttattgatttggttctcagtttggacattggtatataacaatgctacttattatatttttgtacattgattttatatactgaaactttgctgaagtggtttatcagatcaaggagcttttgggcaaagtctatagggttttctatgtatagaattatattgtctgcaaacagatagtttgacttcccttcttcctgtttggatgtcttgtatttctttctcttgtctcattgctctgggaggacttccagtactgttgaataggagtggtgagaaagggcatccttgacttgttctggttttcagagggaatgcttccaacttttgcccatttagtatgatgtttgctgtgggtttttagtaaatgggtattactattttgaagtagtttcttcagttactagtttgttgaggttttttttttttaacatgaagggatgttgaattgcatcaaaagccttttctgcatctgaagtaatcatgtggtttttgtttttagttctgtttatatgatgaatcacatttattgatttgtgtatgttgaaccaatcttgcatctcagggataaagactacttgatagtggtggattaacctttttatgtgccgctggattcgatttgctagtattttgttgaggattttcacatccatgttcctcgagaaaaatggcctgaagtttttttgtttttgtttttgttttttggtggttgttgttgttgtatctctgtcaggttttggtgtctggatgatagacatagatggacacctcatagaataggttagggaggagtccctcctcctcaattttctggaatagtttcagtaggattggtaccaactcttccttatacatctgatagaattcagctgtgaatccatctggtcctggtcctggttctacattttgtagcttgtgagtatagaggtgttcataataggttctgggaattttttgtatttctgtgaggtcagtggtaatgtcctctttgtcatttctgattttgtttatttggctcttctctctttttttattagtctagctagtggtccatctatcttattatttatttatttattttttttcagaaaaccaattcctggattcattggtcttttgcatgttttttcacatctcagtttccttcagttcagctttgattttggttatttatttttgttagctttggggttggtttgcttttctttctctagttcctctagtttatatgagtaacccttattttacttaataatggccccaaagcataagagttgtgatgctggcaatttggatttgccaaagagaagctgtaaaatgcttccttgtttatctcttactgtgcctaatttaaaaattaaactttatcataggtatatatgtataggaaaaaattgtgtatgtgtatatatatacacacattatatacatatgtatatacacattatatatctacacacacacacacacacacacacacacacacagatatctagctagatagtaccaaaatatatacatctgtggttttggacatccactggaatgtatcccttgtggataggggggactactgtaatcacaaaaaactaacagtatgcaagtacttcatattttataaaatgttatttaaagaagaaaacttgttttttgtgtttgccatttattaaatcatattctttatacatacacgtgtgtacacgcacgatgtactgagtctcctctctaggctctgtggacaaagtctttgggttatttgaacgcagtcttctaagagatccgtgtcagaggtcttgtcattacatcaccatgcctgcttgaagccagatttctttgattcacccaggcttatgatctgcatttcattccagtcttcttggtaaatattttttatatatgtggtcaagttctctttgtttggaattttgataatgagaactgcaagtgttgattaattataaacctaaaatgggattgaggcaattgttaactcgtcgtggttttgctgctttccctccttattggagaagaattaggaagactttataggggactgatggaaaaataatttggcatgaccataatttgagtcagagaaagtctcttattaaaattcccacaaggcttatttaaggagcaagatcttttgaaactaatggtgtggtacttacttaatccacacaagttatgatttgattgtcatcttctttgatttttctgcttggctttctgtcatctgatgagagattactgcattacctgagaatctcatcttattagagtcacctctacctaaactagaatccattcctaaatagtaacatactcgcatcaagaaagagtaagtatcctcggtactaaattagtgctctagatgcctttgtacattttttttgttgcacttttccggactttctagtggccagtgttgaggtatgggatggtatgatggtggcttcattcaactttttagcttctatcgagcttccctgtcatcttgctaaattccaaaggtgtgttctttcctcattcttggtcacaacaaaacatcacctgagacgggatcagtctgactcgcccaaccagaagggatgatgtgtttgagaaatcctgtttgtgacactggaggaagaattgtgactgttcatatatgatacatatggaattgaaacttgtccttaaaagctctggcaggtctctctttgatggtttttagggacaatagacttttgaggtgagagtttgtagtggcagaggagcagaactttgaaataggcctaaaccctgtactttggatatgggccagacccatttgtgttccctatggggctggttgacaagggaagaggaagctctactatacattctcatgtgtttagtgtagcttaactctgctgattcaagatgggctaattgtcagtgtaattcctttgagttatctctgtgatgaagtatcagctggagcttgccagtggcactctgggccaattatgcagccgactttgaaaaatggtatgattcagaatgtcagagttgctaaggtgatttatgaagaaatcagttcccatcagccttcattattcatagtgatgctgggaatcaggactttgcagtgacctggcccagaggaaataaaccaggtgggtatgatttagggtttctcacatagagttcaatagaggtgcctctgtgtatgtggtatgtgtcctgtaccgtgttgtgagctcatcttagagcaacagcagctattatttacattacatacttcctccatttcccaaaaaaggatataaggtggtagccttcacttacccactttctttctggtggatgcatgacattatgttatataccttaccaatacctccaaacctcacaaccgctgttgtagaacgaataatgtcctccattgaaaaatgagaaaattgaggcacatattagatgatttatgcaaaggcatccaactaccaagggcagaactcgtatagaacccggtccatctgacttaacaccagtgctcttgcccctaacctgagctgcttctctgacaggtgtattgccctttatattcatgttgcccagcagtgttcctggcctagcgtagctgccaataaaattgattgatttgatttgaatcatattcagcaccctggagtcactgcacgtcagcagcagcaccatgtgtgtagtaggcacttggtgcctactacaaaaggcacaaaagcagcaaagtagatagcatacccattttacagatgagaaaacggaatctcagagaggacaagtaacttgcctaaagtcacccgttaccactagtggcatttctgaatgtgagggccatctgatgtatctaatatcagctaaattcataattcttccagtcttccacatttttcacaaacacactcccatttccagaaacccttcatgtttcttccagttgcttgttgtctcttctaattccttgttgtatcacttaaattattttcccactcttatcctcagtgacctcatctctaaaaggaggataatgatgatacctaccttacagatggattaaataaaatagtgcagacaaaatgttgagttcagcatttaacagatgcaaatggtgaagtaattaacatacttcttccatatctatgtgtagaatccaacagtaacacagcatttgtatcctgctaacagagtgaggctgaactttaaactaaaaatatgtctactttaagatacaacacatttccagagatcacatcttttaagagaaatctcatctgcacaaatgttgttgcttttacttattcagacatcctttggcagacatcagacctcatcagactgggtaaaggcgatggtgagggaattctaggtgttagacaatagtgagtgagttcccataagacattagtactgtcaggctcggagcccgtcctcttcctttacccaagactgatgtgttgcttagccttatgatggcaaggaaattctaaataaccatgattaagaggcttattttagtttctccttccactgtgatctctcccagaaagagactcagaaatccttatacttggtctgatctcttcagcaaaacccaccttcagtagcaagcctgtggctctagggttggcccttattttgtcttgtccagcaggatggtgtctcttattcttttgatgatctcattctttccaaagtgtatttcttataacagaagttcttttttgtttgaataaacagtttaaatggacatgcctttagagataacttagccaggactggagccctgcttcttatcagacattacaaaacacagacattctcattaagtgaacagagatttcctttgatttcaaaagaatgttaaggggaattacttttaagtttaaaagctccttgagggcagaacgcacttcttattctacactgactcttcttagcacccatccagaaccttgttgcatatgatgatgccccatgtaagcttgcttcattggtttcagtggcttttgttcttagttgactagaaatgaaggataatttattcatttcttcaaccagtattacgtttagcatagtaaacaagacaaggtcaatcccttacagaacttatatcctagtaagagagacaagtaaaagaaaataaataaaaataattacaaggtacataattgttttgaagaaaacaagagtctgagatagaggataatggagaggaggcagtctttctagataagatggtcagaaaaggcttgcctgcatcctctgaggagttgacatctaaactaaaacctgtaggttaaggaagaacagggcatgaaccatgcaggcagaagattcattaactctgtaggccactgaggctggaaaaagtatggcctgtttgaggatctgaaataaagtgtagctgtagggtcctgagcaaaagagggagtaatagattatgaagttggaggggaggcaggggccagccatatgaggcccatgtagccactcatgagttggattttattctcagtgcaataggaaagaaacctaagggtgaggtgattggattcatttctgtgtttttaattatgtttgttgctgtgagatgatggcagcctggaccaaggtagatggagatggaaaaaagtggttgggtttgagttataccaatatttcagggacaaaattgataggactgctaaaggattggatgttggcaggaggcgggggtgagggaaaaggaaggatcagggatgattttgagcaaatggaagaatgatgataccattcctgagatggggaagactggggagtaaggagacaagatttggggatgaggaagggatgtgactcaagagttttgctttggatgtgttaagctgcagattctattagcgtggtggctcacacctgtaatcccagcactttgggaggccaaggtgggcagatcacctgaggtcaggagtttgagaccagcctggccaacatggcgaaaccctgtctctactaaaaatacaaaaatctagccgagcgcaggtggcaggcgcctgtaatcccagctacttgggaggctgaggcaggagaatcgcttgaacccaggaggcagaggttgcagtgagctgagatcttgctgctgcacttgcctgggggacagagccagactccgtctcaaaaaaaaaaaaaaaaaaatcagatctcatcaggcttactatcattagaatagcatgggaaagacctgaccatgctatttaattaccaagatttaattactttccactggatccgtcccataacatgttggaattgtgggagctaccattcaagatgagatttgggtggggacacagccaaaccatatcacagatttttcacgagataatcagggactgaaatatccagtgggagctgatctggatgtgcgagtatggagtatgggtatcacagaatagagaggatattcacatcctatgggatagatgaggtactgaatgggtgatatttcccatacctcgtgaaaacagctcaagctacttacatggctggattgagaatttgctgcttcaagattctggctgtagcaaaactgtagaatcacagttattttactgcaagatattcatttgaaatgtatttatgccaccaaggaccaggaaggtgaaatgctacacttggcgccatgaaactattgtctgagcttgtttttcggaaaaatccatatctggatgatatgactgagtcatcagcagtgcctggctggctgtgttgtaataggtcagatgtaacttaagccccaaagttcttaggacagccataaattagtctgaaggtggctgagataaggcaagggtgcttgttgcctccagattagaatcaagggcaacaaaactgcctagaaattggaaacccaggagaagctttaggctagagacaggcagcaatactttgtgagaattttactaacagaaaaataaggaagatacagaatcatgtttatcaaacttgaggatttataagaaatacctgtatagcttctttattttagtttatttttattattatttatttatttttgagacaaggtcttgctctgttgcccaggctggagtgcagtggctcagtcacagctcactgcagccttggagtgggctcaagcgatcctcccatctcagcatcctaagtatctgggactataggtgtgcaccaccacacctggctaattttttttcccccgtagagatgggatttcactatttgcccaggctggtctggagttcctgggctcaagcaatcctcccaccttggtctcccagagtgctgggattcaggcatgagctaccatgcccagcgtgaataccttcttcaaaatgcaaaatcctgtacctcacctcccagggagtcttattaagtagctttggactggggctcaggaatctgtgtttttagcaagtgattctgatacaggtgatccataggtcatacactgagaaacattgagtctggaaagacttctgagatcatctagtcagccctctcttacaaatggggaaattaaggtctgaggaggagaacgggcttgcccaaagttgcagaataagttgcaaagtcagtgcagctccactaacttatatgtcttcattttgcaatttattcttcatcctagtggctagatgaaaagcaagtctaccctcctaattcccagctccccttctttcacactattttttattttcttttttccagagcaccttctaatataaaaataatttactaatttactgtgtttattgctattttccttgcttcattaaaatgtaagcttcacaagggcactgctttttgtttgtttgtttgttttcattaaagtagcctatgtgcctcgaatagcacctgacccatagtaggtgttcaatgagtatttataaatggatgggtgaaaaatattttgttaaactgtacataagttaacaggtattatgtaccagcccttaggcattagcatgaaatagagtagaatattttctttttcacatgtttgattctagcttgaattagaggttacagaaacagcttatttatggaagattaattagagacttaccaatcatatgtacaataataataagaataacaatagcaacaataacaacagtgataacatccatttgtggaatatttactatctgcccaacacatactatatgaagttctgagctaagaccatcagaccattatctcatgtaagtcttagtaccgccccagggtggaggaacaaaatagtattgtctgttttccaaaggaggaaaccgaggctcaagaggtgaaattactgtttaaggttacatagccagtacagatttaggacctgtgatcccaaagattacattcttaactaccagttacattcagtagtaggcttggggaattctctctttgcagaaggaattgaaaatgccaaagactaggcaagcattgctattaggggtgtccttgggccaagaacaccaacctctaaggtagtataaaaccacaggctggaaagatgcattttttttttcagcccgactttccagcatttacccacactctcaagtcttccattctcacattacaaagaacctttcgtcttgaactattagggttttctcacttctcagacaccctccctgaagcaggccaaggaaaattcctgtggtgacaggccatttctagggaggccactgtagcacttcacacttgctctcaccccacccactcaaggaagggtagacagacagagggccctttacccagctcctatactactttcctgtggagacctcaggaaagggccgaggatcatgattttctaaatgtgggcacaacagacctcttgtaagactttgagttcttgaaacactgtacctattaaactggttgtgagcacacagaataaagtatcaccacccactgtggataatgtcagcattcattcccacccctgacagccaatattggccaggcttggaatcactgaacacacatggcagcagagtcccttgccccatagctgcagacacaggttgaacactggtgtatccctgggcttttatgaagagagaggcttataacacccattgccatctttacacacacagtgcagcaggtactgtgctgagaactttacagccgtgatcttatttaattcttacaatacatgtgatgagacactgctgtctgacttctgtagatggggaaggcctggagagattggtaacttgacagagtctcatggcatctgcaacaggcagaaccacattttaaacaaaggttgagttacttctaaaacctgtgctttgctagtcttctgttctgcaacactggttaagagcatagactctagagccatgctgcctgggtttgagtcttgattctgccacttactagttgggagacattgggcaggttacttagctaccctcctccttgggctgttcatctgtaacatagggataataatgtccttgtagcatgggttgctctgaggattaaaggaatccatatatgtaaagcactcagtgtctggtgcatagaaaacactaaatgccagccattattattaatttatatatcaactcattgtttttctttggatgatagaaacttaatctcagaagtttgaggtttttctaactacccacccttaccccaacccctgccaagggttgcgtctgtattcccaaggggcttagactgttacctggtatatagtagcctcaagtaaatgctggtgatgataatagggcagtgccaagacattgggggtgtgggaaggcagggttaggggatggcatctgcgcctcatcagcatcgatcctccatggtgtcgtatcctgaaagtgggaaaggcgctgtccagatagacgcttatctcgtagacagaacaagaacggggaggcaaccattatttcacatacagcaagttactgttattttaatgccctaacaatgaatctatatttaattaacttaaaagataggggaggtgagagtattattcactaagttcttggtcaaggcacattaaatcaaagcggttagcacttagatctcttccagggataaattatctcagacaagcttcaaggtatgccatgctttggaatgaattgtcactttccaaccaccaccactcaacctgtgatctgaccacagtgtcttcctcctgtctcccttccctctgggtgcctgggaaggctgggcttctgcactgttctgccactgacttaagctttgtcgtgactataccttccacttctcttctagcttaagagttggacagtggaggaccttcagaagaggctcttggccctggaccccatgatggagcaggagattgaagagatccggcagaagtaccagtccaagcggcagcccatcctggatgccatagaggctaagaagagacggcaacaaaacttctgagcaaggccaggctgtgagggccccagctccacccaggctttgggtgaattctggatggcttgcctcatgtttgttagccagcacttctgctctgtcgtctctccacagcacctttgtgaactcaggaatgtgcgccagtgggaagggctctcttgacagtcagcgtgccatcttgatgtgtgtatgtacattggtcaggtatattatctcaaaggatttatattggcgcttttaactcagagttttaaaccccaggaacagagactcctagttgagtgatagctgggaaagttttacattgtctgtttttcttctcccaatagctttcaattgttctttctggaagacttttaaaaaaatataaatatgcatatatatatataaattataaatagattccccacgcagtgtggtggcatctctgtacaggtacagttttaaacggtttgcctcttttctgtaagattatggtactgtggaacatgagggcagaggacaccgggaggctgttagggggtcactgaatcccaggagccaacctccccctttgcagggctgcatttaaaaattaggtttgggacagttcttgtaccgtggtttcagccttgtgtggtcatcactggcttctggagctattggtgatgtccaagggaaagctttgagagtttatgtttactctttgagtcccaggagaagcctggcaccctctttgcaaattggcctttgctctttcaatgcctttcatccatctccactctctcaactgcctaaagtcacagcacagatactgcccagtgccttaagaggagacatgatctctaccagggactctcagcaaacacgggactgtgttcagtccacaaaggaaaagcgtttttgaagctctcattgttcatgtaaaaatcatacacgtggcatgttgctccacattccttacacacaggggtagaggggattgcttttgtgacccacgttcaaatatgtgactgttttcttttctcttttactgctaagcagcctggaaaggataaatgaatattagactaagatttgttttccaggaggctcaatctgaacacacagaatgtcagagctggaagggactatagagatcatctgatctgatcctcttgtacggatgatcgcaaaactgaggtgtagagaggggaatggccaaaatcacaaagcaagttagcgttaagagctgagactagaattcagggtcctcactcccaggccaccgaaccatgcagccccttctttgggggaagagacctgtgtcagtcttggttaattgttccagggaaccttgctaacagaaacttgctcttgccttggctcttcagtagatgacctggctgtaaagagattccctggacgagccagatcattcagtttcagcgagtccttgagctccacaacatctaccagatatagcagacaagcacccatggaggcaggtttcgggcctgaagcagatcagagggctttgcaaaagacagcatagagccatcttcctgcaactttacctctttccctcagatggggagccatgactgggttgcacctcaggatactgtaatttgactccataattgcttttgctcctgaaacctgggaatcaatggaaaggcagggaatgtgcctcttctgtggccagattctgttatttgcaattaaagcaagtttttaaaaaatgcaagaggcagttgttagtcttcagggcttggcaactgaaatagctatgtggcggatacggaaaacagaggacaatttgaggatcttgctggaataataaatgacagctaccatttgttgagcacctattatatatcaggcactgagctgggtaggctctaaacttcacaataaccctgtgacttaactactttatctccattttgtagttgaagaaataagttcagagagaaagattccttcccaaggtcatgcagctagtaaatgatagaatcaggattcatagcatcactatagggggtcaatatttacacaaaaaaggaaagtcacaagcctgtttaaaatgaagtgaccaccttttcttgcatagactaaataactcgaactggcatttttaggttggaaagacagctgaattagtagttaagtctgatagccaagtaagttttaaaaaccaaagcatccaggatgcacacccctgcaccatttgctgtgcgaattaatagttctgtctctctctctctttcttttttctttttattctttgagatggattttcgctcttgtcgcccaggctggagtacaatggcacgatcttggctcactgcaacctccgcctcccgggttcaagcgattcttctgctgggattacagcatatgccaccatgcccagattatttttttgtatttgtagtagagacggggtttcaccatgtcagtcaggctggtcttgaactcctgacctcaggtgatccacccgcctcagcctcccacactgctgggattacaggcatgagccaccgctcctggcctctctttcttttttaaacaaagaactttgcacttggccagagaggaggagaaagcccattttctcccttcctaagctagatccaaataaaagaaagttcagttttcccccataactattcttgggtcatgaactttgatctggagtttgttttgtttcaggaatgtgtgcacccagcttgctgatccaacaaagtctattgcttaccagtctagcttgatgaagccttttggccagaagtcaatttgttttggatcagagaaatttcctgacaaggtatatttgttttctagtgacagaaaggcaaaggaacaagtcctagttgttgttgttgttgttgaatactaaatttaagatatgtcagcttgctttcaatgagccttgggcttctgttattgcttgagcatttggaactcgagcttccagagaaatttgaggtcctcgcttgttctctgccttcaagaaacaatgacctgattctgtctttaaaaaaaaaaatctcagaattctttttttgtttgtgtttttttttttttttgagacagagtctcactctgttgcccaggctggagtgcagtggcgccatctcggctcactgcaacctccgcctcccaggttcaagcaattctcctgcctcagcctcccaggtagctgccactacaggtgctgcaccaccacgcccggctaatttttgtatttttagtagagacagggtttcaccatattagccaggtgggtcttgaactcctgaccttgtgatccacccgcctcggcctcccaaagtgctgggattacaggcgtgagccaccttgcctggccaaaaatctcagaattctttaagactgttttaattgctccatcagtaattttgaagcactttcctttttttttttttttcccctttttgtccctttccccaagccaccaattggatggatgaatgtttgacggggaagaggaagggtaggaggatgcatggatgagtggatgagtggatcgatggatgtattgataaatagatagaaccagtcatctgaagcaacttaagaattgtagccttgactccttgagactgtagatttcgatccaggaaacatttatttagcacctgccagatgccagaaatttataccatttaaaactcagtaagtcttttaaatatcaggaaggagagaagcgacatcatgatacatcctatgggtattaaaaagccaatagaatattatgaataattttatgctaataaatttaacaacttcaacatcataaacaaattccttgaaaaataaaaagtaccaaaattcattcaagaagaaatagataccagcctgagcaacatggcaaaatcccatctctacaaaacatcaaaaaaaaaaaaaattagtcgggcatggtggtgcacacctgtaatcccagcttgtcaggaggctgaagtgggaggatcacctgagcccagggaggtcaaggatgcagtgagccatggtctcaccactgcactctagcctgggtgacagaatgagaccccgtctcaaaaaaaaagaagaagtagataatctgaatagccctatatctatagaaacttaatagtgctgggagatataggtattattatcctcattttacagatgtgaaaattgaggctcagagaagtaaagtctattgctcaaggtcatgtggctagaatatggcagagccatgattcagatccaggtcttctgattcttattccagtgtcctttctagcataccatgttgcctctaaagattgcagctccttatttactagaaaattgttcctgcccaatctacatctccacctcaccccatcttttcttaagcactatgtttgtgtttttatcagtattatattcattgtctttggaatacatgttcttgtttgtgtttggaaaaaaaatctcttttaccagcttgcactcggaccaacttggaaaaaaaaaagcttaaatgtttttgctatgtacagtttaaaaatgtgaagtttgtagctttaactttttgtaagaaaatctaataacactggcttaagtgctgacttgaaatgctattttgtaaggtttggatgtaagtaatcaattgaggtcagcagtttgtatgagacatagcttcctccattgcccccactccttttttcttttttaagtttgagatgcttcctgtgtttttatgttagaattgttgttctccttcttttcttcttcctatacctcatcacgtttgttttaaataaactgtcctttggaccacaaacccttattaacgagaacctcaatatatagcctggataatggtgttgtgaacaatctttgtgacattgactcagtggtgtgtttattctaagatccaaagctggggagaggttggtaaacttttgttgggcttctattatgtgccagggtactgagctagttatcaggaatataataaagatgaaccagatacagtttttgcagggcatttggggagttagccaagcacaaaaacacacaacattgaacataccatggtagaagaaggtacagggcctgtggatacacagaagagggagtgacggttctgctgggatgtccaaggaaactcttctagaggagacaatataccttgaaactttaaaaatgaagaagagatggctagattaataaagagtaggaagtgagggagagaagacatcctggacagaagagcccgcctgtataaagcctctagtgtgagatgatcaccttggaatccttcatcctcatctgctgctgcacgaagccaggccagacgtggcccagcattcagaggtggaacagcaggttcctgccctggtgtggcccattcttatccaggaatagttctccagcctgaccctaggtttttttttcagccttaaaagttgaccccacggcagagagggaatagagttacattgaaaagtaagtgtagttctcttgagtgaaattgctctacagtatttaatagaatagttccacagtctgtgtatataactgtcatgttattctgtgggcctttcttggagtggggtgataagtgcgtttattgttccctaacttactcacctcactccttgaaatatttagtgtaccttccttcctgtagccagggttgatgacagatgttccttattgatcacactgagaacctatggccagatgaaggaaagaaggaaggatgaagtaagtttatatttattaagcacttattatctgccaggcacaatgcagagccgtttagatgacttcatttgtcttctcacacacactcttaggtaaatgatagtgtaccctttctatagacatatggacttttacagtgtgcagtactgcccaccagggggtgttttggaaatgtatgagagtgtttttgtggtgatagtgattgaggagccttaccagcatttaatgggcaggggcaggtttgctagatgctctgcagtgcattctgggacagtcctgcataacaaacatctgtccggtgtccaacacaacattcagatgttccactggttattaattttggtgaaaattttgtttataaacgtgatactaaaccaaagttcatttacatgtaaacacaaagtactttttatatggttttactgttttgttttttttaagaatgaactatgaagaatggagagacacttgtagtttgttttgtttggacctttactaagagttgttctccatttcagaaaaccacatcatcagtgacagcgatgcttgtgatttttgagtcactcactcaagattggtttagatctgtagctgttgttttcacagaaagtctatgtaacatgtaaacacatggtaatttcagagaatgatgaagtacagcaaaaagaaaagaacagggtaatgggattgagagtaacgtgtgcatgtgtgtgcatgcacatctgtgtatgtgtagggagagatggctttatatagaatgataaacgatgcttctggagaaacgatgtttataatgagaactgcatgacaagaaggaaccagccaggctgaggggacagcaagaacaaagaccctgagataaaaacaaaagtttggcttgttggaagaatggaaggattcttccatggctggaacagtgtgtacaaggtgggtgaaggcaagaatgttcagggccttgtggtccatgggaaggggtttgggtgttattcctgatgagatggagagccgtcaaagggttttaagcaaggaactggcatgatagatttatgcattttgaaactatgccttcatgaaatagtgctcaactttagtcatcaggaaaatacagtcagccctccgtatccatgggttctacatcaaccaaccatggatcaaaaatattagaaaaaaaaaatggcccagcacagtggctcacgcctgtaatctcactttgggaggccaagaactcatttgaggtcaggagttcaaggccagcttggccaacatggtgagaccctgtctctactaaaaatacaaaaattagctgggcatggtggcaggcctgtaatcccagctactcgggaggccgaggcaggagaatcgcttggacccaagaagcagcagttgcagtgagccgagattgtgccactgcactccagcctgggtgacagagcgagactccatctcagaaaagaaaaaaaaattgtgtctgtctttcttccttaaacaatacagtataacagtaatttgcatagcatttacattaggcattttgtgtagcattgtattaggtataagtaatctagaaatgatttaaattatacaggaggatgtgcataggttatatgcaaatactaggacatttcatatcaaggacttgagcatctgcatgcagattttggtatccatcagagttcctggaaccaattcaccacagataccaagggacaactgcacagattaaaaccttaatgcattactaccgtgtacccaccataataactaaaatggaagaaatagaaatgctaggtattggtgacgatatggagcaactggaactcgagtactggtgaatatacccatgacctagcattccttccctaggtattttctcaacagaagtgtgtatgcctttttaccacaagacatatactagaacattcataatggcattatttataattttgccaaactggaaaccatctggatgcccagtggcagcataaataaattacgtagattcgcatagtggaatactatacaacgagaatgagctacctatagctactgtggaaataagcaaaagggtattgtgagcttgctacagcaaagaagtcagccactgttacttgcattttggcagagactcaaaggcaggcaaaggaatgggaaagtagaaaaaaaaggaaggcttcagggatgccctgttggaagctgttggcatgggaaagctgtaggtgggctaacttgaagcaggacatcctatgtgattgatttaggggtgcatatttggtttctctgtttgatcctaagttggaagtggggacaaaaattggggaagctgtcagttattaatcaagtcctgaccattttggcttgattgttacagaagttattgtttagcttcctggattgccactggagatagcaatctgtcttcctgcaagtctgacttatagcaggctggcaacctgggctatttattgtagatatggggttggtttcctgggcaggttactgcaggttgtgggtcaaagttctatttatatatatattctgggattgtccatttgtacattcagtctctcactacatgcaacaatatggctgtatctctcaaacatttaaatgaagctagacacatccatcgatggatgaatgaataaacaaaatagggcctacacatacaatgaaatattattcagccttcaggaggaggaaattctgacacatgctgcaacatggatgaaccttgaggacattatgctaagtgaaataaaccagtcacaaaaggacaaatacatgattggacttacataaggtacctagagtagcaaggtctcttcatagagacaaagtagaatggtggttggcagagggagggagagagggatggggagttagtgtttaatgggcccagagtttcagttgaggaagatgaaaaagctctggagacagatgttcttacaacaatgtgagtgtacttaatgccacagaactttacacttaaaaatggttgaaatggtaaattctatgtgtattttgccacaataaaaaatccagatacaaactagtacatactgtgcaattctttttatatacagttcagaaccaaggaaacctactctatgatgttaaaagtcagggcaacgattgcctttgttggttgtggggtagtgactggatgtgagtatgaggagggactacagtgctactcaggttctaattctttgagtgcttgttacacaagtgtgttcatgatgagaaaatttatcaatgtgaactcttaggatctgtgcttttttttcccatatgtattttatacttgaataaacaagactttttgccttctactccactgggctcttttagaagcttccaagaccatggatgggaaggccccttggaaactacctaggcctctgcagatgtaaggggtggttactcttagcccatgagcatttatcccagccacatcttgttctgatgaatgatccaacagaggcccaagacttggcagtgtcaagtctggattcaaacttaggcttcttgactccagtgttcactccaggaccccaactatggcctcaagtgtgagtccaggttgtgatctctagataagcaaaccccttcctttcccagtgccctctgcttggagttgctttgccctccagaggaaaacaagagccctggtagaggctgctgagctctatttccttgctttgcattttttgggcttctttaatatttaaccttgtgccaggcattttcatacatattatcttacttgaacttgcccataacgctctgaggtgtaggtgttattaaaccaagataagtgaagaaacaggctcagagagacaaagaaacccaaccaagatcacacacctcataagaagcagattcaagcccaacttgctggacttaaccacattctttcctctgcatcgcatggcatccctcatattctcccattttattcaaatattgtaaataactcactgtctgaagccaacacagaaacacagagcagagagagaagcagggaaaaatgacaagatgacttcagtggaacctctggatccacctgcacttaagtcactttgttgggtctctttcacttgtacctgaaagattccttattgatctaggtatgtaggaaaagatggcagggaggtggggtgggggttggataccagttgggggttggtcctgataataataccccttagaggtcaacaggtccaatctagggtcacacactgatgagtggcagggccaatatttgaacccagatgtgacttcaaaaaccaaggtgtgtgcaattcttcctcttgaatgaatgaatttcttgagggttctgaactctacccttctgagcaaggttaaataccagtctacaactgcccttgtccttttcttcctttctagcagacaggattctgaaagacattccctgtgccaccccctccccttccttctcaaagactcctgtcttagaagattatcttctcaacttactaacttcctggagaattctttccacacaggcagggccggactggcctgaagtatgaggtctggtattgaggaccatcccagccagcacctcagggctgtttccagagccttcagatagaagaaactcattataggacgcacacttcaaagccacttccttcagtggtgcctggggagttaagtttaccagacaaagtgataatagtgggaagtggtgctgagtgagtacaatctggtattaaaaagcctgagtttgaatccctgatctgctactttttaactgtctgaccatggatcttggttttttcatctgttcagtggtgatactactattttattgttgttgctgttgtcttgtggggttgttgtgagaagtatatgagataatgtatgtgaaaccactttgcaaattacagtgacaaggatatgtggaggatgactattatttgctaggctatcttcactcttgggggcttcaaagagtaccatataagtcaactggagtcttccactctgatgtcccagtgtaaacaccctgcttggcccttatttgagctgaacagctcttcttactcaaagggattgaggaatgggatttgcttcttgtctgaccttggacttctgggtctctcttttctgatctgtaaaatggggctggagag

SEQ ID NO: 669 - DNA, 2403 bp, Homo sapiens
tgcggggcgggctcaggaggtccgcgggaggatggagcagtgagcgggtctgggcggctgctggcagcgccatggagacggtacagctgaggaacccgccgcgccggcagctgaaaaagttggatgaagatagtttaaccaaacaaccagaagaagtatttgatgtcttagagaaacttggagaagggtcctatggcagcgtatacaaagctattcataaagagaccggccagattgttgctattaagcaagttcctgtggaatcagacctccaggagataatcaaagaaatctctataatgcagcaatgtgacagccctcatgtagtcaaatattatggcagttattttaagaacacagacttatggatcgttatggagtactgtggggctggttctgtatctgatatcattcgattacgaaataaaacgttaacagaagatgaaatagctacaatattacaatcaactcttaagggacttgaataccttcattttatgagaaaaatacaccgagatatcaaggcaggaaatattttgctaaatacagaaggacatgcaaaacttgcagattttggggtagcaggtcaacttacagataccatggccaagcggaatacagtgataggaacaccattttggatggctccagaagtgattcaggaaattggatacaactgtgtagcagacatctggtccctgggaataactgccatagaaatggctgaaggaaagcccccttatgctgatatccatccaatgagggcaatcttcatgattcctacaaatcctcctcccacattccgaaaaccagagctatggtcagataactttacagattttgtgaaacagtgtcttgtaaagagccctgagcagagggccacagccactcagctcctgcagcacccatttgtcaggagtgccaaaggagtgtcaatactgcgagacttaattaatgaagccatggatgtgaaactgaaacgccaggaatcccagcagcgggaagtggaccaggacgatgaagaaaactcagaagaggatgaaatggattctggcacgatggttcgagcagtgggtgatgagatgggcactgtccgagtagccagcaccatgactgatggagccaatactatgattgagcacgatgacacgttgccatcacaactgggcaccatggtgatcaatgcagaggatgaggaagaggaaggaactatgaaaagaagggatgagaccatgcagcctgcgaaaccatcctttcttgaatattttgaacaaaaagaaaaggaaaaccagatcaacagctttggcaagagtgtacctggtccactgaaaaattcttcagattggaaaataccacaggatggagactacgagtttcttaagagttggacagtggaggaccttcagaagaggctcttggccctggaccccatgatggagcaggagattgaagagatccggcagaagtaccagtccaagcggcagcccatcctggatgccatagaggctaagaagagacggcaacaaaacttctgagcaaggccaggctgtgagggccccagctccacccaggctttgggtgaattctggatggcttgcctcatgtttgttagccagcacttctgctctgtcgtctctccacagcacctttgtgaactcaggaatgtgcgccagtgggaagggctctcttgacagtcagcgtgccatcttgatgtgtgtatgtacattggtcaggtatattatctcaaaggatttatattggcgcttttaactcagagttttaaaccccaggaacagagactcctagttgagtgatagctgggaaagttttacattgtctgtttttcttctcccaatagctttcaattgttctttctggaagacttttaaaaaaatataaatatgcatatatatatataaattataaatagattccccacgcagtgtggtggcatctctgtacaggtacagttttaaacggtttgcctcttttctgtaagattatggtactgtggaacatgagggcagaggacaccgggaggctgttagggggtcactgaatcccaggagccaacctccccctttgcagggctgcatttaaaaattaggtttgggacagttcttgtaccgtggtttcagccttgtgtggtcatcactggcttctggagctattggtgatgtccaagggaaagctttgagagtttatgtttactctttgagtcccaggagaagcctggcaccctctttgcaaattggcctttgctctttcaatgcctttcatccatctccactctctcaactgcctaaagtcacagcacagatactgcccagtgccttaagaggagacatgatctctaccagggactctcagcaaacacgggactgtgttcagtccacaaaggaa

SEQ ID NO: 670 - protein, 485 aa, Homo sapiens
MVQLRNPPRRQLKKLDEDSLTKQPEEVFDVLEKLGEGSYGSVYKAIHKETGQIVAIKQVPVESDLQEIIKEISIMQQCDSPHVVKYYGSYFKNTDLWIVMEYCGAGSVSDIIRLRNKTLTEDEIATILQSTLKGLEYLHFMRKIHRDIKAGNILLNTEGHAKLADFGVAGQLTDTMAKRNTVIGTPFWMAPEVIQEIGYNCVADIWSLGITAIEMAEGKPPYADIHPMRAIFMIPTNPPPTFRKPELWSDNFTDFVKQCLVKSPEQRATATQLLQHPFVRSAKGVSILRDLINEAMDVKLKRQESQQREVDQDDEENSEEDEMDSGTMVRAVGDEMGTVRVASTMTDGANTMIEHDDTLPSQLGTMVINAEDEEEEGTMKRRDETMQPAKPSFLEYFEQKEKENQINSFGKSVPGPLKNSSDWKIPQDGDYEFLKSWTVEDLQKRLLALDPMMEQEIEEIRQKYQSKRQPILDAIEAKKRRQQNF

SEQ ID NO: 671 - DNA, 130888 bp, Mus musculus
  misc_feature (1)...(130888): n = A,T,C or G
atagaactcaagttgccctctcgcctgcaccacaggaatttcttaatttactgaattaccttcgcatgcttttaaaatcccactgaattaattgttaaacatttacataaaatatttaactaaagaacaaaaaacccccatttatccctctgtatgtttgtctgcctttgtgtgacctaatggtacatttgttataaatatcaattttgttctttgttagaattgttttgtagttgtcttccattatagatttaagattagcttattggtattaagaatgccggttaggatctgactgggttgcttggactgaagtcaaacaccagctttttccatgagcatagagtacctttttatttcagaaaatttcctttcacatacaggtcatgtgtatctcttattaggtcatatgttatctcatattagtcttgatcataaaccttttaatagtaaatcacaagattttaccacttccgtccataagagaaattctgaaacagattaaacaatgtcaacagtgttgatttttgtagaaagggaggaaacactcattttactcataccacagtgtgattcattagaaaagccctcatttccctcagctgagctaaaccagttggccttttattacttgctaactttgtagtaaggtatacgtgtgtgtaagtgttcttttccttgtttcaaacaggttttgctaggtcctgtctcacaaaggcacactagcattttaccttaggaagtgtgctgcatccgatagatggctgggatttgaagccagccttgtaaatgtgcttcaagactgaggtgtttgattttatcagtcttactcactcaccaacttattatatagttcttaatgtatctttgttgttgttgcttctgcgaatgttataaaaattaggttgtttgtggatagatattggagccgagccgatgtctctgactcaatatgctcagctttgcactgtgaaatggtgaaaattaacgaaccattttggtcatggcacgggtccctgtgctgaagggagagcctggcctggaccataacttttgaagaaccagtcaggtgacatctgtgccaaagcacagtggtcagcagagtcgtgtttgtgccgctttgtagagggatagcagcagatcaatttagctgagctgtctgtagcaggtcggtggcgagggcacagacactcccaaagcgtagccctcataccactgtcccaggctgctttgggttgtggcacgagaaaaatttgctctgtgtagcccggtacatctgaggtaagaacaactttatcaccggaagagggaaagcgagagtcacacagcttcctccagcctcgcccatctgtgatgatgtaaatatatgccagtctttaccgcactaatccctcaggccagtatacaattcaactcttttggtggagagcaaccggctcttcgcaccgctctaatacatgttaataacaaagattgcagctgtagctcttgtgaacatttgaccttgaagcctcacaggaggacagacattgccgatttctacttgtccttgagttacaagagtagataatgaattaatacaaattgataaagagtatctgtcaggcagctgctgaggtcatgagactggtatgcggaaagagtgcccatacaacatgcgtaatacataatgcagcccagagaggtgggtgggtcatggaagcaggaagcgagcctcagaaggaatgttggctctgctagagccacaagcccggagtgcatgggctcaccagcagctaacagggaaatgggagcgcttgctgctacagagacgtagccgtagacggtggcagcactgttgctgtactggggcttcaaagacattgaagacagtgcaggttggatttttagaaattaaaatgttcatactacaaatattaaatgcttaatgcttcttaagtagaggaactgaacaggggggtgggagagtaggggggcacagtgaagagcccttccttattatttttgtatgtgcttgctacatttgtaagtaaagattcagtgctgggcttccaaactgccattgagtgcttgctgatggtggaacatttctaaagtagctgtggaaggtgtctagagacggtgaaatgtgtgtagtttccaaatacttagggaatcgtcgccacttagtccactctcttgacacagtgtgtatacagacacacacacacacagacatagacacacacacacacagacacacacacacacacattttgtaatttacatgaggtatgattttatttagtgcctgctaatttttgagtgaatgtaaaacatttaaaaagattcagtgtgtttttatggcaagtttttcagtgtactttgctgttttctcttgacttggggaatgaaattccaggcttccacagttgctaccatactttgtctagacaatgagatgtgactctttctttgaagtcatcgatacatacattgattttggttcaggagcatcagttggttacttacattttagttaattagatttatttataaggagattaacattcagtgtctatcactttctaggaatgacgagatgagaaataggctctctgatagtttggcgttttagatgatttggtaaatttggatcgcctgtcagtgtctcagcttctctgctgtgctctgatctcctggttgtcttccctgacaggagtaagtttacattccgatgtagagaacttgcattccgccaagcagttctgacgcacacaagaatgtggaggcccatacacagggcaaggttagggacactggcagagggggcttctgtgcccagctgctgccttttccaggacactcacactaataaaacatgctcttgaatcaaattgggaggaaacgtgctgacagaaacctaggctcgaccagccttacaaacttctgctacccattagttacttatgggagtttacacaaactaggtaaggtgcttttcgcagatttgtgctttctggttatgagctctacctagcgggctgttatagcgcattttggattatgtaatgtcatgctatttgcacctattaagaacattttccttactttattttgatttgaagaactgagttaatttgtaattcgtaatttttaaattgttctgtgcaaaaccttcaagtgggatgaaactgtggactgttgtactgtggtgtgtgctgtggtgtgtgctatgtgttgtgctgtgtggtgtgtggtgtgtgctgtgttgtgtgttgtgctatgtgctgtgctgtatgctatggtgtgtgttgtgtgctatgtattgtgttgctgtgtgttgtgttgctgtgtgttaagagctgtgctatgtactgtgctgtgtggtgtgtgctgtgttgtgtgttgtgctgtgtgctgtatgctgtggtgtgtgctgtatgttgtgagctgtgctgtgtgctgtgttgctgtgtgttgtgtgctgtgtgttgtgtgctgtatgttgtgtgttgtgtgctgctggtctttcaactgatggctggcaacagatcttacatgctgttattttcataaggctaagtaagagagccaacagttgacaaatgtggacctgtgtaacttagctttcattttgcggctggctgtttaatattaaagattgtaagaatgtactggaattacgttgaagctaaagggctgaaatcaaagttgtgcagtgtgtttatagagaacaagttctttaagaacactcttaccgcatttgctgcaccctcacacccctcttcagtttcatagctgcctgtcaaaagccagtgtctaggatggaaaaggaccaggattctgaatgttatagccaagacttacctggcatgtcggcaagtgtatgtgtatgtgcacgcacacacaaacattgatttttgttttacacacaggtatccacaaaaactgaaactactgtaaagactgggatgacttttaaagtgttttaatccaaatgtaaacaaaacagcactctatctttgaaagttcaaagcggcaacagttaacctctctgtaggttgcactcccggcaggcactgccagagggcacttggtctgtatggatctgacattcaaacctctgggtattttcatctgacctaaggctcttcctgcactgtgtgattttgctgaatttgaattgctctgtgaattacaaatgctgagctgtcttttccctctcggctagctggcaagtgtgcctggccattgagtgctgcctctccctgaaggccagtctgggctgtcattgggttgcagctgtttgaatactcatcttccatggactgtaaactactgaagaaataatggctgtattttgtgaatttgattttgtaaattccaatgttaattatagggcttatgttgataatactgatttgtgttacctgtccagtgaacacatgaagaggagtgggcagcaaaacacttttcatgtaagaaataatatggaagagccttattatagtccacggacaaaaggaaaaatgtggttatattgagttaaagcaaacaggatataactgactgctggggacacgcactgagtgtctgttacatgtgtgccttccccatgtcttcccacgtacgttcatagctactgtcacttcagccttctaggaccaatgggaagaggttggtgcagtgtttctcagtggggtggtccagtctcaaacaacttaaggctttggtgtgggtgaggctggggggaggctctaaccatggccaggcgtgaagtggcaggcaagcactctgccatctacttgtttgctttgacttcctgctttcccttacttcttagtttttgtaaagaaacctaaagacactaaaagaaacagaaactaactgtggggctcgcccttctgtctcctctccagactcagcggcctctcggcctctcgctttcttcctctgtgaagttgcctattctagctaattcctctaagtggagtttttgtgactggcttgttgccctccgggtgatatttttaagcttcgtccatttgtatcatgtgtcagttcttgagtcctttttatgtctgaatagtcctccattgtgagctgtatatggtgtcacgcaattgtccgcccagcgcttgggaggctccatgcaggcgaagcatggatttgaagctagcctgggtgggctatggagccagactgttatcaccaacattctgaagtctgttttatgtgtacataatactgtttgtttggttaatagagttgtttccatatgtggccattgtgaattatattgcactgagctctgctgtacaaatagtggagtcctggcgcttccctagcaccagggctatggacagcactgtactcgcctcatggtcttacaggtgctctcaagagaccctagttcagatccttatgcttccagctgggatgtaagcagctggcccttctcctcagttcagtttgataaagacagatgccttgcttagatttattccaagggagctgcctctctccttcagcgtatttgagaaatgcatgtgctgaagaattgttttcccaattgacaacatggtgatgtctccaggatgtgagtcttgtggctgtagtttaccagttcacctacagctaccacatcccagactctcctcggaacatattatacagtgtgacctttgcatgttaattcaactcaaagtcatgaagttctagaagctaagccctagctgtatggtaacaggatgtggggacttggtacaggaactgtgcataccagcagcgctgtggagtttgctagtgttgaaagtggggattcacctttcctgctgaagtttgtgaacagccccgtggcagcacgttttgatttcctttatcaggtatcgtaggaccattgtatccattacaaatacgtatgatttctttactgtgccattccacattttcaaaagaagcagtagtgcttataaaattgcccaggtctgagatggaatgaagtatgacaactgagtctcccagctgtgctctggcattcttatttattttaggtgttggcagttgaacctgggaggtgctcttgctaattgcacataccacactgagccacacagcaccccctgccttcatttttagattttgatgttatgttacttagtaacaaacctgaaatatacaatatatatttgtacctaatcatgtaataggattaaaatgatgatattggtaagcctgttacatattttattaatatgtcaaaattatttttcaagttgttgaataccatggtgtccagaggttgatgactgtgtctctctgtcagtcccagaactctcacgttatggttagtctcaccagccagcttgctccagggatcctctgacctcccttttacctccacagccatgcatgtttgcagtggattctgggatctcaactccggccttattgcttgtatggcaagggctttaactactaagtcatttctctaccttaccggcagaagtcttctgctttataaggcacgctacagtatgtatgtttgaatatgtctgaatgtatgtgagtgttttagaaattctttttcaatggtattatctataaatctgggtttgatcttcataaaacaagttttgaaccccgaagaacataattgatgagtctactctgactggtgacccctcatgtaaatgaataaaattgacagatgaagtggtcggagggacctcttgattttcatagcttggttcctactacatgaaacattgtgtgtcatgatagaagggccctgtaaaaggaaggacaatctcctccgaagttgcccagaatgcctgcttaacttgatggtggggaaaggcattcaattaaaatttgttattgggaatgtgttttttccttaaaagatgtttaaagtgtaatatgtggggtatgggctttcattgcggtttatcattgcatgaaaatggagaattggagattgtcatgttaagccaactaaacaagtctcagaaagacaaatggcacatattttctctcagatgcagcttctgtattaaaagtacaaaacacagaaagcgggcgggagatgagaggaagcaggtcagagggatggggaaaggaccaagggtagtaggaggatgcacaggtaagaccatacacacatgcgcagaggtattacactggaaccttgtttgtctacagttactgtatgtactaagcgaactaaatattactaaaatatatacttgtagcatggtgaaatatatgtattcaatcttcattgaagctttaaaaattgtttctttttagagagaaaggagaggtttttggagtagtgatagaaacaggcagttcgtacgtagatggggaaggcaggccagaactgctttggcacacctgggttctagcttgtaaagaaaatgtcagaacaaaacaaaacaaaataaacaaacaaacaaacaagaaaaacaggcttctccaggattaaagtgagagttggcagagatgggacgaggagtaagttctgagtccccagggtggctctctcagggagggaatccatgcacacatctgcactcacatctgtgcataacccttctcctagcttggcatctttttcttaaaacatttagaataacttgatcgggaaaattaagtctcagcatgttaacttagaaaaggggagtgcttgtaacttatattttataaacattttgtagttcatgatggcgccatttctatctgtattggaatattctaaaacgtcacctcattgagaatgttttcaaaccgtccatcacaaaacatgcttgtgttaattcttccttatttagattattaatttgaaaacaattttccagaaaaaacatgattgaaacttaggaatttaagttattttgttgttatttctttgtataatcatgactgaagacacttttaatgtgttgtttttgtaactgaaaaaaattcccatagttggaggttagctagagttcctaattcatgtttcctgatccctaaatcttgtcttctttacctctttctagttttggcaagcgttctgcaggaagctttaggcgtggctgtgaatgcattgtcttagagccttctgaaatgattgtggtaagcatgtctctttgagaactttttatttttctcaagtatttttcagaaaaaagtaaacagtaaaagctttttcacaaactacttgttcatcataaagtattgtattttttaaacagatttacttaataattatgaattttaattcgtaattgtaatattgtaattatttataatactcaaatgtagaagatagaaagttgaaaagggatagtatttggtgtttgaactttataattcaatcagttgttatgtcttttaactgaaatttggggcaccctggaactgtagaaatttagctctgagggacttgtgtgttgaacacattcgtgaattcctttaagtgagaggacattagagacctgctgacgcctttgtctcataatcgtgtgatttaggatacatgacgataaggcttcatatggaaatgtaagaaagacgttagcaacataattattttagtaaagaattcaagcaaaaccgtctgtggtgcttctttcttacggcataaaaataatctaggagagggtattagacattggtttaaggttaccaaagcaaaggcgggtgggtacagtgccagccctcaccagcctccttcaggacggctctgtgtcctcatctgtcttcttgctcagggaggaaaatctcataaagtaaatgatggcacagccgtggtgatagtgaagctctcttgatcacatttggttaaattttggtaggtaactccaggtcaagtttttagaggcaattgcagtttttccccaagatgctgcagaggaattttgtcagcagtaagaacttcctctctgaacatagtaaaaaaaaaattggggacaaatctcataacatgagaaaataagatagcggtggtaaaatgtaggattatgaaaatcatggacaagctgggcatggtggcgcacgcctttaatcccagcactctggaggcagagtcaggtagatttttgagtttgaggctagcctggtctacaaagtgagttccaggacagccagggctacacagagaaaccctgtctcaaaaaaaaaaaaaaaaaaaaaaaccaaaaacaaaaaaacaacgaaaagaaaatcatgggcagatcattggactttccaacactttaagttgagatctttttacccctgttaattctgttttcatgggatttttttttttttttttttttgtgaagttcctgagggttcatactttgacagtattacaggaaatgtgagcacagcctccgtgtgagcaattctgaaggccatactgaggactgggctcacttcccttgttccctgttcatgtgctcactagaacttttagatgtttaggaggaggaatttttttttttttttttttttgcaataaatactacataagcagaaagaaactgaaggcatgctgtgtaagccagaagaggaacctggtcccctagagccatcctgctggcggtgctgtctgattcattcagggctccagggggttttacagaatttctcaaatgcatcagatttgtgtgtgtgtatgtgtgtacgcacacacatacacgctaaagttatgacaggcagtggctgtattcataaagtgtggtcataccccatgacctctttgactcgtaattcagcacaaagtctgcttaaagtctcttcccccgaaactgcagacttccagggtaacccggattgtcccaagtggaactgagaatgcctcttcacctaagcgtcaccgcgggccagttagccccagagacgtgcagacacatttaacgtttgtctagccacggctgcagaatgaatgaaagcagaccatttgtaagtttattttcgaatctggtgttaatgtggaacggtctgattggagaaatgagatatctcgggggttttatttcaggtggactatatggatgaaaatgaagaatatttccaacgtcaagcctcccacagacagtcacggagaagatttagaaagatcaaccagaaaggtgaaagacaaacaattatcgacacagtggacccttaccctgtgggcaagccacctttacctagaggctaccatacggtaagttataagcaagattcggtgcttctcaaaaatcttttgtggtgggaatgggtataaagatggttacaatttgattatttttgcaatatttatttatccactttattatttaccttgagactggtctccctgtgtagccctgactggcctggaactcacagagccccatctgctctagtttgtttgtttgtttgttttctttcccttgagttttgctgctgcttctggtagaagcacacatcatctcatctggatagatttcagcaagaactgaaacaagaagggaagagacacagcttagtcatggtatttcttacactcttctcagagataggctttgagataggcatggaacttttgagttggtattttgtaagtttccttcccttagttcaagagtttagctttctgccgtgcacctgtctcaatgactgatatatctggcttttaattaagaaatagatatgtgtaacactgtcatagaacttctgtgggttctagtgtgagactattacctcagctctgttcaatgtccagaactcagataagaatcccctgaaatgactgaaatgcttctgcagaacaggttcagaggtccccctaaacactggacccactcgatagccgctgacgtcataggtatttgataagtaaactccttttacatttgaagacatgaagccttggatagtggatgtataaacttccataagggagctttttttttttaaagattatatatatatatatatatatatatatatatatatatatatatacacacacacacacacacacacacgcacacacattgtagctgtacagacggttgtgagccttcatgtggttgttgggaattgaatttttaggacctctgcttgctctggtcaaccccgctcgctcagtccctgtttgctctggcccaaagatttatttattatacataagtacactgtagcttacttcagatgcaccagaagagggcgttgtatctcattactcgtggttgtaagctaccatgtggttgctgggatttgaactcaggaccttcagatgagcaggcagtgttcttacccgctgaggcatctcgccagcctgatcctgagttcttatgctaatggcttaacatgtgtcttagtcagggtttctattcctgcacaaacgtcatgactaagaaactagttggggaggaaagggtttatttggcttacacttccattctgctgttcatcaccaaggaagtcaggactggaactcaagcaggtcaggaagcaggagctgatgcagaggccatggagggatgttccttactggcttgcttcccctggcttgctcagcctgctttcttctagaaccaaggctatcagcccagggatggtcccacccacaaggggcctttcccccttgatcactaattgagaaaatgccttacagttggatctcctggaggcatttcctcacctgaagctcctttctccgtgataactccagcatgtgtcaagttgacacacaaaaccagccagtacaacatggaaggtggtttatctgcacatgacatacgggcgtggccactataggaaattagtttatgactagaaacagaaaaatggttcactcggtaactattttacacttcgcagtttttctttctgcaggtaagcacaagtggaaggcgcacacagtccaaaccatttactcggctttccgtaactttaaggatggacctcgtctatgccctgttcacacacttattgctaggagaactctttgtatttaaatctctaacagggttttgaacccctgcagcctgctttctccatgcaccttttcagtttgtcatggagaatcttttgtttgagttcttgggggaagaactgagttctgtctgccacaaaggcagctctgtttgcctgttggagagatgtgggtatcagaaagagcaaagcttgtaagaagctggccatgctggtgcctacctgttcttttagcataaggaacatgccagaggcaggctgcgggtggaggcccatctcttgtacatagcaaattccaggccagccagggcttcagaccaagatcttgagtcaaaacaaacaaacaaacaccggtcaggcctagtgaaaaatcattattcttttcattttgttttcttactgttgttgttgttgttaatcgaagaagggttgggtgtagatttaacagcccagaaagaaggaaatacatattaaaaattataaatgctagtactttaaaatagatgactgtgttttgacatactaatattgttactatttgttctgctttgaaattgctttctcaaactagtttccatcctaagaaactcagatgagcatggacctcttgctcagtgttaaatgtcgattgattaacctgatgagcatgtatggggtacacaagttggagggtcgtgcatatcatggctttctctggcctgccttgtcttgtctttcatgggatccttcattaccctctgttcatcattcccctttcttgctctgtttaagtatatacatgtaacagtatattatctggtcagcaggtacttttggaaacaatttaatattaagattaaaaaattttatcaatatttactgtatgtgaccaccgggaataaatttgactaaatgaattaagatgggcaatagcatggttgaaatttaaaatattgagtcctttttgagatataaattgtgttttagttacataaatatatataatttattatttatatacatacataatttatttggcttaaacagactttaataaaaaaaacaaaatttgttttatatgtttgatggacacagtaaaagagatttagttgggaaatattagtcttcatttgatgtgagtcatgttgttcataacaaaatctctctcttggaaagaagttggctagtgtagtgggcctggggtggaaaactggtcctagtcgagtcacatgaatgtccctgggacgagtcaggatgactttccagtgcatggctaaagaacacagcacagtaatgcaggtgatctgcactgtcgttccacactgagatgaacgtagtcttcgttttggcagacgcaatatggagcatgtctgacatttgttcctcttttcctttcctcctctatggcactcatttcattctggctcaaaggaatgcactaaatctcaggtattgtaatccatgtggtgtcttaacactaacctacgtttgtgtgtaagtttgcaatgttactaatgaattatagtgctgatgtcatttgctcggtctgtcctgctgtgttttgccccgatgggtgagacttgtgcgtaccttggaagtgttgatttaggtggaggtagtctagtaagcttcattcacgcagttctccgtatggacaggtcattacctgaagaatgcaagtgcaatttaattatttttaagagtaattgaagcactgtttcttttttaacttgttttgcaaataagaaaaaacaaacaaacaaacaaacaaacaaaaccagacattggaattgccctgcctttcttgtgggaaagctcatgggaagttccttagaaacttacattttaattgttctattgataaaaagcaaatttagaaatcccaggttgagggcatttggggaatatactggggaaatttcatttacattaaaaaaaccaaacaaaccaacaggcttattcaagagaagaaaagggaacttcaaatctcttactgtgttttcttatttgcaccttgatttttaaccagacttcttgctttggtttgcctacattttaatcaagaggtctataacaccttaacttgtttcttaatgcctgcaataactaatctgcgatttttggaattgggctgttgaagttgtcactcatgtttggcttggggaatttggagttatgggagaaaacccgatgactccctggaagatggtagaggaacagtaacttttatggctgtgttactgtacaggagaaaggtcatgaggagatctgcccctaatatttttggatattgtggctgcctttcatgaaataacaaactgtatacattttcaaattaaatgagacaactcccttacgttctgtacaagggatgttgtcctgtttcttgctgatttgtatgcagggtggaatatgtgcatgtgtatacattggtgcatggatgtgtacaagtgtctggagcccaaatctggcattgtctatcattgtctgccttgatccttagaggtagggtttcttgctaaacctggagcgtgctttatcagctgggctagcagccagcaagccctagtgagcctcctgcctcttccctcagcagtgctagggttgaggtgtgcatgaaaccacaccctgcttaatttttttaaaaaagatttttattgtattttattttttgtgtatgagtgttttgctagcatctgtgtatatgcaccactgacttgcctggtgcctagaaagttcataaaagggatctaccctgtactggaatagggacagttgtgagccaccacatgggtgttgggagctggtcctgggtcctctgcaagaacaacaaacactgcaggtccccctccccctagcctgctgtttggatgagtgctggggcccgaactctggttatcttgtttgcacagtaagcattcttaacctctgagacatctatccagccctgaaactgctaattgttcaatgatgagataaatctaaaaactttctattacaacttttaagcctcatggctgtatattttctaaattgtatagcagtatttttaaaaaaagtcagcagttttacttttagtatggaaagtaagcactttaatagttaataacaatccacaatgtaatttatctttttatttgacatgaaaaaataagaacctaattttgatttaaaacggattcaccatacacacagtgatgtatactttatgtactcttttaaaattagacatgttaaagtaatttaaaacagattataatgattttcctcagaatcatgaagactaggtccatgcagagtgttttcaggacagtttttgtaaggcaagtgtgtgaggtttgcagggagaataagtgttttaatatgcagtgagaagagagttctcattaacattttcttacattttgatgagtggagcttgagactgtttttacggtgaccaaataagagttgggtaggaaggaaagctttctctgccttcctctctcattacttcagggcactactgaggcatttgtatggcagggagatcctaggtccatggtaaagatggagagggaaggtagtggagctgagctggaggaaggatggttaacttccgtggttggagtggtgttggaacttggcacacatctcttctggtgtgttccattctctcttactttaatgggggagaaaagaactcattacttctttccagatcagaaaaagcaaaaagatcgtacagaaacaatttggagattaaagaacacatctctcacatgtggatattatccccaaagcttgagagattttttagcttccaaggctggttccacagttagaatgttctctactcttgaagtcctcattggcatgctgtcttaatactgcctaaccccaaaaacacacctctgctgtctaaatgtgaatgtagtacaagatagagagcatagtctcaaatttccttcagaaaattaagataatgaaacgtttttagacatggaataagatgtttttacgtcacctatggcagcttttgtcttctacaagcattataggttttcagtagttcaggtttgagttcttgactatggtatgtaggagcaatagaaaatattacattgagttgatgtatgaatacaatgtgaccttaatactttttattgccagcgtctctaaaacgtggcatcagcatagtaaggtgacaagtatatgaaactttggaagatcgccttccttattcatagacttggtcactctcttgtttctaatttagagacaggatctcactggctagcctggaacttagcactgtggaccaggctggtttcgaactcagagattcacctgactttgtctcctaagattaaaagtgtgtgccaccaaacctgattagaattgttcttttttcggtaatgtcaaataaatcttatttcttttaatggccatataagatatcactggttttcgcatatatctttcacatttctaaatgagattaaaatttttttccatgttttaagagttaaacttaatttttaattcacacataaaatataacaattaaacatattggtgaatactttgtgattcaatatgtgaatttttcattgcgtgctgtttaagtaggagaaatacgacactagtcttaaggtaggaagagagaggctggccgtggccacgtggagagagggggaaagggagagagaaaaggagggttagagatgacagtaagaaaggtgagagcttaaagtgtgcagtattttttaaagaatagatttaacttgtatcttgctaagaacttcttggtttggttttaagagttattactttttgaaataaaaagtttacagtgtttattttatgcacatttttgatgtgagttttttgattgagctattcttaaatcagaaatcttagttatttccacccatttcatggcttgctttctccctaatttttcaatgtctccttagtttgatttactatctgctatttaactgtaagaaattgctttatgtcagaatcagtgacttttatttttggtaaatttcctagactatattaagagcttcagagtttaccttagttcatgtctctcctaactataatttatttatatttaaagatgtattttaacacaaataaaattatatgtaagtgtagggttagtgccataaccacttttaaagcatctatccctgtatttatccacccagcatttgtttgcttaattgaagtgaaaacatttattttcactggtgttattaattgtctttttgtaaattacagtagcatagagcttcagaaaactgatgtattttatttcctttgtcattcaggaaaaggccagtattttattctatagacctattcatttgacaaatatttgttggatacctatttttcagatctgcatcagactcaattgatttgtccctttgcccttgtaatttcacagggaaatatggataataaaaatataggaaaatacatgtttggagggacatgcactgggtactatttttgtttgtttgttttacttaatttttttgttggatattttctttatttacatttcaaatgttatccccttttcccgtttcttcccttcctggggaacccccatcccattctccctccccctgcttctatgagggtactcctctactcacccacccactcccacctcccctctctcaattcccctacactggggcatctatccagcctccataggaccaaggacctctcctcccattgatgcatgacaaggccatcctcagctatatatgcagctggagccatttgtactcctttgttgatggctaagttcctgggtgctctgggggggtctagttggttgatattgttgttcttcctattgggttacagaccccttcagctccttcaatcctttctctaactcctccattggggaccccacactcagtccagtggttgactgtgagcatccacctctgtatttgtaaggctctggcagggcctctcaggagacagccatatcaggctcctgtcagcatgcacttcttggcatccacagtagtgtctgggtttggtaactgtatatgggatgaatccacaggtgggacagtgtctggatggcctttccttcagtctctgctccacacctttatctctatatttgctcctgtgaatattttgttttccttctaagaagtactgaagcatccacactttagtcatcctccttctggagcttcatgtggtctgtgaattgtatcttgggtatttggagcttttgggctaataaccacttatcagtgagcacatgccatgtgtgttcttttgtgattgtgttacctcattcaggatgatattttctagttccatccatttgcctaagaattttataaactcattgtttttaatagctgagtagtaatccattgtgtaaatgtaccacattttctgtataaataaggctgctatgaacatagtggagcatgtgtctttattacatgttggagcatcttctgaatatatgccaggagtggcattgctgggtcttcaggtagtactatgtccaattttctgaggaaccgctagactgatttctggagtggttgtaccagcttgcaatcccaccagcaatggaggagtgttcctctttctccatatccttgccagcaacttctgtcacctaaatttttgatcttagccattctgactggtgtgagagttgatttgatttgcatttctctgatgactaaggatgttgaacatttatttaagtgcttctcagccattcgatattcttcagttgaaaattctttgtttagctctttaccccatattttaataggattatttgattcttgggagtctaacttcttgagttctttgtatatatagggtattaccctctatcgaatgtagggttggtaaagatcctttcccagtctgttggttgcctttttgtcctattgacagtgtcctttgccttacagaagctttgcaattttatgagggcccattggttgattcttgatcttagagcataagccattggtgttctgttcaggaaattttccactgtgcccatgtgttcaaggctcttccccactttctcctctataagttaaacagtgtatctggctttatgtggaggtccttgatccacttggacttgagctttgtacaatgacataagaatgcaaggagatttgcatatttctatatgctgactgccagttgaaccagcaccattttaaagaaatgctgtcttttttccactggatggttttagcctctttgtcaaagatcaagtgaccatatgtgtgtgggttcatttctgggtcttcaattctattccattgatcttcttgcctgtctctgtaccaataccatgcaggtgttttttttttttttttttttttcttcccactattgctctgtaatacagcttgaagtcagggatggtgattcccccagaagtccttttattgttgagaatagctttcactgtcctgggttttttgttgttctaaacgaatttgcaaatagtcacaaataatattacatacctgattttaactaagcaagtgaaagatctgtatgacaagaactccaagtctctgaagaaagaaatagaagaagatctcaaaagatggaaagatttcccatgctcgtggattggcaggattaatatagtaaaaatggccatcctgccgaaagcagtctacagattcagtgtactgggcaagtttaaaagagtcaggaatggctttctgatcagctgtcatgtcacatcacaaccccaggagaagcagttcacacctgtaattccatttgctcaaagactaaagttgtggggaaatccagagcgggcaaagaggaggtcatgacacatgcatggggcttcacttcttgtttgcttcgttttgagacagggtttctctgtgtagcctggctgtcctgaaactccctctgtagaccaggctggcctcgaactcagagatccacctgcccctgtctgctgagtgctgggattaaaggcaagcaccagcccttctcaaaggtcacattttgataaatttatcttatctactccgagctggaattgggatggccttaggtcctccttaagctctaggagtagcaacagcatttgaacttgacagctgagataagaactcagggtgaggattcaagtggaagaaagtggaaataggggctggagagagctcagtggtgaggagcgcaacctgcagagcccccagttttgtctcccagcaatcacaggacagacagctcatggccacctactactccagttccaaggtatctcagacactcttctgtcctctgggggcaccaggcacacatgtagtgcatagacatacccacaagcaaaacactgatacacataaataaatcttgaaaaaagaaaataggtaggtgacaagaataaaactttaaagtaccattcattcattttaaattggcttagctgatgatagtgctttctgactagtaatttttagtgggcagtacatatataactctgtgtgtgtgtgtgtgtgtgtgtgtgtattcaccatatataagtgaaaatgtcccatatgtatgtatgtatgcatatatgtatgtattatgtttgccatatataagtgaaaatgttccagccatagtttgatttagattagtttgaaaaatgacacaaggcgttgtcttttgtttgtttagggttttgtttagtcaagagtttctctcccagagtggtttgtaactgctcttgtagatcaccttcaacttctgatcctcctgccttcagtgcccaaaccctgcgatccctggaatgttccgccatgcccagtttctgcagcactagggctcacatccagggtatcatttatgctcagcaagcattccacaagctgaccacatccccaggccaaagcagattatcctttagtgctagacagctcaataaaaacatgaaagctgagctgataatgaagaatgagaaaagggtgtggggagaaggttagtgacagccacaccctatcaaggttgctgtgagtttcgtgcttgtggatggctgctttggatttcactagtgttttttgagagtgtaggaagtatcctttgcatactccttgtcagtaggttagctggctcctcttcacccagatcatgctgtattgtaaatccttcaggaacgttctgacagcaaggtctccaaacaataggtggagaaaatgctactgaaccttgtgctgcaatttctggcaaactgcagcctgttcgagctgcagcgtctctgtggctctccttgctttaagggagggaccttttctcttttttgcagttagaatcaggtcttacgttaatttcattagtatggattaagaaattaaactatagagcataggtagacattgaaatgtaaatcatgagacaatttaaagcgtaaaacgatttctttcacgctattaacagcacgtattgcaaattcatgcaaggcagttgagaatagcatgcagtgtgctgtttacccaagtttcagcttctgccggaggatgtctatttttgtatattacatcatctctgctagagaactccgctgtccactgggatttactgttctttcattccaatctgaaagagagcttgtattgatgtcataattggacctatctttcagttgaaagtaataacagtgctgtgtagcaagtcatgcaatatttcaagcaatttgtctgtcaaaaagatcagtgccactttgtcctgcttctgactgtgaccatgggtagtgtgttttgcgctctctctctctctctctctctctctctgcctgtatgtgttttaaatacagttaactgaaattttgctttgtgttgcaacagcaaagatccctttcctgtctgccagcttcagcttccctcatgtgcccctccaccccgccctgtttctagcatgatgtcttacaagctcttctctttggacataccaacttttttatctttaatcagtgctgaaagggtcttgttagaatggttatccgttgcaaacagtctgtcttaactatgcatgataatgagtaatgagaaatgttctgagattgaaatccagtgtgaaaacagcagtgatcatcagatgatcttgtaaccctctgggtgacgtgctagcatctaatggaatgtgcacatgctagattttaaggcatttgtgaaaggaaatggtttagttatttatataagcatgattttaaaacattaagtgatctgcataccagtgtaatgaatatgtatataaatatgtatcactgtatatataaaaaaatcctccttattcttgaaagatttagtgactgtcagttatatctatgtgtttttaactgattaggagcaagcttccaatacattatttttaataactttattgagttatgttttatataatacaatcgtctgaagtcttttccaaaggtcttttcttggttaaaacaaacacaaacagcatgtagcattacatttacaatcttaatggtttttaagcagacatcttggtaatattaagtaagtcagtagatttttgaactgataggaacttacacatttttttatatgttctctgatcatagcatttctcataggctaaaaatatagggatctgcggggagaatggtagagggggtgggcagtcgtttatgttaatgcaattctgtgtggattgtatgtgctcagctggtgcacaggtgggtgtgatgtttcctaaagtagagggaaagatcaagtggccctgaaatgggaattgatggtttgaataaggagggctgattcagatgctgaggattggagggtgtagaaggagacaggacagcagtggtcgaaagttagcttcagatcagtccggaaggtcttttgagtgttgaagaatgggcaaacctcaaaaggcaacatttccctttcactggttatctttgtttgtacttactgtaagaagtttgaaactaggcctttacagaagttctggaaatcatcagaactttggggaataccaagggaagcttttagacagagggtgatttgctatttgttactttatgcaataaatagtcctcagccgagtgggatgggcagagtagccttgaccttcctgttcttgacattggctttagtaaactgaggagcacttgagagcttcagtttggttttctttgcagtgaactttgacacttagcgtgcactactgttgattagagcagaagagccctaacctttcagcaggattacttgtcagtcagggcctatcacattataacacagagataaacagcaactagcaactatgggttgttttaaggagccaagaggctggctattgtctgactgtacaccttcttaaactgttttcattctagatagtaataccattaagtcaaaagctcagtgagttccagtacagccacggttatataaaggaattctgtttaaaaaaaacctacccccccccccaaaaaaaaaaaggaaaagaaaaattagagtctgtgttcacttatcatttaaaaattgtggtaagggggctagagacatgtttcagcagctaagaggactcaggttcgattcccagcacctacatggcacctcacagctacatcatagttccaggagatcaaatggctttttgaccaacctaggcactgcatgcacccagtgcatgtacatactggcagtcagcgcacccacacaaataaaataaaataaaatataaaaacaatgcttaaagggtaacaggccatttattttaagtgttattttaaaagacatataactactttataaaacaaaaaaaaaaaaagaaaagtaatacattactaacgtgtgttattctcatatcttcatctgtgtggagcccattgtaattcattcttcagtttgaagaatataaggtacatgaagaaagtatgttctaacacagaaaggtgattacagaacgctacagtattgtcatttttgaaaacttcctggcaacccacagtgtgctgtgccagggaaccaggtaggtccacagcaggtcttcacctctccctccaaatccaatcctcccagttccagccttagctcagcagccaaagctggctgcagcctcccttcccccactgtccccatctccatctcattgctttatcccagcccccaactccagcagtcactcactaggaacccagagtcctctctgactgggaaaactagtaggctaaccagagatcttcacttctccctccatttctccaaagttcaatctgccagactcatcctcagttcaatgtagcagaccttctgctgtggcctccctcactttgcgctccgtttccagggaactcactaagcagatcacagtggaaacaccccgctttcctccccgctctgtaccctctcagccccatcccaactgcccaaccctgttcctaagtgtcagctcccaggaccctgtggaacctccagtggctacacctatcaggatgcaggaagaatttcgtaccaggcaatacacagccaccacactctgctaagaacagagaggacaacagaaaccaaagaacaaaatacccactcaacaaagacaaaactagaaaccagcaccagtcccagatgcctagatgctgccataaaaatacagtcagtaacagccaggataatatgtctccactagagcttagtaaccctacaacagcagaccctgagtattgcaacataactgaaacataagaaaaaggccttaaaatagcctttatgaatatgatagcagtccttagagaggaaatgaataaaatcccttgcatctatgacaacaaacagtggaaggaattgagtaaaacagttcaaggtctgaaagttggtaatagagtaaacaaagaaaacccaagctgagggaaatctggaaatgaaaattagggaattggaacaggaacctcagagggcaagccttaccaatagaatgcaagagatggaaaagagaatctcaggcattaaagacatgatggaagaaatggatacctcagatgttaaacaggaaaaaaaatcctgctataaaacatccaggaaatctggaacacttgatctaagaataataggaatagagaaaggagaagaaatcaaggacaaaggcacagaaaatattttccaaaaaaatcacagaagaaagtttccctaacataaagatggagattcttatggaagtataagagcaccaagtagactggaccagaaaggaacatcctattggcacataataattgaagcactaaacctacagaacgaagaaagaatattaaaagctgcaaggggaaaagaccaagtaacatatacaagcacaccaattggagtaatacctgacttcttagtagagattctcaaaggcctgaacaaatgttctacagactctaagatcctgcagatacctgctccaacaattatacctagcaaaactttcaattgtcatagttggagagaataatagaacccatgataaaaccaaatacttattccagatcagcaaatccaaagaggggaaacttatatacctcatagtagcaaaataacaggagtcaacaaacattgtttgttggtacctcttgtctcagttccccaataaaaaaagagagagactaccagaatggatttgaaatcaggaaaatccatttgaaaacaagaaaatctatcttgtggcttcatctaagacacataccttaaaatcaagggtaggtatcaccccagaaaaaggttggaaagacattctaagcaaatggacctaagaagcaaactgctgtagctatttctatatctgacaaaatagagttcagaccaaaactgattagaggagattgggaaggacactacatattcatcaaaggagaaattcacctagaggacattccagttcttatacaagggcacccaagttcaaaaaagaaacactactacagctaaaattgcatactgtccctcatacactgatagtggggaaacttcagtaccccattgtcaccaacagacaggccatccagacaaaaactaaatagacaaatgctggagttaaatgatgtcttaagtcaaatggaccaagtagatagtcacagaacattacacctaaacacaaaagaatatgctctttttttcagcagctcatggaacttttcaaaaactgaccacatactcagacacaaagcatgttttaacaaatataagaaaattgaaataacattctgcatcctgtctgagcaccacagattaatactagataacaccaacaacatcggaaagcttacaaactcatggaaactgaactgaatgaaatatgggtctagacagaaattaagaaagaaattaaagactttctagaattgaatgcaaatgaaatacagcataccaaaacttatggaacacactgaggacaattctatgaggtaagttcattggcattaagtgtctgcataaaaaatgtagcaatcttatactagtaacttaatagcgcatctgaaagctctagaacaaaaagaagacgtcatatccaaaagaagtagaacaacaagaaataatgaaaattagggctgaaatcactaaaatagaaacagacaacaacatgaaaaaaatcaatacaaagaatcgattaaacaaagaattgtttctatgagaaaatcagtaaaattgacaaactcttatcgatattaaggtttttttgttgaattttttttctccctcttcggaccattcataaagcactctctcctctcactgagcctttctaattcattccagtaattaatgagctcttactagtatggagtaccactttataacaatgatagcttaaactagcataccttcaatgtaggcagtaatgttgacagtcctttcatatatatattcttattgtgggaatgtgtttctggttgagtgttgatgcgttttgtgtgtgtgtgtgtgtagaagtcaagataaccatcgattccactctaaaggcatcacctacacctgtcatccatctatcaatccatccatccatccatccgtcatccatccgtcatccatccatccatctatcctccatccatccatccatccatccatccatccgtcatccatctacccatccatctatccatccatctacccatcctttctgaggcagtgttggtctttccggtacaaagcccgagaggcatacactagcttccactttctcaacaccagggattataagtgtgtgccactaagcctaactttttaaatgtggattcttggaatcaaattaagttccccatgcttgcaaggcaaatactttggcaaccaagctatgcccccagccttaattctcaaataaggttatatagttgtttaaaattagttattgcttgtggagatggacaatatctcataaaactgcttgcttctccccatgagtaaatattagatgtatttaggcaatctaagaacattgaaagaggacaagtaataaagggagctaaaaaccttccataacccccaggccaggtggtacagtcctgtgattccaactaatcaggcatttgagccaggagtagacaagctcatggactctgtgagttcagggccagcctcggcaatttagtgagaaggtttccaaatgaaaacaaatgagagggcaaggtgtattactattgtatgggatgggaaaggccctagcttcagtctcaatgctgttgagaagaaaaaccaacttattttgcatcaatctggtctgtctcctgttgctctttcctccacgtttgcttctatctggtatccagtaacatccatgttacttaagaacatggcaaggatttcaaaactctcctagctgaaccatttaagtaatgtagttcatacattatctttttatattatcaccatcatttacactcttaagatttctacttacaatgatttctgatatctgagagatactcctttagatactatgcatcagacttgtaccttcctgtgtactacaaagtgagaacatgggaaatcataacagttactgtttcttctaggaaagggctaaatagtaaacacatgctgaggcaggaggatcaagattatttgaacatatgatttcagtagcagcctggccaacatagtaaaacctaatcataaaaaaaaaaaaaaaatccaaaagaaaatcttcctaatgtttagctgaaacctactctcacataattttagcttaaattatagatcttcttaatgaattttttctccttttctggtactttaaatatttatttaaaatttcaatatgaagaaatggttttattttttctggtttatttttcttctatttaaaaaaggttttttttttttttttttttttttacatgatacagtatattctgattgtggtttctcctttctcaactcttcccagtccctccctacttccatgaaatctggaaccagaccctttctgtctctccttagaaaacaaataggcttctaaagaataataataaaataagacaagataaaataaaaccaaagaagtaggataagacaaatgtgtagaggaaaatgagtcaaaaaaaaaaaaaaggcaggagaaacacatatagatgaagagatacaggagttcccctaaaaacacaaaaccagaagccataatatatacccaaaggtacctataaggttaaaacaaaacaaaacaccctgacacaatattatgagacaaagaacctccagagatgccactgaattcattttttttggcctctacagctggatatgtggccagagggattggaggacacagaggaaccaaggcctctgaacacagacaacggaggcacatgagttcacagagactgagtcgacatgttcagggccttcatggggctgcacaagatggggtcctagagctgagagaagaagtagacacacgccctacccctaactcaaagctagctctggttgataatcacatcctgttttagtatagccactgtgcagagccttctgtaagtgcattctctttcataaacctactgagcttaaggttttcctaaataaggttttctgccactagaacacaactgtacatactgtctctccctggatgggatagctagattgggttgctgtcattacacagcccttcaacacagatcacagcagaacttcctgccttccatatatctgacgatagaccctgaaattacagtaggttcccaggaatcatgcttgacacatgcagaacgttttggctagatcagttttagagagcccctgtctgcctccctaactctttccttctctatgtgcacttctttatgttcatctgtgtgaaatttgggtttcattacactctttacctatcacaatataagacccctaatgttattaaagagcaaatgagttctgtttatagttaccaaaccatttatgtctgtttcctcacgttaaaggatggagtaacttcacactctagttttaaagcatcaagtggaatcctttgggtgtttatgctttatttcaacaactacaatatatcaagttctgggatcattatcagaaataaaatcctcagatgatctaggatctcagctaacctatactatagttcataatgcagtatttcctgtttttgttaaataaatgagggagcattagcagcccattgtcttcatgcaaatgaattagtcacagaggactacattatagcacattagcagtgagcgtatagttgtctatgtttggagtgttgctttatgagctataacaggaagtgctgtgtgagagctctgcttgagaagaggcaccgaggcattttcagtcagcgctaaaggactccacctctgaatccttgaacactgcaaggttgaggtctggccttttcttaaaataggttcaaggaaatgaagtaagccctattcaatctgctattagagtctgctcacttttcaaataagtgcctttctgaaagtccagtgtcgcaatttctggtgactcacgggctttgttcctgtttctctgcagctccacaccttgtcatcttttaacctttttcttttcagtgctgtgtatgactgtggaacatagtaattacacattggttgctacactaatttctcaatcatgagtcacatgcagcataaatcgtttgttgtcaggaagttttatttattgaagagagaaaccacccaaagtaaagattccttcagagtatgtcgccgaggactgggccatcttgatgtgtactccactagagaattctaacacagcctccaggaggtttaaaacctgcatttaatttagattcaactgagatatgtagttaacattttctaggtgtcaggcagtgtgccgacttcttttgtattatatcataattaagttatttttaataatgaattggaagcaccattttatagattaactctgtgagcacttccagtgagatatgtgaaggactagtctgaagtatattcaaggatgaaatagatcacgtgaaaatgtaagattaagatataaaaggtttatcagaagggatctgttggttcaactctatagtctcaattacttgggaatctaaggcaggaagagcgcaaattcaaggattaccctgaattacagagtaaattcaggttcatcttgggcaacttgaaaccatatcttcctcctcctcctcctcctcctcctcttcctcctcctcctccttctcttcctcctcctcctccttctcttcctcctcctcctccttctcttcctcctcctcctccttctcttcttcctcttcctcctcttcttttatttgcacacttagaaaagttgtacacagaaacttaacatttgtaaaacagatctgttagggtgacatttttatttttaaaccattaagattgatcgagaaataaaacaaaaacatagtaaaatgtgaaaccatttcttaaaagtaaaaagaggcctgggatgtttctcagtggtagagtgtatgcatagcatgtacaaagcggggccaggttcaatctccagtactaccctccaccaccaaatcaacttttcctctttggaagtttttcttttgggggaggggtgtgaagaaagtgtgaggactcatgtgtgttcccgactgcattagtttacgtgtgcgatgtgagtataagtgtatgtggaggcaaaagaggtctcctggaactggagttaggagtggtcgtgagtcctctgatgctcacatccactgtaactgtatcctttgtaagtgcttatcttagtcagggtttctattcctgcacaaacatcatgaccaagaagcaagttggggaggaaagggtttatttggcttacacttccatactgctgttcatcaccaaaggaagtcaggactggaactcaagcaggtcaggaagcaggagctgttgcagaggccatggagggatgttctttattggcttgcctcacctggcttgctcagcctgctcttttatagaacccaagtctaccagcccagagatggtcccacccacaaggggcctttcccccttgatcactaattgagaaaatgccttacagttggatctcatggaggcatttcctcaactgaagctcctttctctgtgataactccagctgtgtcaagttgacacaaaactagccagtacagtgctcctaagtatttgtaaatggtgctttattttctcagaaaagggatgagaagagatgagagccatgcccaagctttgtgagtacatggcttgggctgaacccagagcatttctgtctaactattgctaggcctaggcctggaagcttccagcctctgtgtaatctaatcttctgcaagcccaggccttgaaggcttcagcttccagcctcccatctactgacctaggctatcaataaatactacagacaagcccactactctaggcctagatatttcagcctctgagacttactgttaaattaacctcccctttctagctctttctgaactctagctggttggttcaacccagttgttctggctcaaactcctcccaaacctgactgattcagaattggttccctgacttctgactgcattgctctgcttgaaaatactgctgcctctgagttccatgagctgagctgcattgagtgcactgaggtacaaactgacgagaactgtacagaactgcagggacgcaactgaacgcaactgcattgaactgaacggcaccaaactgacccaaactgaattctttctgaacctcttacgttgagatggctcagtggtaaagagcactgactgctcttccagaggtcctgagttcaattcctggcaaacacatgatggctcacaaccatctgtaatggggtctgatgccctcttctggtgtgtctgaagactgcaacagtgtactcatatacataaaataaatgaaatcttaaaaaataaaaaggtggtctctcttcctgtcctcgtgagagttgggcacatcctatctgtgactcattctgtcagatctttcactttgtctgcccctaaattagatgtcacacttttaaacacggttgcttcctactacaaactaacttcatcttcgttattagggactaaaggtgtgttgtgttccagctggatcatacagacctagaaggactttggaagtgatcccttgccagagcagccatgttgctggattaaaatgtctctaaaaagtattgatgctgaaacgtcccattttccgtaaggccaagcagccacctggtggcctgggatcacctggtctctactccaagaactggggttccaggcaaagctgtgctgggaattcagactcatggcctcatgctttcctagcaagtcctcttacccactgcaccatctccttcgctccagaccataggatttttaaatgtcacttgtttggggagcaataaaatattaggaatcggatttgcaaagtttctgattttttttttttcagttttcaaagaataacttctttcttcctttctcactgtcaaatcccctatttctgtaattttccctttcttgtgaggagaagagacaatgagtcactactcaggcatagtggtatttgaaaactagacttctgtagccttgtagccctctaactttgtgtcttacagacctcttctaacaaaagataattgtatagttttcttgtatcttttgggcttaactgttttggaagcttattgtgagccatggttaatattaagaaccaagtaagttctaaatatgagtaataaataccgataagaagaacatactgatatagctgtctcttgtgagactacgccggggcctagcaaacacataagtggatgctcacagtcagctattggatggatcacagggcccccaatggaggagctagagaaagtacccaaggagctaaagggatctgcaaccctataggtggaacaacaatatgaactacccagtatcctggagctcttgactctagctgcatatgtatcagaagatggcctagtcggccatcactggaaagagaggcccattggacttgcaaactttatatgccccagtacaggggaatgccagggccaaaaagtgggagtgggtgggtagggaagtgggggggagggtatgggggacttttgggatagcattggaaatgtaaatgaggaaaaatacctaattaaaaaaaaacataatgtgtcttatcaatgaaatgagcttaatgggtaatttgagagatggtgaatagagaagcaattatcttgtgaatttaatttttatttaaattttggtgtgtatttctaacttttacaaatttaactaagtaaacttgcattatttaccgaaaaaaaaaaaagaacatactattttcctcaatgtcagaggaatagatatagtaaatatgttagaaggaaaaggcatgaaggaattcaacagaattccatttagctggggttcctttacattagggaggttcctgaacaaggtattctacttttttaacattgtaactagaatttaaaagttttcacttcctcacacagcagaaggggtttgttttgttttgtttttctctgttgaatgttactaagtgtagatggctaagagatgaggtaaatagaacacaggtcagggcttctcacttctaggccacatagtttatctgtgctcatataaacctgtactataggattcttctaatctttggttcactttatttcacaattcgtacctgacataattgtgtcaacgtgtaagaaagtgtggctgataaacttccaagttgtcagtactgagtcttgaggtatgagtgttgtaggcatgaagccagaccctgaagctgtcacgccagtacagagaagcttccgtgcccgaggatgtgtgattttcttacttcatctctcaggtttcccgattaggttagtttccttcttgagagaagtgacacctatttccagagaaaggcagcagtaagtggcaaaccttgctgttatagggcaagacaccaccgatatgaggctactgaagtttgaaggattgttggcatatagatgtaaagggacatgggctaggagacagatgtggagtttgatggtttaggccttgagtcagtcacttctgtattgtgataaatgtatgtgacaattaagtttaccgttacgtatacacttcattgttattaccttcagaaccttttcatcttccaaactcagactaatcaataactaatcaccccccccccacacacacacccatgaacaatcctagcaaacacctagcctggctgtctctgaaacctgactagcttagaaacccagaatttagtggcttacagcatttgtttgttcataactggcttattccacttagcccactgtcttctagattgactctgctgtagtgtgcactccctttgaaggcctctgccttcatgtcctgttggatgtggtagataccactcaatttgtgcatttatgtgttgattttggttgaattacttgtttttcgtgccattggcttttgaattatatctgtttcagaacactgtttgaaatttcggcagaatgctgtctgaagaataaaatacggtcttgccagtgtctattcccactcaataaaactttgatgcatccattcagcgcacttgtgggcgagcatgctgtgcacagggcttgagtacagtcatacagacatgggagcagccagcgtggacttagagtgtgtatggagaagcagtggagctgcttaaatagtgccaggacaaactgtaaagtcacagctgtattaagatggactaggttgtcataaccctgggaggacattgggccgattcgtatattgaagtggagtgagaagcaaaaggagagtttaggcagaggagataatctactaaggcctccatgcctatccagggagcaagagaaactcaagaggtctagggtgagcgtgagcgtggtatgagcatgtacatctttgcataaagtacttacctgtgtatttccatgcttgtgccatagctcacagatggaggtgtgaggacctactgtgtgtgagttgttctctccgacttatgtgggtctgggtcagactcaggctgtcagacttggcagcaagaattgtactgagctgcctcaccagctcagagtgtgtaaatcttggaagtcaggatgatagagttttttttttttttcccctgtcctttggtttggtaaaatggcacattttagtctgtttgaggaacatagaagatggaagataggtgtgaaatgatgaggctttgatttcaaagagcttagaaatgaatatggcaagtgtgttggatgtgtagtgtacacaatgaatccagactgttggcttttttggggggcggggttaaaggccaaataataattcctggaaggggatgatagcagcagagatgaagagaaacttagatgaaggaaaactagaaacagtgtaatggatatcaggaggaacgggtgttgaacatgcttcaaacatgtataaccctgtaccagatccaagcggctttttatctgcataacatacaggatggaaaaacagggaaagtcgaaaatgaggaattcttgcaagatttggttgtgaagtgtgggaagagaatgtctgtagacataggaaattgtgtctaaggaggaatctagtttaattttgcctttgaggtaggagaggcacggacgtttaaaagttgacagggcagatctttggttgggagcagtatgttcaaatctgtggcgattaggtaatgagtaatgtaagaagtgtaagaagtgggtgggaggcagggagaagaatctcccatcatgattggaaagaataattgccttttgttacggaggggaagagagaagaggatggatacggtcttcagatagacaagagacccagtaggaatccctgacagtgccaaaggccactgtaagagatgacatgttttccataactgctttctgtcctctcttccattcaaaagtgtagctgcttgtgagagctgatggaagtgtctttattcctcgtcagctgtaatgcagcctcctcccaggtaacctgtgtgcgtaggtgaaattaagaccgtgggagaataacatttcttcattaatttcagttccacctctagaagtttggtttgtttaaaaaaaaaaacaacccaggtggtttattataatattattgacacgaccatatgtgcatctgtgcgtgcgtgcgtgtgtgtgtgtgtgtgtgtgtgtgtgtgtgtgtgtgtgtgtgtgtgtgatttcatcttctaaatttaacaaagcttgctaagcctgcattttataaattttaagacagtcttatttactatggcacaataatacttgagggtggggcagaggtcacattgattcctttctccccaccttggttaaaaaaaaattcatattttagttcaaagctgttcaagtaagtccttgctccgttttcccaccctgtcttcagtgatattatttggagtcagcaatcaatggattccatccctctgagacttgcttaacctacagccgctgatataatacaggcaagagcttgttactttatctgaattgtccatcgctaccttaatgagtgaaatggttaagtagaggagggggcgagccttaaggaacgtgtgtaccgtttgagctgaatatttcagcgtatatggggagagggagggagagagagaaacccacttacatcactagaacctcagcgagtgtgaggcttgcaggttaagagacagactacagtgtcttgctttctgcgggaagcagcaatgccgtttgtttcctaagagggatttttttttatttagaaaaggaagctttctctacccaggaaatggctttccttgtgcgttgctatgccaactgcctgcagccatggtcctccaaagtaagcacaataatgtaattatattggtgtattgcattcagactcatgattcttgagattgtgtgtgtgtgtgtgtgtgtgtgtgtgtgtgtgcatgttccatgtttctgtcagtgactccggctagcaggcatgcttgtgttgagtgtgagggacagacatcattaaattaaatgtccatcagtgtcatactgctgagattaattgtgtaaacttggttagtggagtgggacagagatcactggtcaccactgtcagcatcattagcagctagggaggaggtcctgattcacacgctctgccctgatttttttttctcttcctctcttttttttccttggttggaggggtctgtatgtgtgattgcaaatgaaacaagagtgttaacaatgcttggctgaatgctagagactagcttttcaccaccctggctaatataattctgtattaagccttttggaggggagtctgtgtgcagtcagccattttagcttttttttccccccttttcttttgcctcttgttcttcagcctcagaaatgatctcgttctatcagaagcctgaaggctgggtgaggttccctcagccttgtcagagcctccgagggttagagtttcagtgtgataaaaatggagccgagccctgtcgttcagattccttttctgtctacaagtgtgaagggtttttaggctcaccagtagtgacactttaagctgcagcctggttttccctcctccctctttttttttttcctcccctctttttcttttaatttcatgctgtagagggtgacttgccgtcgtgagaggttggtacatgatgtgtaaattcagttcagcatatgtttcttcattatgaaaccactggccgcgcctgctaaccatggagttctgggccagcaggagaagcagtctgtaagtatccaggcgctgccggcatcgtgggctgcctggctggggggcaggcgatgtggggagcaggcagggagttcttttccatggagcgttgctcttctccaggggaagcagtgttttagagggtagagagagatcctctgctcagaggagggagggaaggagggagggagggtgagctacagctcactcgttcttccgattttctgtgatttctgaaaatcttaagcaagaccaacagttcatttaaacaggaccactaacattgagaaatactagacagctaattattatttttttttgtcattagaaaataatatagttttcagtaaatgcccaagcagtttgagaaaccagttttggttgaatttagtgaatcattataagaggttctggcccatgggaatctggcaaggaatgcacgtggaggtgggtgggagggtgggggctctggctattgatttggcaatgaaaccgtcggtggtacacttctgactccttaacatttgttaattggtggtgaaagcacactgtattgttttagtgccacaggaaagattactgctcctttgtaattggtcccatgagtcagctgtgcgattgtcttgctgaaatcccacaggcaacaactgctatttgtgagaaacatatttctgtgtctaactccaggtcagagcctcctgttccgggaatatgtgcactcctgtagtgcgacttttgtgtcaccatgttacaagttttttgccgttttgccagttcatgatattgacatatatatgtgtgcatatgtatgtatgtgaacacatatatgtatatgtatgtgtatgtacatacacacatatatgttattctccttataatgtgctcagatttaggtgggtgtataagcattttagaactgtctccttacatatcctagacctgtacattatggtataggagttagttttaatttattgtaagaattgatgcagtagtgttgaactttaaaaatacttataaaccactaaagccttggaaatgagtaagtaggatgccatggattagagtatttggtttcggttttgtcatcagtaagtgatgagctcttccgttgggtgcagggaagttccttagatgcagtgaccctgaggaggtgaatgagcctccctggcaaattccagttccgtgccttgtccagccctatcctggtcgggttctaggtgtgtttccttgatgaaatctcttcagacctaatctagaaaagagccaccatatgcctcattttccaaaagaaaggttgtcaagcagaactcgcactggagtctgattttagtgcaggtctttggcgcccagctccatggagttagttagagcttccaaggaaagagtagagtgcctcttaatctgcactcgagcgaggcggctgcagagatttagctcagaggctcagaggctcaccgtgcacctttctcatgtaaccgttccccaagtgggaaggggtagcatttaaattcctaatacacgtttaacaatgagaattattaaaaccattgatgggtcagggaagcgacacgtggattttgtgagatgctagagctgttggaatggagagcactaagcgctgcccatcgaccaggaggcagtgctttgtgccagacttgagtttgtttcctaataactacttcacattctcaccagacaaatgaagtgttaggatttgcacccagagctcagagtgcagggcatgggcagcttgggattctgcggtctggctgctggccgtcgtccagttcattctgactgacatgtgtcacttggccgtcggaagggggaaaacagctcaggtcctcaggcagtggtgggtcagcccatggtgataactgcagtggataagccttttttttttccctcctataatgctgtatcataaaaatgtcacagctgacttcagttgagtcacttctaccaaattcaaaaatattttaggttttgcttctctgtacagtctggccccaccccccacgggactgtagaaggaaggatggtaccgagacagtgaaaaccttgtttgagggactcagttaccgtgctttgtaagggtcttccacatcatacaggttttattctttatttcctgcctcactcggtggacatctccgttgcttggcccaaagtcgatgtatagtgaacattcttaacattctcagtgaattggcttttgggcttagcgaaatcttatttaaccttttgagcttttaaaccacttgaattttgtgtatttcctcatccctagcccgtctctgtggggcccattgataacaagaagatagttacagaaatccatcggcccagggctgctttgctttcatgtagtgctttttagttggctgttggaggaatgttgccattttataaatacagattccttgtgagatcttgaaaatagttcccatttcagagatgtgttataaaactgcatttccaaaaccaaccaatcaaccaaccaaccatggtggatactagttgtaaaaattgcaacactgtgttgtttggggaaactttcacagcttctggaaattgggaaagtgtttgggtgggctagagttggaaggctgagccaggaggctggcaagttcaagtgcactatatagtgagccctgtctcaaaaccaaccgaataaaatgtctgctttattcaatacatcagcttaaaaaaattctataatttgagacaactctgaaactttgtaaatccttcagattggcctctttaacataatgaaccatcgctaccatcaaactgataacttgttttcgttttttaaaaaactgtatagaagatattgatttgtgctgtgttttgcccttcctttaaatcatactccaagttgggattaaacgctaggacaaggtggggtacagaagggaatgcctgctctgtgtgaaaggaatggctgaggcagctgtcagtactgagcatttgttgccgatcatgtaccaccttttacagtatcttactgaattcctacagcaaagctctaaaggaaaaggcaggcttgtctttagaagtgaggaaactgaagatagaaggagagggcacacagtacttggtaatgtgcactgaccattgttgtggcccaggctggggtatcttgcattaaacttgcaagcagtgttaatgaatgaaccacaaaagttaaaaaagcactggccttttattcttggcatgcatgacattacgatcaccgttactgtaacagcagtgataccatgctgagatgtacttgttacaactgcatgtatgtaacttggcacactcaagcttgcctcgtccatatttttaaatgaattatctggaagctggagcgggatggcctggaaaggatgtccttcggcccagtttcttcctcctcaccttctgtgtccttgtccctagccccagccctcagctctttctttcatactattgatccaccattggtttgagccataggtggaaaacagagaattaaatatttctttttgttttagaggtgtcatggactttcctgtgtggctcaactaacactaagtgatccttctgtctcaggttcctgagtagcgaggcaggaggtgggagccacttctcctagcttgctgcctaactctttagacataaacttcatatctttagtgtccttagccactccatcannnnnnnnnnnnnnnnnnnnnnnnnnnnnnnnnnnnnnnnnnnnnnnnnnnnnnnnnnnnnnnnnnnnnnnnnnnnnnnnnnnnnnnnnnnnnnnnnnnnnnnnnnnnnnnnnnnnnnnnnnnnnnnnnnnnnnnnnnnnnnnnnnnnnnnnnnnnnnnnnnnnnncccttcttctttccctttcccctcttactttgaatcagagtctcctatatctcaggcaggcagaagataactttgaacttctgatcctcctgtgtgctggacttgtaggcatgtacctcctggagagggaccctgggactttatgcatgcaaagccagcactttaccacctgaactgcatctcttagttagacttctcttcttcttcttcttcttcctcttcctcttcctcttcctcttcttcttcctttgttggcggtgatgtggacatcctctgtccttagcctcccaagtgtttggattacattgacatttttatgtcccttggccaaaaagataaacgatcacttagcttgtattgtctaaattcctaaaaccctttaaaaaggttcccccggccccagtatggatgattttcctctctgctttttaaatttcagacaagctggtctgattttacacagttggctccttttcctttctagtttctcagcttgcactcactgtacttcgcttggcctgacttgttccatctccaattttgttgccactctgtctcagcagtaagaattcaggagcacacaataggtaatgtttaatcttgatagttcttgtaattggtgcttggaaatgggcttggcctttgtggagacatgggaaatcccaccttgaacgagttcttcccccttgtataccatgtgttatgagtatggctggaatttaaaactgtttgtcagctgttaagaatacagagtaaggagggcttttcaaggctggcagaataacatgtaggactcaaagcaagggactgcacagagtgaggatacagaagggtccaaggacagcagactcaccactgttggcatggcctatgttgagagaggggtgctgggtccatgtgtttgtagctgagagctggaagaatataatccaaaggcctagcatgagtataatgtatgttaactagaccatgtttaagaaaacttaattgattaaaaaagccaccagctcctcacagtggcagtttgaccctgtctgtttgcatcgcttagtgtgtctctttaacatcgtttgtttgatacattgtccttaacagtgaaacacagctctagcactaactatagacagtaagttagcactcattctcagaggttaaaattcctcctcctcttatctgatccctattttgtctattatgacagatctatttcttgagatgaaaaagacttatctcttgggaagatttttctccgtgcttgctcagagagagaggcccagaggaatcgagatcctattgtattgttcaaggacaaggtcatcttgccttggatttgagccaagaaaccctggcaacaaattagatctttttagccctgttagaagggaagaaatatatttagaaacttgccaaggcattgcatgtgctgcttacatgtgtgcagttctgaaaaaggtcttttttttattgtggtgcacacatcagtgaaagcttcattattagccaaaggaagcagtgtgcttcgtagctaaagattgttcagtaataatccatttgaagatacctgagaataaaatcaattgattagtaaaaagagatgacttgaattatattactagaagctcaagtaggttttttccccatgatttaactgtttaactattacaggaccactgataataatttcggtgtcttatcttaggtctttgaattactgacaaataatttgcatcaagtgaaatcatcttgaagttcagacttagtgatttatttatttatttatttatttatttatttatttatttattttggtatacttattttttaaatacagtcttccatgttgttttagattacagtctcaaatatcttgttcagataaactgttaagaactcttcttgtgggcatagttcagtggtatagcatgtgtttagcatggatgatgccatgtttgatccccaacttggctcaagagaaatgaacaacttcctgctgttgtgtctttgacaatctgtgtggtttttacagctttcctgttcataccagtagtagtcattatctgcagacttcaggattttgctttgattatgaacttaaaaaggattttaaaattaaaataagttatatgtgatataaacataaccatgtaataagtatgtgtgtatacacacaattttatatatgtgtgacttaagtgagcttttgtaaatgtattcagggttctattaggctcctagttctaagatatttgctctgtcttatctttatgtttgtgtagtgtttgtttttttttttttgttttttttttttttttttttgaggccagatctcttgatatagccctggcttccctggaactcactttgtatgtcagactggccttgaactcaaagagatcctcctgtctctgcctcctgtgtgttggtagcagagacacaatggctggcttatttcttcattaagaaatggtctttatttttggaaacatggcacatgcttgtggttatttatatttacagtactacaataccaacgcttaattaattaccaagcttgagtgttgtatagaataggttaaaaagaatattgcctggtcttcagaatatgaagttaatgcaaattgaggttagtataaattcacatttgccactctaatgcacataagtgtgtgatctaacagagcactcccaaaagtggctttctccaccaggtagggcatccctgtgagctcacagcctttgccaagaggctttcttgttcgcgtgaaacatctgtgccacatagtgctgggttgtttcacactctgccatttctgtgtattaaaaggatcctcaaactgtaggccttacacatagtcatgccatattatgttgtttgtgtgtgcatgtgtgtgtgtgcttgtgcgtgtgtgtgagagaaggagagagagagaaagagagagagagagagaatgaatatgaatgaatgaatatggacatgtagattaggtagataatctttagaatcttacttgatcccacagtgtgtattgggtgcctctcttctttttttacgtgcttcagatggacgttattttatatcaatgtaccagattctcctgtttatcagaaaaactgaaaaaacatgtgtggcatatgtcagtcttatattttattgattgaaaaagtgagggggtgaaatttttattattaagatgatattgtagagaaagcttcatagatacattattgtttttattgacttgatttgatggtagaatgaagcatacccctactatatatgtccatatgcatgtttatattttatttataacagggatatatgtctctttgtaaacatatgtaacccaaaatatcaattctaattgtgatatttagtaaaagctaaagttttgctttattttgagtagaagtaattgcttatttttagtcgatgtaatttgtagggggtgggaaacatgcactaattcttgggataatgctctttattttctaactgctttttatgaggtcttaaaattacagattacagtgggcaccttattatggatcattttcagtaggccaacgtttcactgaggtttattaaagtgtcaaacacagcgccattcttttcacagtgaaggcaggcagtgtaacacgattgtctaaaggcagaggctgtggggttgtgctttggttaccccttttccagaaagaaaagcacatgagagattcttaatctttgatctcaatatttgacatacatgtaagtgctctttttgtgttccctgcctcagagaatcagggggagagcaattgagggagattccggttacctgataccaacctgacactccccacactcaaacatgtgtatatatacccgatgtagacatgcatacgcacacatgaaaacatttgcatatatacccgatgtagacatgcatacgcacacatgaaaacatttgcatatatacccgatgtagacatgcatatgcacacatgaaaacatttgcatatatacccgatgtagacatgcatatgcacacatgaaaaggaagaaaaggaattttaatatgtatgttttgaagaaatgatggaaaacagttaaaaaccaaggatggacaaaagaatcccagttttactttctagagaaaaccatgggtatagtacaggggttggataggcagctcagcagttaagagcacttgctgctcttccagaagacctgagtttggttcccagaatccacaccaggcaacttggaatttcctgtggcttcctgtaagtttaactctaggggatccaacacaccttctctgacctccctggatacctacacacattgggcagcagacataacacacataaatatacacagcatgaaaacaaaaatttctttgtcttgtttttggttttggagacagtgtagcccttggtgtcctggaacaagaatagacaaggctggcctcaaactcaatagagatccacctgcctctgcttcccaaatactgggattaaaggtgtataccaccagcagccctataaatggattatatattaaattattattataaatcttaataagaaaatactaatatgtaagtactcttattgtctttatagtgtactatactataaaatttaatactgatttttgtgctagaccctttttccaacaatatatgtaaaagatgtatttaagggcaagtaatttaatgcatttacataatagttaaacatattaagtatatttgaagcttgtactgtagctttggtctttaacattttgaaaattagccagagtattatatatcattatttatatgacttaaacagaaaggaacttggttaagactttcatttagtattgtaggccagaatcctagcactgggaagcagaggtttgagaagtctgtgaattccaggcccgccagttacatggcgagaccctgtctcaaaagggctgcccttactataggaaagaatacagcatgattttagtaactctttgtgtgtttatacttttgtagttttcttgaagcctgggaaaaattttaaaggtatagaaaatgaacaatacattatcagaagaaagaaaagtgaaattataaatgtcccagctaaaggaaatataggagtggtgaccaccaacccccaaccatgtgccttttaccagacagatatctcattgtgctgttgggcacattcccagcttcctttcccttgcattattcttatttcctctcccactttgaaagaagcaatgatctaatataagtagaagctaaagcagctctctagtggataataaaccatgaaagtggacagtgatgatagttagtgaagtggggtttgctctagaaaaaggaatgtgcttaatttaaatattctttaagtttctccccaataggagagcgtgggttagatcatagctcttcctcattaaaagtggattgttagctgaatgacattttaaaaattggcatggagccaggcccacctttaatctcagcacttgggaggcagaggcaggtggatctctgtgagttcaaggctggtgagcctggtcctggggtcagggatgggggtggggctgaggttgggggggagacgtgtaagtcaggtgtgtttgtacacttcagtagtcccagcactttggaaggctaggtagtatggaggaccataagcccagaggcagcctgggctgcatagtgaaaccttgtgttgatgaaataaaaagccaactgtgcactttaaatgtgtgggtaatcctcaaataagaaaatctgctgataataaaatttccatgtaggttaaagcaatatattttcatgcaagaacatcttttgtcttgctcaacaacactaagataataaaaaatggagagaaattacattttattaccattgtgaagagtttgaatttggtattatttgctttgtgagaaaagaatatttaataatgaagcaactcacttttagtattgaagggtcacctcagagttctaggaaaaaaagttaaaaatagcgtcaaattttcacatctgatgtggtaggttatccctgagtgctggctatcatgtggcaggaagcacatagcaggatgtagggatggatggtgtgtataattgagtagtccacaggaagagagtctggagattcagcagaaatgagggagggcagcccatggaagagatgtgaagggaaactattacataatggattcggggaggcagaagaaataagctgcagaatatacaaagtggcaggattctagtcaagaaggctgttgtatccaaggtaccactgctgttataaggtttatgagtactgttggttttctgggtgcctgatagactcaagccatctctcttgacctggacatactaagctgtttgtcatttctaactatatgtgagcaggtggaaggatcaaacacttgttagcattattgtccttcactctttgacaatatgtatttcaatgagattgactttttctgggggtggctgttaacctaagataccatttcctcccccttttgtgacctagcagtcctttcttttcattgcttataagatggatcctaatttcagagatatgaaaataaaactattttagaatcaattaaatgtaacaatagccattaatataactgcagggttagtttaatgacattcccgtgtaataacggtgatgatatacaggtcgttgtagactcaggtatccagtggcctttccagcttccttggcacagattcagcttgtcaaagaaaactcagtgccagcgtttatttgacttggttatactttcctgattattttgtgttgggacagttggggaacaacaactagggaagcagcagctagggtcccagggcgggcatgcagaataaggccctctggcagatagagtaacagtggaagacactgcctcaaaaaacagagcagcccaacacagcaagtaacagaagctcaggatgaaatagggttgaacatagtttcctcttacattggtttaaatactgtgcagtagtttctatggtgctacataataatgaaataattcaaagaattctcagaaataatggttgcagctcagtggtagtgtttttgttataggatgtgcaggacccagaattcaacccctgaaaaaaaatatgtacctgtgctgtgtgtgtctctggattattattcataacagagactgtactagcatggttgttttgcctctactccaggactgattctctttagtattggtttcaaatcaatttcatatgtgtgctgtggcagccattaccttctcttcagtatgatgtgttattctgaagaatttttcaactctttagaaagtctttggaattatctgagcttgcccacacgtgtgtttctccagagtcttccgtattaccctacttcttagacttgcattcagagaattctgctcttgcttacagtttggacgttgcagttggtttcttaatttgcttccagttaagtaagtcattcaaaaggatttacttttagttatctagcagaaagttttctgagcctgcctggcatagtgaaatataccttgccatgtgaaatataattaaatgaataattatgtccaccctggttaccatttaacatttctttagcccccattaaccatggcacttattttctgggcacctttaaaagcaaaacaaaacaacaacaacaacaccctgaatgatgatggacatcaatcccttgatgaacaaatccctggctgagtgtgccttcacctagatgtagcagagtgacccaaaatcatcgaagatagttgttcttgccctggcttagccctgggctcagccttgattccctgaaagatgtccattgttgatgggtaggtagggctttgtattaggcagcagtagaacacctctttcaagggctgtatcaagtactgcctttgtatgtacatctgttctcactattgttccctactttaagtgtcatctgagctgccataaaaaggatgttgccttctgttatgattggaagtgaagtattttccagaaggctcattcttggaagtctttgtctccagctggtagcacttgttaggtggttggcgttggaactcttactctaccactggatgaataatcccttgatgaacaaatccctggctgagtggacagttaggaggtggggctggattagaggaattgggtcactgggagcaggcccttgagagctgtatcctcagacacttcctccaacttccaggctgccatgtagctttgctccacagtgtcctgccatggtgttctgcctcactgcgcacaagcccagcagaagtggagccaagtgactgtgggttgaactctccgaaactatgtatgtatgtatgtatgtatgtatgtatacatgcatagtatttatatgtatgtgtgcatgcgtgtgcgtgtgtnnnnnnnnnnnnnnnnnnnntgtatatgggcatgcacacacacacacacacacacacaggggatgggaatgtaagtaattaatagaacacttgcctagcataggcaagaccctgagttcaacactacttcccctgggtagtacagaacctcaagaacttactggattctttgtcctggtattgactagttatacagtggttgggcaagttctgatattgactagaattacagtggttaagcaaacctcttgaattttatttcctctacaaaatggagacgatgattatacttgctaccttacaagtgttttgaaaatttttatggttcgtcactctactgagtgcctcataaatgatgatccctaaaaaatattgtcttagggtttccattgctgtgaagagacaccatgaccaaggcaactgttataaaggacagcatttacttggagctggcttactggttctgagcttcagtccattatcatcctggcaggatatatggcagcatcctggcaggcatggcactggaggagctgagagttctacatcttgttccaaaggcaaacaaaagactggcaaagcccacacccacagtcatacacttcctgcaacaaggccacacctactccaacaaagccacacctcataatagtgtcactttctgggccaagcatattcaaaccaccacagatattaaagtaaaagtgggatactttgtgttttataggtggtagcttgtaaagagggaaaatattttaaagatttatgttttcagaagttcatgttctcagagttttcttgcaaacttctacataggtagaggtctaccttaactgtagtcctctacagtccttcatatgtaggcagcaaccccacctcttcttggtaactgtgtgatagtcagggattgtttgcagaattagaactgtttttcacagtctatgaagtgctgttagttacacacatgtactaacatggatggatgtcatccatgacttcctcttgcttctccagctgtacgtgttacctttttcttggaatattgattcggaaatttcgttttggttttggttttatcttttatttttatctttgttttgagacaggctctcactatttagccctggctggccttgaactttctgtgtgaaacaagctgacgttaaactgtggcagtctttctgtttcatcctcccaagtgccaaagttacaggcctgggccatcatgcctggcagagacttactttgaggatagattatgactctctgttggccatcttagatcaactacagttcatttttaagatccttcattaactgctttctgcaaattggaattggttgcaaaatagctcataaaagaatcacagttgatgtgacaaaaaaaatcgtgttaatttttacctaagtacttcaccattttcctcacttattaagtgattttgtacaagtagagctgcttagtaagacctgtctttgtagtcatgccgtgtgtgtttgcaaggaggtatttttagatggtttagctgagcagcaatctgacgtctttagaggagacatcagttcattatgtggatacaaattctatgctttcagcttttatacaccaggtcttaatttaaatcccttcttcttgccttttctagcgaaagagactatatcatggtatgtattctatttcttcctaaggccgatctttctgatttaccttccttagataaatgatctaagtagaacgtttttatttgttctcaacttaatatggattacagaagcatggaatacagggtcatatttaaatgtgccttttgtgccattatgtgttatgccgtacagagctttgctattatgatatgatttcggggatttaaggtagttattatggagctcataagtgctgttttctttgaagaagaagaagaaaaaaaaaaaaaagaaagcaaaggccaggaagtgggagttgtatacttcttaattgtgcatattgcattttcctttaaaaaggaaaaaaacaagccttttgtttggggaaaataatttaatgcagaaggtataagacagagcatgagtatttgctttcttgttctaaacacagtgtttgtgtgacgttaggatgagatcttctgtctgatttttctcaccccactccagtacggagagaaagctctcctggcctatgcatatttgtgtgtgttgtatgtgacacttgttctcatagggtgagaacctaagaggatgttcttggtttactataaacagaatttttcccgctaattttatgacacccagttttaggaaataattcaaataaatgtatatttaaaaaaggacttaattttaagtaaatgttctttattcattttcacaaatttaaaggttgcgcctgctctgtatcagattgttagggttcaagtaaaaacttctgctgttcattcagatgtgctgtctgcgtggtgggaagacccgggagtttagaatggtctagatttttaatacagttatttgatgatatggaaattctctgatattttaatttatcatttttaagcatacattgcaaatataaataactgtcatagaaaaataaatgagttatttagcttgaaagatagacattacttggggaatctgattaatgatgggcatcagtctaaagagtgagttttcattaaaataaaaggcgaagacatttcatgtatgtaattgaaattttagtatgggaaggctctggcataacagtctcacagtatggaggacagaaagaagcactgcagacagcacatctcttttcttttttttatataaagaaatcctttcttgttctgaaaaattagtgttgttatgtaaccatttaagaatgtatctgaagcctgatgttaagtgagtcagatccagcttcccaaggatgcttctttacagtggaattcaggggcttgccagattcctgagccatgacttcattctccaacccctccccagatttacatgcactgaaacgctgagaaaccacacagaagcgctgatgccaaaccttcacgtgctgtgatggaactgtccatatcttagcgaccaacttccgattgaaacttttgtatcatcaaagcaacctgaatgctccacccccccccccccctgccccaacacacacacacacacacacacacacacacacacacacacacacaccgctgccctggtttggagtctcctttcagtttcctcagagtatcagttgttccttctgagcttgtcccaacatcagccaacccagaatggcacctgtgtctttctagcccagtagcacagtactccactgaccccacctattgcctgtgctccccactcgcccactgcagcaccttcctggaggaagaaactttcataagctccctcttgctcatggcctcagggaatccttcaggaattgagaaaattgaacatcatctcataagtaaatacaactttatggccctggtgaccagtcacccggagaggaggcatgtgatcatgagaggttgcttcttgtcagtttcgttatacaggatcgtgtatgggagaatttggaggtgcctgttccaatagtaactcatctcttcttaccttgcttaactgtggctgggagtatgagtctgctcatttcagaattcctcacagatttgaactgtttttactgaaacataagcttctgtaagtcggacactctattgccttctccctccttccatggtaatagttattgttcaccttgtgattaagcatgtccctccttaattaactcatacgttccctggaggctgcttggcatccctgtggcttctcccttttgctctccagtttcccacagttagtagaaacactagagcagactttgtgtggttgagcatatagctgatttacttggtgctctttgtatttggtgtggatcagtttctcttgatactactctacaatgggatggaaaggatcctgtctcaggaagcttgctggtcctgttggtacccttgaaagcactgaagggtgaggttcatttgtaaaggcatagcgatgtgaatgggactatccaaccccatttgtactttacaaactccaactatgtttctgtattgggggcagcacacattccccagcacgtttagaagatcataagtgcaggtttagttgtttaactttacttaaaaatataagtgaactcttgttttatatttctgtggctttttaattttttttaaactgacatgtgtattcacacacatgcaactttgaatcaatgctttagctcaaaaggaagaacaggctgagattcttatcttctgttaacattgcttaattcttgaatcttttctctttcacttttgagattataatgtaatgacatcatttcccccttttccttccttcctcctctgatcctcccatacactctcctcgctttctttcaaattcatagcctcctttttattaatggattgttgtgcatgcatatatgcatgtgtgtgtgnnnnnnnnnnnnnnnnnnnnnnnnnnnnnnnnnnnnnnnnnnnnnnnnnnnnnnnnnnnnnnnnnnnnnnnnnnnnnnnnnnnnnnnnnnnnnnnnnnnnnnnnnnnnnnnnnnnnnnnnnnnnnnnnnnnnnnnnnnnnnnnnnnnnnncctagatatatcctgctcagtccgtgactgttacttgcctgtacatttcagggctgagcctttggcgttggacatccagctggtgtgctcttccctgggaaagactgtttctcccactctccgcactccttagttgctatcgttctttgagtagagatgaggctttgtgggctttctcctgtccacattggcatgtctgtctgtgtcatactcgttacactcatgttggtgagactgtgggtatcacttctgacatcagcaggagacacattctcacagcaaactacctgatcctctggcccttaacagtctttctacctcaaagaatctatcccttatggtatcaaaatactgtcttcctcataccgtcatcttgatcatcatcatcattattaattaatattattatagttttatgtgatttcttgttaccatagcttcagagcggaagcctggcccagcagttccaacagatgagcggaggccatctatgtcagtggttgtcagtgacagagataagtcatggggaaaagcagaaaccatttcaatcagtgcattggaaaagggggtctagttaatctaagtttgtctttaggagttgacatgagctctagatttatgaagagaactgaggtagggagcgagaggtatgcatggtagtcttggtcgagtgcggcctggctgatcattatctcagttctgactctcctgacttcacttgagagcagttggttgtccagggtgtagcctcatcacagtagctaagtgtcctcatgcatggcagggcctgtcctgggaagccttgctgatcctgcagtctaaggagactttaggacctcggtgccttcggttttgaaggggggtgagacaggttaagtagacagactcccccagagtctgcaaaagtatgcctgtacgagtaaagaagcagactgacccagagaaaaggagaagggcccagggagagcagcgttctggccttgcatcctgcttagagctgttgtgtaggctagatgtggtgcagaacttcctagctaaagcagctggtgagtgcctgttacactgctactcactctgctctcttcttcgtggcctttgtctgcttcacagaataggtgtcacctcagggctcacctgctaactgtttgctttgcctagaaatcagcatattgcccgtatattccggactccttactcagagattgcagctggtggtactgtcctggggtgggggtgaggggtgaggagtgggtgggtgggtgggtgggtgggggtcagttccaaggtctttctattacacttgaatnnnnnnnnnnnnnnnnnnnnttacagtcataaagtagtaatgaaataattttatggtgtgtgtgtcgggtgacaccacatatgaggagctatatcaaagggtctcagcattaggaaatttgagagctactggtctggagtgtaaaaagccatggcataaatatttatggaagtccttgagaggtgaattaatagaaatataaaagttgaggtataggtaaacattgataaatttagattcacagatacttgtgttatatttataggaagtgtattttcccttcccctttgtggcaaaacgtaaatagaaatgaaggctaaagggcagaaatagccagcaatatcagcaactcaccattgtacatttacaacaataagggcaacaaaggttagtattgtaggctattgggattttgttgcaagttctagatactctgaaaaataaacattgtttaacttgggagcaaatcgtttctatattcaaaatgcttaggaatttttaggttatatgaagttttagaattcagactttcaatttagagagactgtaagtatggattatttgagacagcaaactgtcatagaaacttcagtatctgagcctatgacagtagtgatggtgagataggaaactcaggaatttgttgattggttggtggttggttggttggttgactggttagagatactgtggaatcatattttctcaagttatgcactgtcttcttcagtgaagtcacctcacagtgtttagctctatgaatgtgcatatatagcaaaattaagattagaatactattaatttttacatacacaattaacataattaacaatgaattgtgagttactgcatccttttagtatttttaaaagaaatattgttttaaaaggtgatattatttacaatgtagaaattttgagtcctatttaaattaattacataaaagtataacctgaactctagtgttaacaatgctgtacatcagtggtttagttccacataaccattccttcaactaaaatgaagagatagtgatggatcctagtgggcctggccttgtgattttatacaacttgctttggcctagtgttccatgtcactgggtttctttgtgccagccctctctgtattcttacaattccatggttggttgcagaggctagatctcttgtctggtacacactggtgaggaaacatgaaagtgatttccagccaacctggaattatcttctacagcttcacattagcctgtgggctccgagggctgactctgaagatgttaggtactgatcaaaccaagtgtctgaatttgataaaataatgttttatagtaattcagaattctaattggaccacccctctgttgccatctgaaagtcaggaagttgaaaaattgtaaattctagaagtttcattcttaactctgttgtccttgctgggaatacaagtttattgcttacctgtattgcttcatttcttaaaggaagagaattgcactgctcttgtgctgtagaaatcattctgttgtattttaatggcgccacatatgattgctggtgagcgagcagcaacagttctcgggaagagaacagtggggtcaggccaccatggtcagcttctcccaaatgcaaatttttggcttcacactagggctgatgttttctagggcagatgtgttcactggagacacatccagcaagagaattgcccgttacattagcagctgctatatagggtatggacgttctgtgatgggcaatagtctagaagtcacaggagcatcccccaggaacttgtgacttgaggtggtgggagaatgagcacggagattgagcttactcatccaggagcagggaatgtggacaccagggagaggccctgagtaaagtggttgaaattatctaagctaactctctatgcacccactgctgagactgataggaaaagatgaggaaatgatcaagagaaagcagtgagatgagactgtcaggagtgtgctaagtattaagtattctaagagtagaggaagccagtagaagataggggaataccacgactgtataggttttctatcatgtcttcaaggtttgttctgactacagcatgcagaaaagataggaagggatattaaatcattgagagaggcaaacaagggcagaagctgggcagtggcctcaagggactggagtgccttctaccaccccagcagagtgagtcccattttatagaagtcagtggtttatacttaaagatgtttcatggtttttagtgcttttgctcgtgtgtgtgtgtgtgtgtgtgtgtgtgtgtgttttgtgtgtgtgtgtctgtgtcagtatgtgtctatgtgtctgtgcacacatcacagattacatttagtccactgttaagcgtgtacctggatgaacgctattctgttctctgatgtacatctaggataataaattaatacacatatatacaggaaccagaaaagttcagagagaagcagaagctgaagaaagcagacccagctaagcagtgtaataaaacattaaagggggtattactttacaaggaatgtacctaagataattgctcaatttattatgtaagtaaatctttgcaaatgattacagaaggtcatgagatacggtggggcactggcagaagaaatagtgttaagggaatatgatgtagcgtgtgcttgactgcatttcacttgtgtctagagaaaggaaaggagaagaaaaagaaacatgtattctttttcttgcagttttcaagcatacattcctactggctttggtcactgagtaatacacataaatattcagtcagttctcagtgcgcttcagacagccaaaactgcagaattctctagtatgccaggcttgatacatcaagcccccagaaacaaatgtggaattaaatggcttaccatcttttgaaagaaatcctaaaataaacatttttattcactataaagtaagagaaaaatctgaggtgttagattaataaaagtaatatatagtatttttcttgttagcaacttaagtagttgtgaacagagaatctaagttgtctcttaagataaaggaaagcatgtgtgggaacatgtatagaatttgtatctatacatgaaatagagatggtaaagattttcagttcataagattacttaagtcacctgcctgtcagccatatgttatgatagacacagtttcacagttgaatcacctcatggtgtcctttgcttttgagtcctgggattgaaggcatgtgctatgcccagataaaactacagttttaagttgaatgaccttcacaagaatttttcatagacaagttattacatttctttggcttaatgatgttgctagacttagctttatataccaagtatactttatagtaaattctgtgtgtaaatatgtgaaaacctatgttacatacatggtctgtgtttgcacacatatatgtatgtgtttgatgaaggtggtgtgaactcttcatggtatcacatgtgaagcttgtcactgtggctatgaagttactgtctgtcacatcagccatctttaccattgccgaaggctgtccttaccacattgtgacagttttctcctttaagtatttgtccccatgtaccagttagattcatgaacgtgtggcatctgctttcctttttttgctatagctagcaaacccagccttgaataaatatttgaccacataataaactgaataagcaaatggactttagtatttgtctaatcccgactgaacatgatcctatggagtgcttggcctgaatgttaatcagagctttttccgtaaggaagttaaagatgtacaaaatttcattgtgttaaatgcatcacaggtagttcatgaaaataaggacagtttttatgagttcatatatttggttttaccaaactgaacaaagtatggtagcttgaatgcaatagaagtctgttatcttttgtgtaaagtccagtgttctggattgatgggcattccttgcgttaagcaccgattgagagttgctgttctcctttaaagcgtgtggctctctaagggaaggggacagataacagagggtctttggggaaattgtcatcagtaaagtatagaagtggcttactctcttctgattattcacactactaaagatttcagcgcataacacaacatctgttttaactgtatgagaagatgggatatgtgatccaggtgtctgtggaaagagggcatcagtgactacctagccagtctagccattgcattgtatgtagacttaagtacgtctgtgtgcatgtgtaagagagcgttaagaagttcaaaacgacttactagttaaggcgtttcattctgtgtgaggctttctccttaaactaactgcagttggctccctctccctgtcaaccataggtcaaaattacttgaagtgcaaaattataccttcgtggaatatagggatattttgaggtttttatttcagaaacaatgcagtgtaacaatatataacatctgcattatattaggtacaaataacccatctctaggttatttgttcatctaggcgaggatgaacagccgagtccttaggagtctttctctgtgaatttaagctctcctttcccgaaccccacactccactgtgcattctcatctgagataactaagccccattcctctgaggctcatcaagcccgctgtgtagttggttctagaaacggcctgcagatgttaccatcggcccctccctcttcagggattactgattccatagcagccatcatgggagctctgggaaacaagaggctgataagtcagacttgctccttgtaggatgctactgtgttccctttgcccaggcgcacatgccatattttgtctttggttcagtaactggcttgtgtgtagtcatagacatatggagcctcttacctgggggctttggagaagaaacatgatggtttgagcttccttgtctgcagcagtgagggggcagcacctgagctcctcatcagtattcgatcgaccagtgaggtgccagcttgccaatatgtgcatccacagtaatgaccgtgattgccactaacatttagagacatcagacaaaggagctagcttatggcttaaataggtgtcatgctaaccaggtgattaaaaaaaaatctgtataccttttacttatgtagcatgcatgcgtgtatgagtgtgggtgtacacgtgccacagtgagagcctttcatagctctctgcagccaccttgttcgaggcagggtctctcttgtttatgccactgtactgcttgctggtaagcttcctgcagatgctctgcctctgcctctgcctctgcctctgcctctgcctctgcctctgcctctgcctctgctctgtctctgtcttactctccccataggcatactgggattacagatgtgtgccactgcgtagggcttttcatgtgggttccgggggattgacccggtaggacctccatggcaagcacttctactgctaatctgttccccccggcccacagatgatttttttttttaaatcctatgtctgccattagttgccatacttctttttccttttatgaagcaaatttggagtttattaagaagatttaagtatgaggagaagggaagaggaagggaagggaagcagattcgggcacagaggcttagccatctgggcttcttgagagagtcactctctggtggtcatacttgtcatcaaagatccttagactacatgacccagaaataatttggactcaggaatttttgtttattgcataagtgcttataagaaggagaaagtcagcgttagcacgttagccgctcgtcccccaattttcagttccctatgtgtaaaagacaaggttttgcttccattagaattaggtaccgtagaaagagttatgtgtctcaaggattattattatcattattttgtttttatttatgtagttaatttttaccttaaaaaaaaaccctttaacaaaaatgtacttctccgtaaggaacgtaaagcaaaagtgggccccacccacggggttgaatgacaatcgcagagggcgtaagggacctggggaagttcctcacagttagggtgtggggccttcaaagtgcctcaggctgcctctgtgtcatcagagtccctgcgagtcgcgcatgcatgaagtttggatggatttgttgtaagatgcgagaaccgctaactttcctctgttttagtttcttctatgtcattggcttcccaagattgttgtaagaattaaataaaacaacatatccatatgctatcgcttagaaaagggcctggcacgtagtgtccgtagactgtagtgcggtctcagttcctgggtgggatttggcagttgagactatatggcactgaagttgaattatgcatgctgtcattccactgaagcacctcacttttctctctgagctggtcttcatccacacgttcttctacccaatgcttcttgccagcctccaatagattcccaagtctttgcttcagagtaccagtcttttatgactggggctgctcttctatcagcttactaatttgtttgcttcagagataccagaaaccctgtttgtgttcagttttgcccccaccttacaaatgtaggaattagagtttagaagagttaggcagtggagtgggggtgttggtaaagctcttgcctagcatacataaagctctgggatccatcctcagagctcacaattcagaagtcaagaggtggggccatgaggttgagcagttcaaggtctccttcattgccgccgagtgagttcaaatccagcctggactacagaagttgccctaaagtatgttgtgggggacatttgcccagcaatgtaaccaataaagtttataattctaaacttaagaacagtatgaggatggcctttttgctttgggagaaagctcctgcactcatgttgagggtcctgtaccctgaatgattggggccagtagtaatgttgattttggatcttgtaggtgtggtgggatagggtggggatgtttccatatgcataataagataccttggatccaagtcaaattatgcaattcattcatctcataggtgccttaaatagcttgaaagtgactttacacaatttctttagcacaattttgactaagatatcacacaaggtcagatgtggcattttctaccaatagagctaggagtcccccaatttccagatattccaaatcagggacaccccaacctatccagcatttcaaggttcatgcttagacaaaaagccactgtaatacttttgaacataagccatgccttatataaagttctatttgctcctaaaacactgtaacctaggaagatgatgaactgataggatagagcgcaggccctcttcagcctccccagtggcatttctgttcactccatctgggaggcagatctctgtggttagatagtgtatgtctgagtagatatggatgtaggcgtttacaatcagccatcagaaggctacacacccaaagcacagactatgatgttcatcattttgaaagaattctgagcaatgaaaatctgagcatttatttaaagaagtggtcattgaatgattagcctatcattcaagggatgttcattactttgcaagatttgctaagcagtgagctccacacaaacatgatttatcgagagtcttttatctagacttctgggagccagacagtgtgctagctactagactaatagtgttagacatgacagcaacctgtggtgctaccatgagtagagcaaggatgagcaagtcactgaggaagcaaggaagatgatttcattacatgccattcacttcatagaaagcacaagctcacagagtctctagacttaagaggttggcaaacagacagggtaacctgtatgggtctattggtagactatgccttttatactcggcaggaagctaagagggttcttaggtcttacaaactgttagtatcttcacgattcattacaatgtccatctatttaatatctcatgatacatgtgcacttcctccccttacgtatgtaagtaagcaaaagaaaatttacattgtgggtttggatatgtgtggccaagcactttcctagcacgtatgagtttctggattcaatacccagcactactaaccacctccctgccccccccccccaaaaaaagaagaagtcttacattgtacaaaatcatttgtttcctttgtggaatattgacaatgaggcattcagagacaggtttatagctagagtctgggttcagcacttgtcgaatacttagaaattattattatgatgaaaaataatgtttacttttcctggtattcttcaagatgttatctaaaaaataaaaatcaatgatattatagactgacctttagtagaaacaggtcaaagaaactcatgtgcacatagcaaggggatgggttttgagtttattttgtttttgttggtactggggttcaacataagctaggccaccactgaaccacacacagctctctctctctctctctctctctctctcttctctctctctctctctcttggttgggtggggggtgggggtactcattaaattgcccaggttagccttgtactcagcttgtagctaggcaggccatgaatttgtagtctcagcctcagcatccaggtctgcggcaacaggatcagctagaattgcttttaaaacctgagctcatatcagaagggttctgtctatagttaagcattttctaaattactttgtgtcacctctagccttagattttgccacaggttttatggcactgagatgtgcctatgcagggaacacatcttagtgatatgtgcaccctcatttatctcctccttataacacagccgggtcttcaagtagtgaagaatacgccaggagtggtagtgctctcctgtaccccagcattcaggaaccggaggcagtaggaacttaaacttgagatcagcctgagttgtcctgttagattctatctcaaaaacccaaacagcaaaaacctgatggacgtgtgggaatatgccgttgtgcttacactcacacctgggagacaagcctagtgttacaccagttcttcctctggaggtataaaaggtgagagcataaagagtgttcacgaaactccagtgctgatggggataacagatgcctttgggtaaactcccattggtatacttggtatgcagctagtcattagtcactaacgattgattgacctgactttgcctccctcgggttgcactgcttgagaaggctggatagatcccagccgtgtcccaagtcttgtgtgctctattgcttgaaacagagcagttctaaagttagttcagagaatactggttaaataaaattgagttgatatcatttgaattcgtcctaagatgtgatctgcattatgaagtatgaagctcatatctattaatagaagcccccaaagtgtttcccagctggactgtgggtccgaggcatagctgctcagctatttaccaccccgggtttctccacagagaacaggaaagggaaggaaggcagctcactgtcaccagccttaggaattcttctaccagttctacagggtcgtagtgatgtttcaaagccaggatgttcctgctcattatatgtgtgttctgagtagaggttattaatgagtaattttacaaatgccagctattaaattaacaaatcagtgatgatcaagtatacctactcatgtgtaaggtttaagtcctggagatgctttttaaagctagctctggcagtgtccctgtttgttcttaataaaatgaaggcacagagggtacctaaagtttcatgcagctatgattgctgtaggtttttatttatttaattgacatttatttctatattgaatgtaaacctaaggttaagataatctgatttaaatatatgtactatatttctggttttaatattccttaaatttttaaaatgtgtgtgggtattttacctacatatatgtatgtgcaccatgtacatgccttgtgcctgtggaggtcagaattgaatcagaattggattcactggaactatagtcaaagcaggttgtgagctaccgtgttggtactaggactcaaacccagacctcctagaaaggaggccagtgctcttaaccactgtgccatttctccaggccctggtataagaatgcttgtttcttatttatttagccgtgttggtggttaagctgtggtccagttattcatctcatggtagattataaaaacgtggtctaaccaggatgtgatcctgcatccctgtaacccagcacacaggaggcagaggcaggcgaatgagttccacgtcagccagggctttatagcaagaccctgtgtcaaaacaaaacagaaaaagaaaaccaaaaaacccaccaaacttccaagcagggagggcagcagaaaagccctacagtaatctgctgtcactgtccttttgggccaggagcccaggtcttgtgtgataagaatctctacgagttcaaggccagcttgttctgcatagtgagttccaggatagccagagctacatagtgagaccctgtctcaaacaaaacaaaacaaaacaaaacaaaacaagtgtggtctgcagtaatatattcatttttaggattataggattcttgatccatgaaaaatttgagcagtgatatattcatatataatcactgtaatatatatatgcaatatataacagattcctttgactagtcttactaattaatttctcgtaagtatatttgtgttatgattgaaatgctgggccatgattcactgggtaaaggtgtttgattccagtctgacagcctaagttcaaaccctgggaaccatttggtggaagaagagacccaactgatagaaatttcccactagcctccacaatgtgctctatagtacagacatagccatatatacacacatatatatgcataaacaaataattaaatttaaagatcagaatgcttaaaataggttaatgttttccttgtttctttgtattggttaggtagtgattgtgtacactctcaggttcctaacctacccccaacccctgtcagaacttcagacttacagctgaagtcatgaggaaattcctgataccattttaatatggaagtctattacacagtgcacaaactgtacaagttagcactgggtcaatctgggagcagagcaaaatcctgagtcttgctgtgagagtgttccattttagaagatgttagtttagacccccagtgactctccccggggttccagggttctctgttctggaagcctggttggagcctggcgcttgcgcctgtcagcctcagtactcccaacacccacacttcgtcattttgtttgactcttaagaactctcattatcccagcagcctctggctgcttttccatcaggcatggtagggccacaccgatacacatcccactgtacctcacatgggacaccttttgtaacatttctataacccttctatgaccttgatccaaacttatactcagcaagatttaatatggcaaaaaagataattttaagtttcctaaacagagcatctgtttctgatgtaaggaaaagttaattaccgtttactctgtttagtgtatcattgttttgtgctcccttccacggaacacagatggtggggaaggacttaaaactagtatggggactggggccactgctcgttaacacatggcttgatgattctgggttagcggaggtcccagtttggattggagatgtcttattcctctttgtagttcctgctcctagccgaacatctctaagcgtagggaagcagtaaatgcttgttaaacggaaccgaattggtgagaacaaaactgtttctctctctgtctccagactattgttctgaacttagggaaccatttagctatgataccgagaagatgggcagacatagttgagtccacagtagcatatagaagctggacaggtctctcctgtgaaggattgagctctgaccacttctaggcttttctacatagtgacagacagggagggtgtccagggagaggagtcctgtgagccttgtatcatcatttagtgaggaaagatccactagatagttgtaactttatttgttgttaatctttacatttttcacgcggtacacgtcagtctgagtcatgtctataagtgaccaccactaggtttcagttacttactttgtagtcaccagcttggttctcactgtagagatgcttacgcacctgtctagtatctatagagaaactgttattttcctaagtcgtatatgttttacgtcttcggtgatcacacttggtgagatagttaatgttcgtgatgattttagtcactacttctctggtttctatgaacataggaggtttttgtttgggggttggcttttttttggtatctaattgtatgccatgtactaaatttatttttaagttttatgtactttgtgtttcaaattaaaaaaataatacttgtaaacagacttgaagctactgtgaaacatgtgtgtgtaagatggagattgttggcatggcggcaagtctgaatggctgtggactgtaaatccactttgctcattgagtaaagcccaagggtctctcttggcaagcttattctaaactatgacagcattgcatggttttggagaggggatgagagtccaaggagggactggaatgtttctaaggcaagtccttactagattttactagctaaataggatcagaatacagcagcaagaagagaatattatggttgtcttatgataccagctagagtgtgctttctaatgcattactagtcgatactattggcataatgtacataaatctagtatttattaattcaaaaggattagccagcttggtatgttttctaatgtattactaatcaatactcttggtatattgcacagaaatgtttcttttttaaatcagttcaaaaggattaaccatcctggtcataacttttaatcatggtgctcatgaggtataggccagagagtgtgtgtgagttccaggccagtctggtcttcatagtaagactctgtatcaaggagaaagtgggagagggaaagagagggggagaagtgactgtaaaacagagtgcaagattctagacctggcagacttttcctcagctcactaattgactaacacactgtcagacagaaagggtcagtaaacagttgttgaatgcatagtgctttttctcttacatatgaggtgtgtcagaaacatttgagagatgtttggtgaaatcttctcaagaggtggtttctgtgtaaagaagaagaataagtgagtgggtgtgtgtgtgagtgtgtgtgtgagtgtgtgtgggggtgtgtgtatgcgtgcatataggtgaacgttgtctgtaaacaattaaatccaagttcttagaaggtgttttatattttttcatataacacagtatcatggaaatatgattcagtgtttccaagatgcttgcttaaaaaagtaaaataagagcttttaaacctggtttgagcatgaatgaaccagaaatctgtttgtttccttagctatttaaaattattgctacaaagttgtattggttggtgattgctaaccaatagaactagagtgatttgttcatttatttgttgcttgaaaattgtagtttaccatattaaatgctcatccatgtgtctcaatcatttcacctacctatgtagacatgtaatttaatatcatatgctcttaaactttaacattttgtgacttgggttaataggacaatactgaaaagttttttgaatttgtaaatagaaagatattttctaataatattttgattcagtgctttgcagcagggtatggtatcatagttctaagacatgtcttcttgaagttcttgatagaaattgtaagcctccccccgttttttctgctccttctacagctccctgcagacttcacaaaactgcacctcactgacagcctgcacccacaggtgacccacgtgtcctccagccattcaggatgtagcatcaccagcgactctgggagcagcagtctttctgacatttaccaggtatgaagaagggcctttcgttcccatctgcttcatggaattgggaaattcttagagctcagacctataaagtagatgatgtatgtgcacgcatcaggcaagcatgtggccacgaggtgttgtgtatgtttcgcaggctttgcgctgctgggtgtgtttttggaagcatctctacggctgcgctgttaccagttggcagaatgagagtgctgatgagggagttggttctcggtactctaaatgtttcattcattcctctgtggacagttgctatagtctgactcaactaaagagctgcagaattatcattttatggtcatagcaacagacagaacccttttttttccccctcaaaagtagtttattttagagccaaatatgagtgactatggcctgggagattccgatttcccagttggtgctgagtaaaaggtataaaacctgggcacatgcagacagtacaggcatacatagcggggcagagaggcagactgtgaaagacatcaaagatcaggtagcttctgtttccgttttgttgttgttgtgttgtttttttaagaaagggtttttgtttgtagccctggctgacctgaaactcacgctatagaccagggtggccccaaactcagagatctgcctgcctctgcctcctgagtgctgggcttaaagccgtggctctaaggatattttgggggaggggggattcgttgtttcttgagttatccgttgactattatatgaatgaaaaaaaatttttttttttgaaatcgttttgaaaggaaatccttatcaaagtctatgtatatgatattaaattttatagcttaaggaaacatttaccttacaagtccaatgaatgttgtttatataaacaagtaacattttaaagttttcagaaacattttatggacccaaagttgtttttttttcccccagtagcttttaagaaattgagaatattcacatttgtaaagcagtatatgttttcagatctttttatgtatcaccaaaacacttaaatttacaaatttatacacaggcattttaatgagacatgccaaaaataaattaaaataattatttttagaatgcaagaaaaactaatgagaaaaattgaagtgaccacaagttttattgcatagctcttctttggaaactccatacctcccaaaatacatatgaaaacaattatcagagactcacataatagagttacatgaaattcaggtatacccagaaaaaaataataaacagttgacattttaatctccttgtgatttagcaagattctgtagcaccaaagatcaaaagttgatgtttgtcctgtagatttaaggctgtgtcttctgctgttgttaagagtaactagcaatggagtatctttacttataaaaatgactttctcaatgtcttaatttacactaacactaaattatatttcccatgcttaagcacaagggttaagaggaagaaagactctaaagaagaaaaagcacatgcccaaatgtgggtatggacttgccaagggaaagtgctctttacaaattttaatatagtaaggaatctcttttctctctgactttatttttaaatcaggccataataatctttttttttaaatgcattttgctctgttgggagataaagaacagaggcaagctcagagaaagggaggaaatagcacagggctgtcctcagaacttatctttcgttcaagtataacatctaaaaattgttacttgattttgttttgttttattttgttttaaaaatgatgtgtatgggtgtgttgcctgcatgtctgtgcaccatgtgcatgcagtgcctgcagaggccagaagagggagccagatactcagggactgaggtaaaaacttgcttgttttgtaggttccaagaactgaacccaggttctatagatgagcagcccgtgctcttaactgctgagccatcgccttttaacttagatgtagtttttatgctcctgttaaattttataaattaatgattgtatttgtgctttttagatgttttaaaattccaattaaactggggtgtcatatatatatatatatatatatatatttgcctaggattaacatagtaaaatggattgcagatagtaagtgttcccccagaaaatataaaacccaagttactttacttttagatttttccatttttctaatatttgcaattcgaattaacacacttcccaaatataaaatcaggtgtagtaccaaaagaaaaatctggttttctccaaatgctcctctcttctctgtcctagttagaatcatcttcaagttggcacagcctgtaattgagtgttaattgagtaactgtctctatcagagtggtctgtggacatgtctgtgaaggattgtcacagacatccttggttcctaattgatgcagaagggcacctcaccattccttggccaaatggctctcagctgtgtaaaaatgctaggtaactaggagctgtgagcagccttcctccatggccgtctgctttgaggtcatgttctgacttccttctgtggtggaccatgaactggaggtgtaagctaaaacccttttactctccaagttgcttttggtcagagtgtcttatgacagccacagaaggaaaatcaaaacaatcccttaaattaatacatcaaatgctttcaaattgatcaaacaaacacaaatggataccttaaaccagaggcttcaaaagcaatcctgacccaataggatcataagccattgatataaacagatgggccctcagccaaacctaggaaagccagactcccagaaagaaacactccaaattcaccttcgtaggtaaccttggacacaaagggcctgtgctgttgtattggtcgctggctccgattggggtgatttcctcctgtgaaaacatcgttttggggctccaagttgagtaccttaactgctgacacaaaatcagctctcacctaaaagggaataggagatcatgttagagccagatataagtgatcattggccagaaacagattcaggttacctcaaatccatgttccaatattgtaataatcgcataaggttgtatagtaacagaataaagaaatcaagactatttttaaacacattggtggaaacacagggtagtcaggttccagaaaagtgaggaaatcttacctatagctctgtcctggatagttttgtgtcagcttgacacaagctaacgtcatccaagaggagggagcctcaattgggaaaatacgttatcagatggggttgtaggcaggcaagcctgtagggcattgtcttaattagtgactgaaggggaggcccagcccattttgagttgggacaccccttggctggtggtcctagattctataagaaagtaggctgtgcaagcaaatgggtagcacacctccatggcctctgcatcagctccttattccaggtttcctgtcctgcttgagttcatatcctgacttcccttcagtgatggactatgatatggaagcttaaaccacataagccctttgtcccttacctctgcaagttgcttttggtcacggtttttcttcacagctgtagtaaccctaactagcaaggtctacggtgcatacttagctttttagttgttggaagctagtgttctgtttctgcatgccaaaggatttacctaacaggcagaaagatgtcaggtcacgtacagaggcaggtgacagatggctcctagggagccagagcgtaaagcccaggtcggttggctctggacttgcaaccttccagcatctctatcattgaagttctgatcagctttgcaaaaggttcggtggaagctgttctttctaggaatgttggttcacagaaatatttccttattaaaatatgtattgaatatggcaaaacaaaggtattaattaagatcaagccattgaattgtttttcaattaatatattttgttttatgtttaaaatacatttgtgtatttatcgggtacatgcatgcacatacacatgtggaattcacaggacaacttgcaattgattctctcctctgggatacaactcaggccatcaagcagggtgacaaatgtcttaatctgctaagctctctcaccagccctaaagtaaattcttatgcttcggatagctggaaaagctgtaactgttgagatttaaaagatttttgttgtgactgttatttctctcacacacatattctctgtgtctacctctctctctgtttctctgtctctctccccatgcctctctccctgttcatctccctccctgcctccccttgtgtttgtgtgatatatatatgcagagaccagaagacactagatcactagatcctctagaactagaattatagaagggtttttgagggaatactaggaatataattcaggttctctggaagcagagcaagcattcttaaccactgaaccacctttctattccatcaaaaatatttctaaaagcttttttttttttgcttttacagagatcattttgggaacgtcatgcacattccgttaatactgtgtattatgatttcacacaggagaaatattatgctcactttacaaagtatcttgcttggctccttaaaaattgtcacattagatgacaataaaaagtacctttcttaaaaatactcagaatcattgatatgttcaggaaaattcttttcttttttaattactaaaaataagtgaataattgcaatactgtgtacaggacattcaaatcctaaatttaatagatttatgaaataaattttctttttaaagattaaacacaaacatctctgtaatttaatggccgtatagagacattattgatatgttgtgttgtatttcaaacaaccaaaaacgtatttttaaaatgttttattagtgacaaatgccttggtaagctcctgagtgttggagacttattagtttacaataagaaatataatttctggtctggagagatgactcagcagttaagaccacatgcagcccttgcagagggtccaggtttgattcgcagcaaccacacagtggctcccaactgtctgtagctccagtcataaggcacctgacactgtctgtagctccagtcccaaggcatctgacactttcttccaacctccatggacactaggcatgtacatggtacacagacatacacacagggaaaacacccatacacataaagtaaaagatataaattaaaataagccttttctcctttaaatcagaaaaagaaaaagggaaagaaatatttctggttctttaaaaatgtctttcgaagtcactttggctcattaagcttcctttgaacataactctgtaaaaggcggtcatatcaaatatcagcagatgtgacaagatcggggtgagctcacctcccatacatgtttattgcccatcccagggctcctttctgctcaggagagctctgcagtatctactttggtctggggcttggagagatggcctagtggttgagatcacgtgatgctcaatcatgaggtaactgattcagatccctgtacccacgtgataagctgagtatccaataaatacctgtagcttcagtttcaagggacctggggccctcttctggcttctgtgtgtacatacaacctgacaagtatccatacacatacatagacatgtaaacacatacaatataaaataaaagtctttaaaattcctcattttttcttttcccttggttttactttaaaatgccaagtaaatttgttgtgaatctgttgttcacaataatacaacatttaatgcattttgttttaagtaagccatattatatccaccaatccgatagtatttaagagaacattaatttttaaatattaacaagcatgcaaatgtatattaggctaagtacttaggaggatgtaagcccttttctttgttttttagacagatatactcagactgccttttaaatatgaagtatctgtgagtttagaatagcagtttaaagacctgcagtaatcttagggtaagtgtagcttggaagaaattagaaaatagccagtattctacttaaatacacatacataagtatttaagtacatgtgtataattaaatatgtatacataggtatacttaagtaatacatatgtatgtgtatgtattaatacatatacatatatacacacacacacacatatatataagctatggtaatcctagtggatatgagattatatatcatgatttttatttgcatttttctaataattaaaggtgttgatcatcccttcatatatttattggatacgtgattatcttctttggataaatgtgtgtgtctctgggtgtgtgtgtgtgtctgcatataacattaatttgaactgttttaaagattttattacaaatgtaaaatttagtgctctttctatggtactcatgccatgtagagtcactttttttattggtgagtgtggtagctcaggcctgtaatcccagcattctagaggctgaagcaggagtttgagtctgaacccacaagtttgagactaacgagcaatatatagcaagactttgtacctcatataaagaatggggaggtggggtcttaaattattttatttgctttcttaactgttctgctaatttcatgggcataagtataagaaaatgattaagatgctgaagttagatttcctggattctcggctcactctgtggttcagcagtagcatgaccttgacatcggggcaaagacctttattttaggtttagaaaactatgggagataaagactctccttaagctctccttagaaggattaaatgagataacgtgtatagtgctgctagcattgcctggcatagtaaagtattcagtgctggtctgttattaaactcaatattttacactcaatatttaaaatttaccattgtccaattctgaaatatctttgaacatcatgtgagctgtgattttaagctggtgaactttataatgtttcttactaagttattttataatatgtcttcctaagtttactttcttgggtgaaaaagacattaatgatgtttaaagtcgatgcaattaatatgtatgtaaattcattctcagtatgcagaagcagttggtgaattccatggctacaaaacaagggttaggattagggttagggtttgatggatacactgggccaataaatcactaaagactggactcacctgaaggatagctgtctctagtcttcagattgggcagaaagccatttgaaatcagtgattctggtagctaagagagtattcagttaacttgtgtttctaacttgcagtcaaattgttagtttagctttgtgccaatgaaacagaagagtcttcttccagggtgggtcggggtgggtgtgtgtgtctgtgtctgtgtctgtgtgtctgtgggtaggtgtgtgtgtgtgtatgtgtgtgtgtgtgtgtgtgtgtgtgtgtgtgtgtgtgtgtgtgtgtgatatacaatatgtatatatccttctctctatatatgtatatttatagtatacatacatccttctgccctgttgagtgatttaaaattcaagtggccattgaaacaatccagatagttgtgtgtgattatcaagctaccttcaatttatgactccttctttcaagaagaccagctgaggcaaaatagttgtgtcatcctctatgcagtcctcctggagaagagatcactccacatagtaaatcgttaccctcttagtgtaagtcatctcttttaaaaacaaagtgaaaaccaatactctctttttcacttcacagttttctctgcatttcttataataaatcctaatttctgaggcaaagattattctgtccataatgttaatagggaacacagctgcttgtcttctgagcttcctctcatgttggggcatagctacttgttgatgctggctctcaactgtagagaagtaaatactgccaattatggtgagctgtagttgttcttagtgcttgagcacaccataggttgactgtcttccagtggttcctaaagtctgcttttgcatctgatttaaggccacggagagcgaggccggtgacatggacctgagtggactgccagagacggcggttgactctgaggatgacgatgatgaggaagacatcgagagagcatcagaccctctgatgagcagggacatcgtgagggactgcctggagaaggacccgatagacaggactgacgatgacatcggtaagtgcccaaggctgcacgctttaaacaggcagaaagactgagaggcaagcacggatgtaattcagcccgagtctggaaggtttgtaaagcccgccctctcaggatccccaaccctgaagagtggctgcagaacccttccagctccgtgtgaaaccgatttgttgggtctcactcagctagtatctacaaatataactgaaagtgaaacttcttataaaaacccattcacataacatttatcttagcttaatttctgaccccttctctttaagttaaaagtaggcttaacacagtattactttcagtaattgtcttacaagccttattccatgagtaaacattagcttaatgttagttgacaaaatggaaactgtaacagtcctgtaagtggttggcttatgcttatgtgtgaggaagaaaatagcaaagctgaggtagttagcctgtgagctgtggagctgagattttcttctttctgtctagtctataatttttttttattaagatgatgatgatgtagtgggatttgtttatttgcttgttttattttaggcaggttttcttaaatgcccctcactgacatcaaacctactatccttctgcttcagcctcacaagtgaaggggctgtaagtaacgtattggttggattttaatttttttcttattcacttgacacaatctggatgtatttgggaggaggcaattgtaactgagaagattcatccgtaaggtcagcctgtaggcaagtggaggggggcactttcttcattggatgattagtgtcagagggccacgccaactgcagacagtgcccgtctgggtggtggtcataggatgtataagaaagcaggcgaacttgatgtcagaatctgtgcctagtcttacagtagctagttatactatatttggttgatgtcccttgaaagcctgctcttttcagaggggagatgaaggaggggcagtttggaggaaagggaagctagtgggagagatgaggtgcgggaattgccatcaggatgtaatctgtgtgagaataaataaaaggaaagaagaaaagtaagtggcgtgaaccttgggaagcaagccagcaagcagccctcctccatggcgtctcttcagtcaggcctccgggtgcctgccctgactgttttcagtggtgaagcatgacctgagagttgtaaggtgaagttaaaacccctaactaaggcagagtgggcaccaggattggggtatttcatgacagacctgagcatgttgagggcagaactgtggaaagagtttggaccactggactagaaagtcattgagcttaatgagatattgtgtgtggtggtaactctgtccctgcctccagccagagaaaccgtaactaagaccgatttgtgctggttgagccctgaagtgcccctcaaaattaaaaccattaggggagttatgtctcccttttaataggagcaagacttgtttccttaatagtagctttgcgtttgaatacacatccaactctgaccttttttgtgtaagatactaggtgatcaccagggccatctcccacccagttctagggtctgtaagtacctctgccagtcgcaggcgacttgtgtgttgtgcccttcactaactctttaagcctgtacatgtttgaaggagaattcagtgagctcaactcagtgagattagataagggaaggtgcgagtaacttactgcttttgttttagtttatgcaaacacacttgtgggcaaaccggcagtttaagctgtatgcatatagtgggaaatagaaaaccagccctttgatttcatgtctaatgaagtcatttgctggaactgcagacgatttagagatgaagagcctgtgctggtaatcgttcattcattttgctcctgtggcagggactttctagttcttggcagctcagggtgaagaagagagatgggaccttgtcctgctctaggcaagggaagctacagcttgcagtggaatgtgtgctgtggggcaggggagatacagcagatagcatgggctctgtgaggggaaaggagcagggactaggctgacagagtgttgtgagacagatctttcctggggagatggcgtgtgtctactcaccccgggtacggaacaggagatagaggaacaaagtctaacttgatgggccagtgaattttatttgggggttacttacaggaacatggatggctcaaaagcatgctattactgaaaagctaaggagacctgcaacccaggaagctggacatggtagagactcctttcctcggtttggctgccaatcacttcccccagcagttatggcatccgtaaccctggaaaggatcctggtgaatctatgagtttaggtttcctaacatgtgaaccatgaaatgtgtttacctgctgggtcccagacgccccaccccctgctgaagggagtggttctatttaaagacaatctccacagaaggaggcagaaggttgcgccaggggaatggtggtcatacagtttggcttcctcgggtcagacatatcatctgtttccaattgctactattcttgttctaggccaacatcacaaacaaatctatcgactatcatttctagtaaaagtctatatgttcaacataccatcttattttagagtgctttccatgggcattttaaaagcctaaatactgcttataaatgcattgatttgaaggcctcctttttgtaaactgactggtgcaccttctctttttaatgtgttaattttagaatggttgtaagaaatttaaaattaaagtatgtacagtatgtctattgttcctagaaacgtaagacttacttagtatctgaaaaacctttctgagaattcctggaaagcaagcgcccttcatagtcctacaaataaacgcaaagctggctggctggcttctaacaggagcatctctgcgatggctaacctttatttgataacattactcagcagcgaagtgacagagctgatgtgggtgctcgcatgcacaaatgagcatttaagttaaagttgatgaaattgctgatattttttaagaactgcaaaagaaaacaacttctccttgggttcccaacgatcactggatgtgtgtccttgtctcagttattttgaagaaagtgaatttatcatagttggttttgctccataaaccatgccttttagatacgaggtatttagtagttgtggcttttgtgatgtgggtgctgagaattgagctcaggccctttgcaagaacagtgcatgccttttaactcctaacgctctctccagtccctgaatatggtatttcaactgaatctgggaatggcttacatttagtattagaccctttttctctctttaacctttgttcttacatatgatgtcgacatttcctatccagttctattttttaatgctagataatcttttattgtctcatatttttcttatagttattgaactttgcaggaaaacgtgagaacttttgcaaagggacagaaagggtagaatgtgtggtctgtagggggaggggtggtagccatagaacagtctagaaagagcaaggcattttgtgatgtggcagcagaggatcgcgacgcctttgatcccctctaggtttaacatcagagggcccctgaatttctcagtgtagaaacttctgcctttgtgtgatttgatgtggatcatctattgcagaattattttgttgcaagattaaaaaattttatggcctggcatggatttgcatgcccattccagaagtaagattcactagacagacttattcttcctataagatgtatttaagatttctcagaagattgtcatatcannnnnnnnnnnnnnnnnnnnctttttctctctttaacctttgttcttacatatgatgtcgacatttcctatccagttctattttttaatgctagtgtctgttcacaaacattatttgaatagaaatcttatcaagaaacaaatgaagatgtccatgcaagatagtttaaaatcattctagcaggactggtgatactgtccagtagtggactacttgcccagtcagtgcatgtaaggccttaataagaaaggcataatccattaaaaataatatttattagtaaaacattttatagtctttcatttctagtcacacatggagtaatacttgatttccattattgtctaagcatatatttaaacccaggatagttctgaaaatttttattgtctcatatgtttcttatagttattgaactttgcaggaaaacgtgagaacttttgcaaagggacagaaagggtagaatgtgtggtctgtagggggaggggtggtagccatagagcagtctagaaagagcaaggcgttttgtgatgtggcagcagaggatcgcgacgcctttgatcccctctaggtttaacatcagagggcccctgaatttctcagtgtagaaacttctgcctttgtgtgatttgatgtggatcatctattgcagaattattttgttgcaagattaaaaaattttatggcctggcatggatttgcatgcccattccagaagtaagattcactagacagacttattcttcctataagatgtatttaagatttctcagaagattgtcatatcagatagagtcagtgggtaccacccaccactgattaccagagccacccatgtattgaaaccttctgcctagggtttgagatacagagctagtcagtcttggcattacctgcccaagatagaagcccttcagtctgtcttcctggagtatttctttcttctttcttcttcttcttcttttttttttcctttttattagctattttcttcatttacatttcaaatgctatcccaaaagtcccctatactctcccctccctccccaacccacccactcccgcttcctggccctggcattcccctgtactggggcatatgatctttgtaagacctctcctcccattgatggctgactaggccatcctctgctacatgtgcagctagagacacagttctggggggatttttgtgcttcctctttaaggacttctacctgtttaactgtgttctcctgtatttctttgagctgttaatgtccttcttaaaatcctctatcagcatcatgagatatgattttatatacaaatcttgcttttcaggtatgttggggtatccaggactggctgaggcgggagtgctgggttctgatgatgctgagtggtcttggtttctgttagtaagattcttacgtttgcctttcgccatctggtaatctctggagttagttcttatagttgtctctgggtggagcttgttcctcctgtgattctgttagcctctgtcagcagtcctgggagtccagctctctcctgagtctcagtggtcagagcactctctgcaggcaagctctcctcttgcagggaaggcacacagaggtctggagctcagctcagtatttctttctgaagatgtgttctcagtataaattacggttttacctttcagaacaactactggaatttatgcaccagctgccggcctttgccaatatgacgatgtcagtaagacgggagctctgtgccgtgatggtgtttgcagtggtggaaagagctggaaccattgtgttaaacgacggagaagaggtcagcaggggtttctaccgcctagaaagctcgaggatcagtgacacccagacaaaaccttgttcctgttttttcctcttacgaacttagcagggatgagtttgagtagatggaaactggtgtccactcaaacattcccttattcatccaagatccattcttctatttctcatgtgccacatggcatgcagtgctactggagattttgcttttgcttgatcttgaggctcaaacttggagcccttcacatggtaggcaggcacttcaccctgaggtacacagccatcctgagactctgtgatggattagctttttagtttctgaccgtacatcataaattcactgcctctcatagaaacaaaacgatgttgtattgaagccatgacgaacattttatcttctttacactccctttgatatatagataatttttctcatgtgtcattttagagaatatttaatgtttttaaatgattttactctgtgttgggtctaaaaattgtctgttgtgtgtatgtgtgtgtgagagagaggggggggagagagagagagagagaacatgagagagagcgcgcttgtttgataaacagttaagattcttcaggtaatttgttccatcttcaagataggagatcccagattctagtttaggacacgtctagcatttaagccaggtgatcacagtgttacctttggggttttttttgtttttgtttttctcagctggattcctggtcagtgattctcaatggttccgtggaggtgacatatccggatgggaaagcagaaattctgtgcatgggaaacagctttggtgtttcgcccaccatggacaaagaatacatgaaaggagtcatgaggaccaaggtggatgactgccaggtatgagatgtatggcagtgctgacctgaccctcagtaacgaacacgtgaacccccagcactgctcagacggctgtggcctcattgcttcttgtcttccatagcgattttaagactgttttgtatttctgtgaaaacttcactttaatcttgactggagttgcactgaatctactggcctgccattgtcacaatcctgattcttccagtccaaaaccatctttctacaatagagagatctttatatccttggttaggtttcataaaaggtgcttttttcatgtgcccctcccccctccctttgttatttgttggtgtttttatttgtttgttttgctttgttgtttttttggccttatgaatggaatcatttctctcatcccttttccagttagtttgttgctggttaaggaaggcctaatcatctctgtgtactaattttgtatcctactgctttactgagtgtttacttgttttagtgggtttctggtggactcttcggggcctttaataaatagaattgtatcattgcagatagagacttctttctttgctgtttgtatcccggtcatttgcttttcttgtcttactgctttagccaagacttccaatgctgtattgcataaaatcagagaaggtgggcagcattgccttgtttgtgattttattggaaatgtttcactttctgacatcaaatataatattagctgtaggtttgtcaaatacagtttttatgatgttcatatgtgttgcttctattctgagctttcattaagttgtatttttattgaaaataattttcccctctcccaacttttcccagatcctcacaacctccctacctcccaactctttgtctctctttagaaacaaatcaaaaccccctaaaaacaaaaaccataatatacaagcaaaagaccattaagactattccccaacacacacacacacacaaacctggccactccgtgtgcagaagctgtggagtatgaccagggagtactaactatttgataagatcctgctgttaactttttctattaggagcaatacaaattaattaatacaaatcagtaacaatctgaaatacaataaataccagacttcattgtgactttttttttctttcaaaattaatttatttttagggacttttcacaaatcaaagggacattaaatactctggccctttatgtcttgacactggttctttgctcataatattctattcagtttggttgggggaggcaatgaaggtgtagagatggggaggaaaatattggctcttttttttttttacaattttttattagctattttcttcatttacatttcaaatgctatcccaaaagtcccctatacccttcccccaccctgctccccaacctatccacacccgattcctggccctggcattcccctgtactggggcatatggtcttcacaagaccaaggcctcctcccattgatggccgactagggcatcttctgctacatatgcagctagagacacaagctcgggggtactggttagttcatattgttgtttctcctatagggttacagaccccttcagctccttgggtactttctctagctcctccattggggtccctgtgttccatccaatagatgactgtgagcatccacttctgtatttggcaggcactggcatagcctcacaagagacagctatatcagggtcctgtcagcaaaatcttgttggcatatgcaatagtgtctgcatttggtggctgattatggtatggatccctgggtggggcagtccttccttctgtcttggctccaaactttgtctctgtaactccttccatgggtattttgttccccattctaaggagggacaaagtatccacactttggtcttccttcttcttgagtttcatgtgttttgcaaattgtatcttgggtattctaagtttctgggctaatacccacttatcagtgagtgtatatcatgtgagttcttttgtgattgggttacctcactcaggatgatatcttccagatccatccatttgcctaagaacttcataaattaattgtttttaatagctgagtagtactctattgtgtaaatgtaccacattttctgtatccattcctctgttgaggggcatctgggttctttccagcttcttgctattataaataaggctgctatgaacatagtggagcatgtgttcttattaccagttggaacatcttctgggtatatgcccaggagaggtattgctggatcctccagtagtactacgtccaattttctgaggaaccaccagactgacttccagagtggttgtagcagcttgcaatcccaccaacaatggaggagtgttcttttttttccacatcctcaccagcatcttctgtcacctgaatttttgatcttagtcattttgactggtatgagatggaacctcagggttgttttgatttgcatttccctgatgattaaggttgttgaacattttttcaggtgcttctcagcccttcagtattcctcagttgagaattctttgtttagctctgtgccccaatttttaatggggttatttgattttctggagttcatcttcttgagttctttgtgtatattggatattagtccccaatcggatttaggattgataaaaatcctttgccaatctgtggtggccttttttgtcttattgaaggtgtcttttgccttacagaagcttagcaattttatgaggtcccatttgcatctgtgacattctttaaagcaggagcgttactaaaattgttgtccatgtatgtgattagcacagatacatatttactccagcatacagatgttataatctcttcatctctaaacccactaatttttatatttaacattttcaaaatgtctaaagtcaagtagtaattgttttatcatgtttgccctaggattacctttctcactaccactgtttctaacgaaaggatgaaagagggcttttgagattttagattgttagatttttgaatctaaaatataaactaaatgaaagagagagagagaggacgaaccaaggaggaaatgcattaaaagcaggaaagtctgatgaaggttcattcttgcattgatttagaaagtaggagaacgacagggggaaatgtcagtattaaataattaaaaccgaattattaggcaggtaggtcttttgcaagcactaatatgtgactcacattttataccagtttgtctgcattgcccagcaagattactgccgtattttgaaccaagtagaaaagaacatgcaaaaagttgaggaggaaggagagattgtaatggtgaaggaacaccgagaacttgatcggactggaacaaggaagggccacatcgtcatcaaggtaagatttgtcccttccaaagcgggcaggagaaagctgtgctggtcagtttctcctgacttctccccccgcccaccccccttctaaatcttttaggttgtcatgcagagtagtgggtttcattgtggtgtgtgcatacatagttatcattaaattccattctcattcattcccctccctgtttcctctgccatcgagcatgatatctagtcctggttactggtggataaatggccactgactaggtcttctctgacttgttacctagcctgttttatgtaaaggtttgacatgggatggggtgggcgagcgtatcactgatccactcatagtggtgactagaccttttattgccgcagggcacctcagagaggctgaccatgcatttggtggaagagcattctgtagtggatccaacattcatagaagacttcctgttgacataccggactttcctttccagcccgatggaagtgggcaagaagttattggagtggttcaatgacccgagcctcagggataaggttggaaatgcattctattttacccccctaaatgtgaactactagaaaataaaatttgggacatcagttatcttcagattaatgtaacgaaatatgagaacattcttcttaagcaaaacgacaaaaataactgatgcagatattcttatagatttccatggtctcagtctcagaaatacctttttactttaatgcaaggccaatatgtggttctcttgggaatgcggtaagacataagtagatgtctgcatgccacagactctgcagcctggtttggtgggcagtgtgtgcctggtggacattagatgtttggtggcaatggaacagcttgtcctcctgtgctgctcaaggcctgggaccttcttctgatctgaccatcgagcctgtcaaggccacactcgataatcagcttggtcagagtgttggctcctcccactcacaccctttcccacatggatctttccagattattactattgttttcctcatctagtctgcccttagagtttgtagtttctgtctgattttgtactaacttattttgtttttattacaagtttgctgttatttagacttctgttaaatatgtttcaaaataaaacaatgtaggttaaatatctccacagatttaaagatccaggacaaagcaatatcagtcagtacttaaaatatatgttttgagaaggttactttttttgttgtgtgcacatgcatatgcattgggaggccagaggtcaacattggttatcttccactcttactctctaccttattttcagagacagagactctcactaaatctagagttcactgttgtgggctagattgtctagccaatgagtccctcgggtcctcctgtctccacccagtcccaccttccacccgcagtgctgcagctacaggcacagtacaggcatacctgcctttttaagtggacgctgtggatctgaacatgggtcctcatgcttgaatagcaagtctctttgtcaactgagcatctctgcagttcctacggtcatttttacaagtgtaaaatccatgtttaagggcttatttttattcattttcatgttcaatattattaaaatgtttaaaaagatctatttttaaagtggtttaaatcacaaatctttagcactaacaacaacaacaaaaatgtactgaccttcattgctttcataggtgacgcgggtagtattactgtgggtgaataatcacttcaatgactttgaaggggatcctgcaatgactcgatttctggaagaatttgaaaataatctggaaagagaggtaatatttgtgagcctttatgagtagtgtgtcaggtttttcttcctctgcctatcctggacttgatgcgactcttcttgaattctcacagaaaatgggtggacatctaaggctgttgaacattgcatgtgcagctaaagccaaacgaagactgatgacgttaacaaagccttcccgggaagcccctctgcccttcatcttactgggaggctctgaaaagggctttggcatcttcgtggacagcgttgactcgtgtagcaaagccactgaagcaggcttgaagcgcggggatcaggtgagagggaagactcagctctgggtacatgggaatttcagagcccctttgcttcagtcagtgaggatgttgactttaataacttcatttttagatattagaagtgaatggtcaaaattttgaaaatatccaactttcaaaggcaatggaaattctcagaaataacacacacctgtccatcactgtgaaaaccaacttatttggtaagcattctgcaaactctaactctcagagttttgctctgtttttgttttcttatatttagatcttaatcctggacaaagtaatttctgtgaatagtagaacttgtaaggattctagtattttctagggctatgctaaaatgcatagaacagaattctttatgtccgtatgcatttacattcagataaaaaagcatcatcttgaagagcatggtatgaatatattgagcagtccagcctgccttctgtggatgagtacagtcatcttgaaggtggcagggtgtctgtcttttcttaggctcatctggataaagactagttttgctataggttttagtatttatagctcatctgtatttcttacatatttgcaagctccactggtaggctgccattgtttctgcttgtggctgatagttcgcggcattcctgttttagtatttaaagaacttctgacgagattgtctgaagagaaaagaaacggtgcccctcacctccctaaaatcggggacatcaagaaggccagccgctactccataccggatctcgccgtagacgtagaacaggtgataggcctcgagaaggtcaacaagaaaagcaaagccaacaccgtgggaggaagaaacaagctgaagaaaatactcgacaagacccggatcagcatcttacctcagaaaccatacaagtatgtgaagttgttttcagcaccttgttttagtgcatttcatagaaggatgtacagaagcggcttggtgtagtgaacgcttccccaggagtctagtaaatatctcttcagcagagtgtcttaggagcaagtatagacagttgggtctgcttggctctactttcacgcgaggcagttgaacatctctacatttgagcttcctacagaggtttgttgacatcccgaatgccccatgacttagctgcttctgtggttcttagtgtcccgccatagatgtttgtcttctttgcttgccagccattgcttcttccaggcgcccctgtttatcacagctattccccgctacttcagtaacttaactgtgagaagacattggtaaccagcctcaggcctctttcccttctcctcaggtccactagcattagcatgtcaagagcattcttgtatttattcttggatgtgtatgcctgtcagaagcacaggcgactcaacttcagctatccctgaatttgctgggcttgcttgtttgttcctccttgtagttttttgggtttaatgctctttatgaagctcagttggcagcaatcaaaatcttaatgatatagtccccaaactaaattgaaaagatactagcttatttatttctttgataatttaatggctctaaagtgaagcaataaatagaggcattcaaaggctgaagagagggcccagtgcttaaagtgcttgcccctgaactgcgaagacttggttgggttgagatccagcagtaacgtaagctaggtatggtctctcctacgcctgtaaccacaggactgcggatgacagacacaagcgggttgctcaggaacctggaggatctgctctattataattgccttgatttagttctgactgccgtgtcagctttgctagacctcagcaagggtatgtagttctgagggaaagcctagggccttgaccgtgctaagtggttcaccactgagccaggtgcccacttttgttattgtgtttaacaaaaccataacctagtcagttcgtagaatctcctagttatattacacttgttcctatttaccctttacaaagctgaggtactagagactcacagattggcaagggtgtgcatgagctattgtgtaacagggtgcacatatgatgtgcatacagcaagaaacaggtcaggagcataacagaattcaaattgggatgctaagtatgttgatcaggaaagcccaatgaaccctagaggaagaaaagattagtcaacagactttaaaacaacagacttgtttcagtaacagtgagccagttggggaggctagacaagaggacatgccaaatagggacatttcttagttagatttttcataaaacatgcaatattttagtcaaggcatagccttgtgtctgtgggtatcgaggtacaggtgaggcatagagaagcagagtgagtttcagtttattacacgaggtatgggaaaatgttgcggtgagaaacactctgctaggtgtgcctggagagggccaacactcacagccagctctgccagtggctgacctggtcagacacgccttgattttacccacacaaattgtgttagctcatatatcacatctctctctttttttggaggggggtgggcgggggggttcgagacagggtttctctgtgtagccccatctgtcctggaactcactctgtagaccaggctggccttgaactcagaaatccgcctacctctgcctcccaagtgctgggattaaaggcgtgcgccaccatgcccagccacatctcatatttttggcaaagacatttatgtgattgaaaaataaaactctactaatgtaaagacttctatcatgcacagaacattaatatttcaggtttttatatgcccaactgtgcgtgtgcatgcttaaacagaactttgtttttgtgccaggctcttctatatgcgaaggagaatttacactaaaattgtcttgagatacccaatttatatcccaaatttagtgaatttctgttttgtttcaaagtatttgtggaattggaactgtagacatttgtatataatctagttacttttttattttatacttgttttattgtatgctttcttttggaaacacttgacctttcaatcaagcaataattttatatgttgtcaagttgtgttttaagtgttatccccaagtaaggtgtggtggtccacgcttataatcctagttcaagaggctctagagccatggccctccccagccatgttgaaagatgctgcacaaacacacaagtggccactaagcagattttctataagcagaaaggagtctgtagccatcagcaatgcacatgtttttatggagaatttaaacatgtgactataaaccttgcagagaattagaagccaatcactgcatttgcactgcccatccttccaagcccgcagtgtggtcatgcacgctgcatgctcacattctgtcactgagagatggggtctgtgtcagggtgccctcacacttgaactccacagtggtttgttctgctacttacaagagtgtaagtagggcagtttcggtttccgtccccctttgtttttcctcagttcctcatcgtgaggatcagaccatgaagcagctgtctgggttgttgccgagctcctggcatagtgaactcaagtggattttttcccgtgtactttgtcttaggttcatttccattccctcagtcagatatagcagcacatttcctcttctgtatttttgtactaaaaacataaataatggttatggttataacttattaaaaagacagcttgtagagaaacctactaactgtttaaaagatagtgagctggactgaatatgtttcgcatcatgagccttaacagttttcaatatttttacattaattgcaagtttaagtgaaaatggcttatttcatgatctgtagtgacttagagcctttaccttgctaataattaattttttaaaatctgttcttttcagtgatattgggattggtcagtctcaagatgatagcatcgtaggactgaggcagaccaagcacatcccagctgccctgcctgtcagtggaacgctgtcctccagtaaccctgacttgctgcagtcacaccaccggattctggacttcagcactactcctggtgagcgccgcagcctttctgccagttcagagacctttctctttcagatgcagtagtgacattgtatgcatgtttggcagtggggcatggatggtttattgttcaccaagattcagaacaagcctcaaactcaacactgggactagttcttgtagtattctgaaaaccattctgatgtggttaaacctttgataaaatgaagaataacgtactctatacttattactaagttatacctagtaaataaatcaggaggcatattttcggtaagctaaatgggctcttctttataatgaagattatctgtagatggaaattttttgatactctcacaaatgcatgtatgtgctcattttgatatgtgttttttatattttgtatgtgctcgtgtgtaaaactcatgcacttgtcttttgacaatgtagttatcagtgagggaaatgtggctttgcatgtagcatgtcacaactctgtcagggagggagatggtgtgttactctaatcacattgccatctagtaacatttattctgcttctgtgtggcttctccttcccctagacttgccagatcaggtactgagagttttcaaggctgaccaacaaagcaggtacatcatgatcagcaaggacaccaccgcaaaggaagtggtcatccaggccatcagagagtttgctgtcactgccaccccagagcagtattccctctgtgaggtctcagtcacaccagagggagttatcaaacaacgccgactcccagatcagctttccaagcttgccgacaggatacaactgagtggaaggtacagtctgtctcaccagagttcttccttctctgagcccgcatccttgaagagactagcccggtgctgttgcgattgctttgtttttacaattggtgaaacttgaacccaagaccttgccaactgagcactcttagggaaatcagtcccatgaataaattgggttctttgtttgctggctttttgttttttcccccttctaattttctttagaatgtcattgttcttgacttttacctggtatgagtttaaaccatgactttctaaccttgtgctttcaacttgtgattaaaactcccttgcatgtcatgtctcttcccagccccagcactaataatacttcttagggggtcagaggtgaggagtcccctgcatatacactgataggtctgtaatcctgcagatggctactgggtttcagctttgcttcccattcaccactcaggagagcctgggtatcagaggaatcacagtggagcacattagtctgtacccgtcaaggcacaggctgtctcttacctgtcctaaatgtcttgtgaagtgtgtaaaagaccagttagtaggaccctcactctgcttgctctgtgttcctagagtttcatgtggagaaggcatctgcctgccaataagtggggagagagaagctacagagcaaatatgggggtcctattttcagtgagttccttaaaaaggtcacagtaccatccatattgaccagccatttggctgcaaatgcctgcttgctattctgacaaattggggtaacacctcccacttccctagaaaatctagatacttgaaagttaaaacctgggagtaggagagatgacttagcagttaggagcacttgttggtcttggaggggacctgggttctgtttctagcacccatgcgatggatggcagtcatccagttctggggtagatcctataccttcttctgactcctgagagcactagggatacatgtggtacacatacatgcatgcaggcaagacactcacatgtaaaacagatctataaaaatctgttttaagatcaaatagaggaaaacaaactgctttgggtgtctcctctcccaattgtgtgtgtgtgtgtgtttgtgtgtttgtaggtatgtatgtgtgtgatgtgtttgtatggccacatattctgcagtaagtgtgtggaggtcagataacaattttgtagcctcagatctcttagcttgatgagtatctgcctgctgagccatcccgcgagctcagttattaagtcttctaagcattaaataaataagtaaacttcatttgagctagtgtagacccagcaattggcagattccctcttcactaggaaactgagctatgacttgagttgatgtttatctaatctggtaaatagctctcttctgtcacctttggcaaacaagctagaagtatttcagtggcaggagtggggggtgggtcgtggggagaacacactacagaactggcacaaaggaatttcccatggattgctcagttctgcttacctagtgctgctgtgagctggtggcacggggtggtatctgtactgcccgtgatggatgaaaagaactcttacaccagtctcttaattcctcccccaccccacccccaccccccacccagggagctagcaatgttccctttaggagtcccacaggcttgccgctcagcttggcatctgaagagcttctgtttctttcaggtattatctgaaaaacaacatggaaacagaaacgctttgctcagatgaagatgcccaggagctgctgcgagagagccaaatctccctccttcagctcagcaccgtggaggttgccacgcagctctccatgaggaactttgaactcttccgcaacattgagcctactgaatacatagatgatttatttaaactcaaatcaaaaaccagctgtgccaacctgaagaaatttgaggaagtcattaaccaggaaacattttgggtggcttctgaaatcctgcgggaaacaaaccagctgaagaggatgaagatcattaagcatttcatcaagattgccttgcactgcagggaatgcaagaattttaactccatgtttgcaatcatcaggtaagaggagctgtcctaggtgaaactgactttatttatatatatatatatatatatatacacacacacacacatacatatacatatatgtatatatgaatgatagattatatattatacattatataattatatattatatacttgtacgctcacacatatataatatacatatatatatatatatatatatatatatatatatatatcagtgtcagaacaccatgtaattaccaatatatattagttcataattgaccctgtgtgtgtgtgtgtgtatgtgttttgttggttttgtacagcctcatgtacactaagacataagacgtaagtgattcaacaagcaattctttatttctgattcaaaatcttagttttttcttcagaggctgatgggttgtgatgatttgtacattctctgccccatggaatggcactattaggaggtgtagttttgttggagtgggtgtgtcgctgtgggtgtgggctttaaaaccctcatcctagctgcctggaagccagtattctgctagcagccatcagatgaagatgtagaactctcagctcctcctgcaccatacctgcctggagctaccatgtttccaccttgatgataatggactgaacctctgaacctataaggcagccccatttaaatgatgtccttaggagagttgccttgatcatggtgtctattcacagcagtaaaaccctaaaataaaagtgttgcagtaggctctctctgcagtagtccaggctggcatacaactcagaatcctgtttctcatctgctgggattacacatgttgccaccacaccctcctctatttcttataacttaaactttcttgatggccggggagagggctctgtgagtaaagtgcttactgtgcatggtcttcatactcatagctagtataatttttatgatggaatatttacccaatctttgttttttcaaatacttgttatgagccacatgctggactgtgtttatgagtctgctgcaaaaggaattgtcgtgtcagactctgaactttacatcttataattatatttaaattaaatagattgaaagctttaaatctaataaaaatcaaacatgtttatcaaaataggacctattacagtcaaagtatgcttaccagtaagaaatagatttgtcttttccaaaatctatgttttaggattcaactacaacttaatattttcttcatccagatggttgtagaagcattttccctacaaaaattgtggtagaagtcaggtcagtgtggtggatgaaggtcaactttagaccagttgaacttttgttcaactttggaagcaatgtatatcatatggttgaatgttgccatggagaagaatcaggtcctttctgttgaccagtgctggatgaaggcattgcatgttttagttggtgtatctcatgattagttgaacatacttcttggatgtgatagttttagccaggattcaaaaagctgtagtgggtcagactagcagcagaccacctagtggtgaccatgacttatttggtacaagtttagtttgggaagtactttggagttatgtctaggtccagacacagagttggtcattactgatcatcatattcaatctttatcacatgacacagtctgatgaagaaatagttcatttgttattgcagaaaacaaacaaaacagaagggccagccactaaaggcaccagctaccaagcctggtcaccagggtttaatccctggacccacgtgttagaagggagacctggctcctggaatttgtcttctcgccttcatatgcttgctgggataacctccaacacacgcatactcacatgcatggaatggtgaatgaatgaatgaatgaacgaacatatgaatgaatgaatattaaaaatgttaagaacataaacagaagtataaaggcaaatggtttgtcccttgcccagttttagctgccactccctccctagtcaggattggcacgacccctagggcgttgtataagttcccatgcacacagaggtgttgtgttgccttgtacatcctgctttgttttagtgagcatcatttcatccaatctctcttctctgctccccctcagtggcctaaacctggcaccggtggcaagactacgaaccacctgggaaaagcttcccaataaatatgaaaagctgttccaggacctgcaagacctgtttgatccttccagaaacatggcaaagtaccgcaatgtcctgagtggccagaacttacagcctcctgtcattcccctgttccctgtcatcaagaaggacctcacgtttctccatgagggtgagcgcaggtgggcactgtctgtcctggtgggtaactcagaatggacactgtgtgacttcttgtccctcctctgttaatatcaggaaatgactcaaaagtagacggactggtcaactttgagaagctgaggatgattgcaaaagaaatccgtcacgttggccgaatggcatcagtcaacatggaccctgcccttatgttcaggactcggtacgtgagttattggccatggcatgtgtcgggtaaaaaggttaaagtgagcttgaccacagtaaggaaaagctgaatagttagacaggagtcattatgatgtgctgagacagtcaccttcaagcttccgtttgtggtgctgtctctgaattggatccagggcacatatgacagtaatgccagcagcttgtccttcagatagttttagtgaatgttgggtataatgtttacttcttattgtcagaccactgaagtgcagagttaaagctgtaatcggtagcactagctggagcagaattgtcataatgtccatgcactgtgttcatctgttggtgcagtaagcagtggttagctcagtggagggaaggaacaaaattgtagtcctctaagccagagagatgtatgtagtggatgtgtgcgaggtgactatgcagttaatgtctgtgggcttctagaactgcttgtccagaagtctggtcctttctttctgagcttgtgatctttctgtctctttctacacccatgcttcaatctccgtggctcacttacaggaagaagaagtggcggagtctggggtaagtggcagagcctttgcacgctcagttcttgctcatcttgccgtgccattgttttcttacctgctatgttttctgaagctttgctgcttttttttttttttttttccttaaccctcttgctctatcagaatttcagatgcaaactgacttcagatttaatgtgttggggcattcctgaagtcagggccaccagagctgtgaaatgattgctatcattctgggaaaatgtagacgagacatatttctcggctgtctgaaagattgtattgaaacacaatttgtgtgttttgaaatgaaaaagcttaagaagctggggagggaagcatgctcttagaaggtagaaatggtgcaactcaataagccctacctattgcacagatgcaggagtggggtcaggcaccctcactccttaaaaccgaagtttctacagctcaactaactactgttttcattctatatgaatcagcccccttcaaaaataattcctaacaattcatgtactaaatagtttccataataaatgtttacatttgcatgatcgttgtattaacagatttactgttttaaaaactcaccacattcgggctggagagatggctcagaggttaagagcactgactgctcttccaacagtcctgagttcaaatcccagcagccataaccatctataatgagatctgatgccctcttcttgtgcttctgaagacagctacagtgtacttacatatgataataaataaaataaatctttaagccagagggagtggggctgaccagagtgtgcagaggtcctgaattcaaattcccagcaaccacatgatggctcacaaccatcagtacagctacagtatactcatatacataaaataaataaataaatttattaattaaaaaaaaaactcaccacattcgttcgacccgcagagaaagaacacagttgtgaacagtgtagctgggtttaatgaaacctatataaaatacccccattaagaaaagcaagtttcgttttgtaaattgtcactatggtctcccagtatccttgcacatgcttttatatgcaattgtgttttctggcttctgtgagagaacggactttgaatgctctgtgagatgaaaagtagaatttactggtaggagcagaacatatggcaaagatatttatgtctttgtattatgtataatttcttttaaactcttattctggactcccccggaacagtttactagagtggggcatggtgcctttcaagcagagagtctttacccaagtctggcagttctggtaggtcagcctataagtgctccagagagttgcaggcttgtttttcatcttccaggtccctgagtcagggcagtgcaaacgccacagtgctggatgttgctcagacaggcgggcataaaaagcgggtacgccgtagttccttcctcaatgccaaaaagctgtatgaagatgcccagatggctcggaaagtgaagcaatacctgtccaacctggagctggagatggatgaggagagtcttcagacactgtcactgcagtgtgaaccagcaaccagcacatgtgagtgcctccccaaatcacctgcagactgttccgatgttcagatgtgtgatggtgagggtcaaatgggagcgttgagcagcaaggcacacggtgcctgaggtatactctccttgtgatgggtcttcgtgtccagttaagttagtgtggttaaagggacactgagctcacacctccttgctttggctttatctgacacagccagcaccacaagcaagagacacagaggagattgtggctcctgttgccgtgcctttttgccctcgcagaagaactcctaaagtgatgggcagcatggttagggattatcaggtcagaggagtacagtactatgtgtgctggccactgggtcttcctcggctctgacaacatccagtacttgcccactaaagcagggatcctcctacacagtacaccacaacttagcctgatgtataggctctaataactggccaggctatgaatcacatttggtggtacacatctacagttccgtcttccaaggaagctgaggctggagggccgtgtgaacccaggtttcagttgccaccccgaacaacatagtgacacaaaactgttaaaaatgaaaaataaaaatgtagcccgcctttacgtggagcgctttcctttgtgtctatttctattttataagattaaagcattttgcttttaaaaggacagttttgggaacttctatgggcaagtctgaatttcacagtcttgacaatttaaatgtgagatagacaacttgagaagatcgcgtgattcagttgaccccgggcatgagactggggacatgacttagtggctgagatcactcactgctcttgcagggggttgagtaccattctccgcatacataatggttcacaacagcaagcactcacgttctagggaatcccatgccctgttgtgcacccaatgcccatctgcaccatgatactgtaaaggccccgtgtgacacggctaagagcttgcatagatgagcagcttgagtttcctaaccgtggtctctagggtgtggtgtcagtgagttctgtgcgtgaagctcccatggcactcagtgctcctgtaaactacctcccgccatacaatacctaagcagcactggccactgtttgctcaaagacagtgctccatccttggagcatttgataataacagcagtatctcagatgtggcaatgagatttgagccattttaaaacagctcttgatttccctattttagtttttatcatatttttctatttttatttatttattgtttttttttttcaagacagggtttctctgtgtagccctggctgtcctggaactcactttgtagaccaggctggcctcaaactcagaaatctgcctgcctctatcatgtttttttaaacatttatttatttatgataatagtgcggatggttaataccacacgtgctatttcgtacatgtggaaggtagaggacaacttagttctcttctccttccatattttccagggaacaagctccaatgttcagacttggcagcaataccctgagccatcttgcccgccaatgtgttcgtgtgtttaacttccatgcacattgacctgttctgtttttcatttttacctggtgcttagcaatttaaccctctttgagatcacttattcacaaggcaaataaatacccttgtcctgaaatacctctcatttctgaagctagggtttcccctccctctgtccttggggtggcagtgggggcggggaccatgctgctgatttagctgcacatctctgaagccttgaacttgtgtccatattatgctaacactttagctctgtgctctgttttcaccctaaacaactcccagtgcccaagaatcctggagacaaaaagcctgtcaagtctgagacctccccagtggctccacgtgcagggccccagcagaaagtacagcctcagcagccgctggcacagccacaacctccacataaagtcagccagggactgcaggtgcccgctgtgtccctctatccttcacgaaagaaggtgccggtgaaggatctgcctccttttggtaagtttctacacatcctttttgggtggtgtttgctgacatctttctctggttgggaaataatgtttatcctggataacttggtccaaggcattttatttctctgtgccgatcttctaataagacagcaagttaagtgccacaactttttgtaaacaatgtttcttttttttcttagcatctattaattatgcagtgggcttcactgttgcacttgtcataaatgtaatacactgtgatgacagtggcctctgtcaccctctcctgtcccacttcccctcccattaacctctcccaacattccccatcctactttatttcctcccctgtctcctatcctcaagtagactctgtatagctgtatttctgagtccgaattatttcacttaacatgatctctagtgccattcatttttctatgcaaacgctgtaattgcattcttttgtagaactgaataatactccactgtgtgtatgtctgtattgtctttatccgtgtgttgataggtgtctagtgtgggtccctggctttgatattgtgaagagtgcatgggttaatgtgggtggcacaggtggtacaggtcggtcataagctggttcagcttccatactgacttcttagaggctgctgggcttgcccacccaagtctacaagggttcttctcctccaagcccgtcctcgctagcactagatgtttgcttgatggtggtcattctgacgagagtgagatgggatctcagtgtagtttgatctacattgcctttatgactagggatattggaggtttttcatgtatttgttgaccatttgcatttcttctttggagaactatctgttcaattcattttttaactggacttttatagtgtttaatttcttggttttttaatatactttgaatattaattcctattggatgactaatttgcaaaacagtctttcattctgtaggaatagcatcttatttaatagttagatcatttgtcatgcaacttaaggggtgagacaggggactgcactcttactgacttaagctttaataattacagaagttgacctcattcacactatcatttcagtaagttttggaactacaagaagcttagacaaaatatgtttaagttaaattatttgtctgaagtgatttttgttttctattttgtggggctcgggatcaaaccaaagcacatgccaggcataaaggtggattcccacttgatgatcatcaattttgtaacttcagagacagaggacatgactaaaatcttcttcccattacaagtattccgctcactggttctctgtgtaaatatacaacagatcaactttctatacaactattcttgcttatgaacttatgaggaagaaaataattagaacaaaagggaagaaatttttaaagttgcccatgaagttggatttggaaactcactcccatttcccgagctgacagtaggcagtgtatcccacccgtgttcttgttctgagttgacagtagacttgtgtcccacctgcgttcttgttcccgagctgacagtaggcagtgtgtcccacctgcactctcgcctcctgatcagtgagtgtttcatttgtgtttgtggggaacaagaatctttatgtgacattttccctctcgaactcttgtgtttgtcgtacagcaaacaaactgagtggcacattttcccattatacctgcattttcaatccacatacgttcctggctcctctgctgtgtgcttctgtctcctcctctgtgctgaactttgcatatagaagactgtcattcttctttttaatctacaaatacccattagctatatttaacgtgaggtaggcgtgcctgaatataaagctgtctcccattttctcaaagagaatgtctctcaaaatatcttctaggttcatttgaatttatgagccttataatgtggataaaatgtcacctgtcatcctgagattaagtttaatgtatctaaagttgcactataaaaaatactaatttaaagatattaagaggttttcctcccccattctttttcatgagattgttttgtcttaaacaatcccagtatcttacaccttaatacaagccatcacctgcagtgtgtggtcatacacacctgtaatcccagcatccaggaggactgtgagtttgcaacttgtctgggctacctaagttcaatgtctgctggggagactttgaaactgtttcaaaaagtaaatagattatggctagaaccacttggaagcaccaaacatggcttactgacgtgtttggtaactatatctacagccactgtaagataatggaagtcttttggaaagtgtgtgtgtgagagactggccctggaaatagtttcctatcaaaactgttcattcgtaggccagtgaaatggctcagagtggaagggtgcttgccaccaaagctaataacctgagttatccctggaacccacatcatggaaagagagaaccaacttcaacaagttgtcctctaacctccatccacgtgtcaaaccaccaccaccaccaccaccacacacacacagacacacacacacacacacacacacacacacacacacacacacacacacaaaacaaatgggagatggcttcataaagatgcttattaccaactctgataggttcagtctctagaacctacgtgatggagggaaaagacccactcctgcaggttggcctctgacctccacacatgcaacatggtatgtacacacacagtaaataaataaaaaatacaacatgcacatacatgaataaaagtgttctttcttcttttttttcttccctccctccctctctccctccttccctctctccctccctccctccccctctctctttttctttctttctttctttctttctttctttctttctttctttctttctttctttctttctttctttctttccttccttccttccttccttccttccttccttccttcctctctctctctctctctctctctctttctttctttctttctttctctctctctctctctctttcttcctttcttgtcagagtctcactgtgtggaccagactagtttcaaacttaccaagaccacacaaaagcatgcacaaccacatccagcttagtaaaatgttttaaggaaaaaaaaaaaaaagagtatccattcttgtagcattaatggggtgaatacatttatgcataccgtgtatgttaatactttgatatttaatcaaagaactgcttttaagagtgattttgtaatagagttacattaaaatagcatgaagggttgttgatggggctcagttggtaaaatgcctgcctagcatgtatggatccctgggctccatcccatactccagaagccagatttggttgctattgccagtaatcctagcccttggtatgtggaggtaggaggatcagaagtgctcggtcatcctcagctacatagaaagttccaggccagcctgagatatgtgagaccctgtttcaaaacaagcaaaaataaaacagtgtcaagcctaatagaggattcattgaagggttagattctgtcagctcctttctaatgggtctattaagtctatgaccattaaaaccagccctgactcaagatagttttaggctactatgcctttccagaaatgtcttgattgttcaaaagcagcttgaaaataatgaatctgtaaagcatttctaatgcgacttccttatttcactgtattgtcatgggattcagtttcctccatcttccttctgtgctcctatgttggtgctggctccacccaccccttcagaaacctctcctgggctctggagtaactccacagaagactagctgtctcctgccttcttctccctccctttatttcatcaaatattaatgatatggctgccttagagccctttcattgactttccgtgtaaccacggaaacttcctgttaactctagtccctttactttgtctctcctcctcccaccaacacccaccctccatccatggtcttcttcctcaggaccaacatttcccaaaatactgaaatgtctttttcctaactcagacttgaggcttaactggaattgaaataggatgtctgccttcatctttgattcaaacgtccagttctctagctttttccccaccgttgcttagtaagacacagctgagtaactatgatggctggagttcacatccaaggaacacatcaaaagcagggtttcaagtgctctgatggataaccagtcagaaactgtcccatgcttcgtacaccagaagagcatgcagatcatttaggtcagaaatagattgaaactggcaatgctgaatattgacacaaaaaaaggatttttgctatttagtctttccttcttcactctttgtttgcttgtttataggaaagcctgtgtgtgttgggcaagtgtctgtcactgagccacacccttagtccttttcattctctaaatgggtccctgaattattttggtttttggggttttttttttataggcataaactctccacaagctttgaagaaaatcctgtccttgtctgaagaagggagtttggagcgtcacaggaagcaagcagaagatacaatatcaaatgcgtcctctcagctctcatcgccccccacctcacctcagagctctccaaggaaaggtagggctcactgactcctgtccctgcgcaggtccacacattagtccagaggatcccacagaggttcactgtggaagtttcactgctctatgcaaaggatctgatggcatgtaacagtggattttcctcatctggttatacatttggaaagatgatgctagttttaacattgtggttccccttaactgtcaaaagacaggtgctagtgttacaactagtgtgctagaaagactgctgacagcgcagggaaggacagacggattatctgttttcttacagccaaaccgcaggcatgagccttagagattagaggatcggggccacacactggaagaaatactcattcatttgtctttctgaacttcggttttctcgccaaggatagtattttctaattccatccgtttcctgatttttgtcatagttttatttttctttatggctgatttaaacgtcagtgtgtatgtgcaccgtatttccttggccacccctctgctgggcatctagcctttcgtatccttggcactgtggatggagctccagtagatatgcatatgcatatatcctgtaggttggagtcatgcatatttgctaggaggagtatagctgggttattgataattctggtttaatttattaaggaacctctacactgattttcatggtgactgcacagttgacattccccagggccgtgaagagggaccctccttccccccacgctcactagcctttgttctcactggttttctcaatgacgttctgacagtggtgcctcggtatctccctgatggctaagaatgctggaatttaaacttgttacttggtctgtgtgtttcttccttttgaggactttttttttcagccgaatggcttgtttattggtggccattgtggtttgaggtgcttcatttttccagttttatatgtagtctagatatcaacacttgtctgagatagaattggcagaggttgtctcccattctgttggctgtgttcactcagtggctagtttttattgttatgggaagttgataatcccgtttgtcagttcttggaactgtttcgggtgctatttgaatactagcctggacctatatcttgaattagtttcctcaagcagtttaattactttaggaattaaattgaggtttttgatgtacttgggatatacctttgcataggatgagagatggggacctaatttcattctctgtaaatggagacaccaaaatgtctgttttgtccttcgcatccctggcatatgttttaaacacttttgtcaaaactcaggtttgtttctgcacccccccccctttgttccattgatcttcatgtctttttatgcaatactgtgatatgggtgtcaccatgactccaaaatacagtttaagatcagctgtgatagtgctctgagcagtagctggcatggggtgctaagatgcctcagcttctaagtcccttttcatacttctgttgtccccatagtctgtcttctggtgtcctttgccacactttggtccttgttctgctgactctggttgatgcttgagcaggcggcagcacaggtgggcacacagtcagtggtgttctccctcagtttctgactcctcacagacatcctttctggttaactgtccaggcttcactgtgccacactatactcttgagttaactgagttcagccctctccctgatagttcttttagatatagacagcatttacttatataactttttaaaactttggtttttgagtaggaaatattttgtgttttttgttttttttttttttatttaaaaagaaaaaaaaatcttatgagctccgcctggtccagaactaaccatgtatatagaacagtctggccccagacttgcagcaatccccctgtctctgcctcctgagtcctagattaacagtcatgtgccaccattgctggcaaacttttaaaaataggtttcattcattcattcattcattcattcatttattttcttatatacagcctgactgcaatttccccagtgtccaccacctgcctgccatatatgtacacccccccttttttactgattgtaagtgtagggagaattgtttttatatttttttctacttaaatagaaatttatgccacagtaatatataaaagaagccttgtaaatgtgaacaattaatgttccttatttttcatgatacaaatacgagtcttgactgtctttcttgttttcaagagactgcatctgttcttaggttgatattctttcagattaaagtagctggtaatttctttccacagtttccagtgttgcccctccctcnnnnnnnnnnnnnnnnnnnnctttcgattgcatgtgtggtccagcagtagtaaaggagattgttttcctgacagagtttagcagcagagcggagtcagtctaaccatagcttcctgtacgtctgtgtgcagcggctccagagctcactgagtgcgcgggagttcttttcgttcctcttgcagtggaagtcagctaaggtctgctggctcctggcagttttctgtttgaactgagaacaggagcaagaataacagtgttcccagaagttctaggatgggtggggcttatagaaccaagcctgctgggaaagctagttgacttgttagctaagaaaatgggagaacccttccaggcatcaggcatggggcaaactttgtgaggagagattgcctgttggaacttgcagtgtgatttataaaaagacagaccataaataaccatgttaaaccttatcaagacctgcttagcctttgaaatatagatcagggtccgtgtggactgacgggacagaatttaaccttcaggtgctctccagttttgttgttgttgtttttgttttgtaagtggctttgggaaaattacactataataggtgaggtagtgcaaccctaaccccagcattgaggtagctgcaacagaaagattagtagaccccaacctgggctaaaaggagaaatttacattgtacgtgattatgtctgtttatcagccttatattatgatggaaatttaaaaattgagtgctaagaaagattgagggatttttcatttaaatatataaaattgtcacagcaagttccccctccccctgaaccttgtgactttcaaagaagcctctcaggacaggaaatgaacatgtattgagccagagcagggctgaggaaatgcatgctacatccttcaaaacagctatcttgtaggtcattcagctaatacaatattaatgttgagaaaatagatgacaggaatccaaaagtaccttcttcgtgtcttatccttgtattcgtgtctccacttaaactctaaagaatgtgtggctacttcctagtggactttggtgacattctcgaaaagtcaaaacatctgttgacatctgttgaaagtaagacactcagacaggcacagtggcgcacacctttaatcccagcactagggaggcagaggcaggtggatctgagtccaatggtctacagagccagttctagaacagccagggctatacagagaaaccctatcttgaaaaataaaaaaagaaaataagacacttgctgtcagcagtttgagagttgggtccatacttctaaaactgatgggttcttcttgatggagtttggttgtgggaggttttgcttccagttttgtttgtgttgtcttactctgctaagattgcaattgatgcctcagacaagccagacaagtgctcagtcattgagctgttctcagctgagtctttactaagcagtgtgtttgtagctaaggaagcaagagtagttgagacacgtcatagtttcttcatctttaccaagagtgcgtaacaatagatacttttctcaccattgaataagtaacttacactttattagagtaaaatttgaatctcttagtcttcaggtatttataccttcttgaataaacccccatttcattgtcaacttacagtttttgcccatttggtggacctgtttagtttttgaagcttaaaatatctaactactacatttacctttctcactcaggttatgcactggctctcagtggcaccgtggataatttctcagattcaggtcacagtgagatttcttcacgatccagtattgtcagcaattcttcttttgactcggtgccagtctctctgcatgatgaacggcgccagaggcattctgtcagcattgtggagagcaacctaggtgtgggcaggatggagcggcggaccctgatggagcctgatcaatacagcttagggtaagcgtctgttccttgcgatctttcctgtctctctctgtgggtctgtgagtaagtgccgtgctatttttgttgtgcagtctgcttttgtaatgtgtttactccttgtggccttccttcttctggaggaagactgcagcagtagtagacacagtccagtctctgtctgatctgccttccatgggtaaccagagtatattctgccaccctgaaccttgtaaggaaagtgtaagtgccccttctttgtagcaggctgtccttccctccccatgtttgctttgtaagatgaatgagcaatatggcagatctctgatcccattcaagagtactttcttcctctctagggtggaagaaagctgcctttctaaggggaaagatttgtataggcatggcagctcatgtctatcatcctaacacttaggctgaggaagaggttcatgagttgaaggccagcctagacttcaaaccaagagcttgtcatcagcacaagggtgtttgtttaacagcctcacatcttcctttcctgtgttttgctggataggtcgtatgccccagtgtctgaaagccgaggcctgtatgccgcagcgacggtcatctcttctcctagcacagaggagctttcccatgaccaaggggaccgtgcttccctcgatgctgctgacagcggtcgtgggagctggacatcatgctcaagtggttcccatgacaacatacagaccattcagcaccagagaagctgggaaacactgccatttgggcacactcactttgactattcaggggatgctgcaagtatatgggcctccggtggccatatggaccaaatgatgttttctgatcatagcacaaaatataacagacagaatcaaagtagagagagtcttgaacaagcccaatcccgggccagctgggcgtcttccacgggctactggggagaagactcagaaggcgacacgggcactatcaagcgaaggggtgggaaggatgtctccgctgaggcagagagcagcagcatggtgcccgtgactacagaggaagccaaacctgtccctatgcctgcccacatagctgtgacgccgagcactaccaagggactcatcggtaagtgtggaaatggaatgttagggggcacacctgaaccatggctgtaacctagttactatggaaactggctcctctctcagttgtccattgccacatatggttccaaatcagcagtgtggtccgagctgaagtgactcagccttagcgctaagttggtggtcagagattcatttaaacattcggtaaagattagccctcagcccacagtgaatagtttcttgctgtggctattatcttgtctaaagttttttttcattttacctgaaaattattaagatagatgtctgtattcttcaccaagtgatttcctttcattgaaacttacaaaatggtttattattctcttgtccccttgaattgtattaagaactctgtatcctttgtatattgaaacctttttcattgatttatgttatacaggcacattgtttctcaattaaacaagttccttatgcattctagaacaggagtagagttcagaaatgagtaaaagctgggagaggggtgtcagtcagagctagaatccctgtcctgacacttcagactgctatgcttgctcatccttaaaatgggcttcataattttaccttctaaaaaatgatttatttatttctaattttacgagtgtaggtgttttgactacatgtatgtctgtgtgagagtgtctgatcccccgaaactggagttatagacagttgtgatccgctatgtgggtgctgggaattgaatccaggccctttttaagagcagccagtgatataaaccactgagctatctctccagcccccataattctatcctaatagggttagtgtgaggatggaagaggtcttgccataggacatcagcagtacctaaaagtgctggtgctccctggtgtaaaggctagtgtgctccccgagtctgagtgctgttctgtgcagcaggcatgaatatctgtctactagaactgtgatgtagattgtgaggtatggagaaaaccttctagaacataaccatatcacacatcacttgtattagtgaggaaataggtctgtagccacgtaagaaagtgatatgtgtgtggatgtcaaatttgatatgccttaaagatgagtaaggttccggtcctaattcttcagctgcttgttttgaagtattttctgttaacaaactaattctcggaatttttattgctgaagaggagagcaaaattgtttctagttcctaagaaaatttgaattgtagtctgtctgtttcacaaatttttggttacaggtcacagattaatagtttttcactaaagaaatcatgaactttgaggaaagcaggtgctgctttggtttccaggacttcgtacattgtcatcctgagccagtcttctgattttactttaatttactgttttccgacatgaaacctagcgagccagagcaatacagaacttgttctccatttgagacagtgcccagcaaacatgaactgtatccctcttcaggtacaggaagagaagaggaaagagatttttacctcgcactgatgtgtgcctggtccctcttgtgcctcgctttgttttaatcttcacagtagggctggtgagatggctcagcggttaagagcaccgactgctcttccaaaggtcctgagttcaaatcccagcaaccacatggtggctcacaaccatctgtaacaaaatctgatgccctcttctggagtgtctgaagacagctacagtgtacttacatataataaataaataaataaataaataaataaataaataattaaaaaaaatcttcacagtagggctaagggtttggtggccaacagttttaacatcaactgtttttagctgaactcccatggtttgcagtagtagctttgttcagaagttataataatacacagaaatgacctggtgagtatttgatacagacagcctagctccctgacttgtctatcctgcaccaccttatgcagcttgaaaatccttgtacctgacaccctgccttgtctttgcagcacggaaggaaggcaggtaccgggagccgcctcccacacctccaggctacgtgggcatccccattgccgatttcccagaagggccttgccacccggccaggaagcccccggattacaacgtggccctgcagcggtcccgcatggtggcacggcccactgaggccccggcaccgggccagacgccgcctgcagccgcagccagccggccgggcagcaagccacagtggcacaagcccagcgacgcagacccacgcctcgcgcccttccagccgcagggcttcgcaggagcggaggaggacggtaggcttccctcacaccccacctgggctcctggggtaacccactggcagcttggaggagtgggggcggtggctccaggagttttaattgcatgttgtagagagctctttttgttttattttttccccctcttttgcaagaggaagaacttatcttttgaatggtttaaggactgcggggattatcagaatcgcttgtaagaaggtgtagacttgatgggagtctcccccagcccctccctgctgctagaggtagaagccaggacctagggggtgctaattctacaacacttagtaaagctaaagttttttttgtggctctgttttaaggattagagtaaaaatctctggttgttgctcatttcaagaattcagagaaacatctttgcctattgaagcgctgctggttccgtttccagtggaagcgttgcagttggcaacttaataggtagaaagtgttgcctcgctttgagttttctttattgtgtcgaagtggcttgaagtgctcggggtggtttattttagtacacagccgttatagcaaagtctaaacataataaatggaaattacaatcgttcaattatagataaataaatattgatatttttgtatattcccctggaatttttttttgtagtttttattttatttgtgtctgagtgtttgcctgtttaactgtagttaaaaagtgaggggcttagggttgagagagagttctgtggccaagagctcttgtttcttggccagaggaccagaattcagcccccaacactcatgtggacatcttagagcccccagtaactctagatacagtagatccaacacactctgctggccactggatctcgtgtgtgtgtgcgtgcgtgtgtgtgtgtgtgtgtgtgtgtgtgtgtgtgtgtacatacagaattttaaaaacacactttttaaaaaggaaggcctggagagatggctctgtggttaagaatgtaaactgctcttgcagcacacacagttcagtttccacacccatgtaagtgtggctcacgactgcctaaaatggtagtacaggaaatccagtcgtttcttctggctcccagggacaactttgctcccatgcatgtacctcacacagaagcaggcatacatagaaatcttggaaaggttttagagcttaaataaatttcactaatcactttccaaccaataagcatgtcatgtacataattttatttatttattgctgtctgagtttggttcctttttctgttataaaaccaatctgaccaaaagcaacttggggaaggaaagggtttatttattccatcttacattccaggtaacaacagtccatcattcagggaagttggagcaggaactgaagcagggtcctgggaaatactgcttactggatttccctcaggctcacattcagctcatataggccaggcctactttccaagcgatggcaccacctgcagggggctggaccctcctgaatcagttagcaatcaggaaaatgtctaacaggccatctaatggaggcagttcctcaagttgaaatttcccttttccaggttaatcaaggtagcagactggccatcacagttattactgtatataagacagtaggctggaccggcttcagatacttactcctggctcagcttcctgggtgctggaattatggacctaaacaaccacacccaactgcctttttaatagtttttataaaccaggtatgacagtgtacaaatttcatcccagcatttgggaagcagaggcaagaggatcttgccagtctggtctacatatggagttctagcatagccaaagctacatagagaaaccctttctcaacccacccccaaagatatatacatatattttcgtggatattgtggatatctgttaagatttgcatgatgtacccattttgttgtttttgtgcatgatagcacagaaaaattatctacttcttgattccttattttgttttctccctgctgtgtttgcagaagatgaacaagtgtctgctgtttgaggcccaggctccttgatccacagtgagccacccaaaggagagcacaagaagacgtcccaagccttggagccttggcacgcacatctgaggatggtggaccagtttgcctccttccctgccttaaagcagcatggggcttcttctccccttcttcctttcccctttgcatgtgaaatactgtgaagaaattgccctggcactttgcagacttgttgcttgaaatgcacagcccagcagcccctgagctgctgcctgccacgtcacgcagtatcattccaaattccaagatcgtcacaaggcgattccctctggcggcccttctccatgcctggaaggagattccaatcttcctcttagatttcaatccagtcctagccctcgatctcatttggaagatgagaaaagctagcctttgaactacccggggtctcgaacccaccaaggaagacaaagactgatatgaaatcctttgagtacagtgcttgtccacttgtttacaatatcctttaaaaaaaaataagtttaaagattgtgttcagagagtaaatgttatatccattttatgattacagtattattttgaaccttaagtaggattgccagcctgggtttctgaaaaaccaaatatgccggacagggtttggccgcaccaagggaagacctgggcagtgaccctgtcttcccatgtccttctggccttgcccgtgaagtgccctatcccagaagcatcaaacgttagccaattacttaaataccaagactcctcacctgccccttccccagtgggtgaggctctaatgtaaaacagtttgcacatggccaggggagggaactaggacttgtgtgtcctgtctgagccttatgaggcaggatggtgttatttaagagtgtgtcctgctcaattacaatggatggcaacccctgtttttaagttatgtttgtttgtttttttgtttttgggttttttgtttttttgtttttttttttttagttttgttaatttagggttttagagctttttgtttttattttttaaaagaaacatttataactggatagcattgcagtgaggcagcttggggtgttggagcgaatgccagctgtttgtactgctctttcaagacagcctccccttgttggattggcaccagagagtatgtctttaaacatgattaaaggtcacaaacatggttaaatacgccagcctttgcaaaatggttagtcaccaaaggctgacctgtaagtggctttggggacgctgcatatggagaaggccaagtgtagcgcccgtctgctcatagctgctgctagccctagaatgactgaaaatgaccccgccggtctattcttgtgttgtttttgcacagactccggaaaagtgaaggctgccaatccgagtagtactcagatgtgaggggctgctgatcttggatttttccattaaattcagctgatcatattgatcagtagataaacgtaaatagcttcaaattttaaaggtcgaattgcagtgttttttcactgtgtcaaacaatgtcagtgctttatttaataattctcttctatgtcatggcgtttgtctacttgtgtatcacattgtcacttacgcatttgtaattttccatgtaatatgcattattgccagttttactctataggctatggacctcatgtgcatatagaaagacaaacctctagctctaccacaaattgcacagatgttatctaagcattaagtaattgtagaacataggactgctaatctcagttcgctctgtgatgtcaagtgcagaatgtacaattaactggtgatttcctcatgcttttgataccacttgtacctgtatgtcttttagaaagacattggtggagtctgtatcccttttgtatttttaatacaataattgtacatattggttatatttttgttgaagatggtagaaatgtactatgtttatgcttctacatccagtttgtacaagctggagaataaataaatataacataaagccttgtctaaacttttcatgaattgtgcatgctttttactactgaaatgaagcagacagaggttgcactacaggattgggcctcgggaggctgaggagtaaacctcctgcttgggagaaactgagtgaactgtttccttttcttggctctttattgggtcaaaggaattaatatcattagtgttagcaccaattaagccatgttcaaattctttcatgtctcttgaggctcaatgtagcacttgtctcctctgtaccttcttctcccaatgtaaatctctaggccatcaggacaccttgttcattgaagtcacggtcactaagagaacaggtcggctgttctctgctgacatccagctagcacgtgatactctttggtgacctgttgtgttttcattgctggggttgaactcagagacctgtgcccactgagtaagcttggtctgttaggtctgaggaatagtatctcagtcccttaaagaagcatttctatttaaataggtaaaaatcagttaagtagttgcctgcttaaatacatgttgagagccaagactcttccttcgagcagatgtaagtaaaagtctgagaagctggactaaacgcatggagactgggaggccaggaactgaaggagatggaggagggtggctctcccaccaccaactcctgctaaatctgtctatcaaaatggttcagaaatatgaagaaaaaggaaaggttgccctagcgacttcacctgtttaagagaacgttctcctgattgccttttgctttctgcaaaaaaaaaaaaaaaatacaaaaccaaggcaagtcacttgcagcttctatccttatcactcttccacactcttaagtaagcaaccagtttagccaaatagccatctgtaggactttaatcagcaagtaccagccagataccaccagtaagaggaacagtttgcatgtacgtgtggataatataactgctgatcaccgctctggctgtcagcatgaacctaggagaggggggcctgaaaacgaggcgctctaaggttgcctgcagtagccacctttattccgagcatttgtatccagacagtttatactctgagggttaggaatcacataagtaatgctctcaatcacaaggacaagccacatgtgcagaaaatatggtttttcatagaagcatatgaataacaacagctgaagtaaactcacttctatctgctacactagggagtggcttaaaaacattttccaagaacaattctgtgttttgaagaaaatgaggtcacagactctctcgtcttgtttccttggagtttttttcataagcactctggcatctcctccttttttattttttgatagcaagatatccagagtgattttgatttgagatgttgtagataaatctaattctcatttgatgcatgagtatcctataaatacaatggatattagaactgtgaaagcattgtgtttaatactttgccaccaagaacaaagaaccaaacgatgtcaggtactactagtgacattattatgttgaccacagaaatctagagaatagcttgaaaagagacccagacaatttgtagttctagtatcttgtagaatataatctcacatttgcctttaatagtaataaaaattttgtgatgtcctatgcagtcaggaagtgattcagattccaaggggaactcctttctccagatggaggagtgactgttacaacccaaggtctaggtaccttctcccctggtgccatcattggggcccaggtgggcagacttgacttttgatggtagagccacatctccctttgtccattagctggaggcttgctatctttctggtgacttccactttctcctcacactccacaggtgtctgatggctcagggctggaggagctaaagaggaattcgtgaagttttagtggctccatctgcaaggacagatgcacgcccaactttcttctggaagagtaaaaatggggcaggttaatgtatcagcttgcttattatacaggccgtacctgtaatagatgaatcaaaacagccagttccacctggtgggctgaggaaaaagaagtataccatgaatccctctcatacccttagatgaaccagcagtaaaataaggatctgtggaatgggagaaagttggacaatttttgtaattacaagttctgtttgtgagagaaccctatagcttaccagctggataatgatttcctatccttccatgggaatctgcaagtgaaatttaaaaatctatagagttctgcaatgctcttttaaaatgctaaggttaatatgatacagcaaggatggaatccatgtcattgttaacatcaggtccccccccccccacacacacacacacacatacacacgccagatttactaaactgagcaaggagagtaaggtaagcagttagtattttatgtgctgtaaatgaattcatccccaagtttatccccttgtgctatataatacctaaaggagacaatttattgggaaaaattaagtttaaaggcagtgaaggatccacacgatgagcaaatgcgtctttagtctggaaccaaatacctgtagttcttgcctctctagatagtatcggaggactgtagagtgctgcctttcctttgagagtttgaaataaagaccatagggcttaaaatcattttgattttgttgaaatcacactggaaataccaagtgtacgtcatgaggccagggaggaactgctaaattcctgcatggtttcctgccatggcctggcttgcctaggttgtaaagttagcgttttcataagctctcctcatcaaaaagtggagatgattcaatattaaattgatactaaattccccatcccatgcttcagaatcatgttcaggcaatggagggtttgtctaaaggagacgccactaacagccgagggagctgtcacccacacaggtggtagtgtttttacttttgatattgcctgcacagagaaaagccccttcattgcccctcatcacgtttaaggcttgaccacccagtttctattcatttaaagaattagccacctctttctcatgattaatatcctccctatctttcccaagaatttttggttttttgtttgtttgtttatttttgtttttttgggacagggtttttctgtgtagccctggctgtcctggaactcactctatagaccaggctggcctcgaactcagaaatccgcctgcctctgcctcccgagtgctgagactaaaggcgtgcaccaccatgcccggctccaagtattttaataacagcccaaattggcccaattttgacccaaatttgaccagtgtggtagtttgtatatgcttgccctagggtgtggcacattagaaggtatggccttttggaagtaggtctgtcattgtggacatgggcttttgtttgtttgtttctttcaaggaaattctttttttttaattagatatttaatttattaatattttttttcttttttggatcttttctctgtttacattttaaatgttatcccctttcccgatttccctccctcctggaaacaccctatcacctcccccccccttctatgagggtgttcctccatccatccacccactcccacctcccccaccctcaattcccctatgctggggcatctatctagtcttcataggaccaaggacctctcctcacattgatgcatgacaaggccatcctctgctacatatgcagctggagccatgagtactcctttgttgatggcttagtccctgggagctatggggaatctggttggttgatattgttgttcttcctatggggttgcagaccccttcaactccttcagtcctttctcttatctccccgattggggaccccacgctcagtccaatggttggctgtaaacatccacctctgtatttgtcaggctctgggagggcctctcaggagacagccatatcaggctcctttcagcaagcacttcttgacatatactattgtggatgccaagaagggcatgggctttaattccctctacttagctgcctggaagcccgtcttctcctagcagccttcggatgaagatgtagaactctcagctctgcctgcaccatgcctctctggatgctgccatgctccctccttgataatggactaaaactctgaacctgcaaggcagcaccaattaaatgtcgcctttgtcatggtgtcttctcacagcagtaaaaccctaagacaaacagggattttccccccttattattgtcacctcttcagattctgtctcatacttcatttgaaattccttcaaaaactggggattgtacttgtgctcctccacaccacctccccactcccccagatccatcacctcccttcagaaagtaagaggcttcccagggatagcgacgaaacatggcataacaacctacagtaagaccaggcacaccatcacatcaaggctggcaaaggcaacccaggaggaggagaaaggacccacaagtaggcaaaagagtcagggatagaccctgctatccctcttgagttccacaagaacaccaagctatttagccataacatctgcagagaacctaagccagaccccttcaggctccttgatctttttgtgcacttatgaatggtatagctgggccttgaggtagatcaatttccaactttctgagaaaccaccatattgacttccaaagtaactactatacaggttcacactcctaccatcagtgaagtattccccttgctccacatccttgccaacataagctgtcacttagcttacacccattagatggaatctcaaagtcattttgatttgcatttccctgatggctacggatgttgaacattttttttaaatgtctctcagccatttgataatcctctattgagaattctgttaccctactttttaattggattgtttggtttgttcatgtctagtttattcagttctttatatattttggatattagtcctccgtcagatgtgaagttggtgaaaatattccttcactctataggctgctgttttgtcctttggatgctgtccttttctttacagaagcttttcagtttcacgagtcccatttactaactatcaatcttagtgcctgagctatgcgtgttctgttcaggaagttgtctcctgtgcctatgcattgaaggttattacccactttctcttctatcaggttcaaggtatctgatttggggccccatttcatgagcaaggtagattaccacaatcttggcttggaaaaatgacctaatacctaaaggcagttttacagaggagaatgtgaaattcagtgcctcaactgaatgccctcctttttttttccagatagcttatacattcttttttttttaattcctttttttttattaggtattttcctcgtttacattttcaatgctatcccaaaggtcccccatacccacccccccaatcccctacccacccactgcccctttttggccctggtgtttccctgtactggggcatataaagtttgaaagtccaatggcctctctttgcagtgatgaccgactaggccatcttttgatacatatgcagctaaagacaagagctcccgggtactggttagttcatattgttgttccacctatagggttgcagttccctttagctccttgggtaatttctctagctcctccataagaggccgtgtgacccatccaatagctgactgtgatcatccacttctgtgtttgctagaccccggcatagtctcacaagagagagctatatctgggtcctttcagcaaaatcttgctagtgtatgcaatggtgtcagcatttggaagctgattatgggatggatccctgcatatggcaatcactagatggtccatcctttcgtcacagctccaaattttgtctctgtaactccttctatgggtgttttgttcccatttcttttttttttttttttaattttttattaggtatttagctcatttacatttccaatgctataccaaaagtcctccatacccacccacccccactcccctacccacccactccccctttttggccctggcgttcccctgtactggggcatataaattttgcgtgtccaatgggcctctctttccagtgatggccgactaggccatcttttgatacatatgcagctagagtctagagctccggggtactggttagttcataatgttgttccacctatagggttgcagatccctttagctccttgggtactttctctagctcctccattgggagccctgtgatccatccattagctgactgtgagcatccacttctgtgtttgctaggccccagcatagtctcacaagagacagctacatctgggtcctttcgataaaatcttgttagtgtatgcaatggtgtcagcgtttggatgctgattatggggtggatccctggatatggcagtctctacatggtcaagaaagggtagagtgtccacactttggtcttcgttcttcttgaatttcatgcgtttggcaagttgtatcttatatcttgggtatcctaagtttctgggctaatatctacttatcagtgagtacatattgtgtgagttcctttgtgattgggttacttcactcaggatgataccctccaggtccatccatttgcctaggaatttcataaattcatttttttaatagctgagtagtattccattgtgtaaatgtaccacattttctgtatccattcctctgttgaggggcatctgggttctttccagcttctggctattataaataaggctgctatgaacatagtggagcatgtgttcttcttaccggttgggacatcttctggatatatgcccaggagaggtattgcgggatcctccggtagtactatgtccaattttctgaggaaccgccagactgatttccagagtggttgtacaagtaacttatacattctaagctactaactttctgacttgacaccaaggtgttaatgaaagcgatgtgtgctggtggggttccatagagtaaaagcatcacagactgtttcagcttttccttaacttatgtaggtaaggactttactccccctaaaacctatagattgctacatgccccatttgtcactaagtagctgtgtggacaaaatgctagatacagttgtgaactcgtttcaggctcttgcctggatgtctatgcttacagattttgcctaggtgaactgacgtaccttctagcgatattttctttggggagtgtgtcacatagctagggttctagttaggagaacttagtgatctcatggaggaggttgggtgtgggtgccataaaggccaaatgccaggtgatttgtggtctacaagttgtcagggtaggctcaggagcagtcagtaagagggttctagaacacttctcagtatggaatgtaagaattaactcattgcagtcttgagaattctgtgcaaaggcaaaaaaaaaaaaaaaaaaaaaaaagaatggtactaaagcagaaagacatgagatcacagaaatcatgaagcaagagcagctctcagtgggaaaaaagaaaagtaggaagctgtctgaagtttaggaggtgatgagccaaaagtcagagcagtgatgagaccttcatatcagacatgctctgacctgccagaaccatcaccaagaaaacacactaccccagacatacctagctccttacccctgttctcaagtccaaaggaaacttaagaatttgagcctgtgattatcatagtagctcctgctttaatagtgaatcagaattccagtgatgtgctaaaactccagactttagaagtcttaaccttatgtatcatctttaagtgtcattctcacataccttaagtcattccctcagacctttacaacttgcattcccagaccataaacctctttcttagatcctcacaactttcataaattttaaaccctttctattttcatctaaccacttaccatgaggcctaggtgattactgagagcagtcactgaaaagcaaattcttttaaatacagggatagtaaaaagtaaaattttagttagtaatagcagcatgatagcttgagtttgatttttacttctaaacctttgtgagtcaacaggagacctagtagttctagaaaaaaacaaagccttgtttttatatatgaaatggactgagcaggcagctgcagccctgtgggaaggagctgttttgcttggtgttgttagactgaaaaagttacaaccagtcatcagtcaccattagagatctgagaaggagaaaattgagcaggaagtataatccaaatggcttctgtatccattaaaatgacagaggcgtacctgttacctggaaggctacctagactcctccataatgaccttgatgactttgttcgatagagaagttgttagtctttgactgttacatggaggagcattaagttgccagacccagaagatctaagagcttttcttgtggatgaggaatttaagagattgaccaactttggctaggcatagaggagcagccaattccccagtgtccttcttgttcacaattcaggcaagagtcctggtggcaagcaggcagaaggatagttcttcacccagtggctggatttaccacacttgaagcaaatgcccagtagaaatcatttgtgcctttgaagaggtcagttgaggacctttggaaaattccatcagacccctcccctcctggaagagaaaggtcatggagcacttaggtacccctcccctccggaagggagaggctaattatattcctcagaccacctacctgtgggtgagggaggcccagagcacatagacacattcctcagggcagacaaactgttggccatctacagacaagggaagtccttgccgcctcattccctaaggaccaatcagtttaaaagtcacactgttctgccaatcacattgtgtctagtggctgttgctctattccatccctaaaaactgtataaaaactcactcactgaatgggctggtgccgggggtggggggaagtgtcacggctttgccttcaggtgtaggaccccagtgcactggaacaataaattcctcttgcttttgcatcgatccccagctctgagttgttcatggggaggggcggtgggggaggggggtcccagtaagctaaggctcaccagagtcttataccttatcttcttctttggaggagaccttcagggcttcctttatgatctggcatttctgtctacgatgggaagtttttttaattaaatgccatatttggcagatgtctgaggagtttgggatgtatcgtctaatctcttaagtatacctgattttacttgttctgtttgttttacttgcttcaggcgtaactttgacagcatttacagaagactaaataaagtttgtccctgtaaatgaattatatttgaacttagcatgacaataaacatagctttaagaacattaaagaaatttatcatttataagaccattaacttgcatgtcttacatttatactattaactcagtttatatttaaagttttagtgagttagtggctttgaccctttaaaatctgaagtgagggctggagagatggctcagagcttaagagcattcattggctgctcttccaaaagtcctgagttcaattcccagcaaccaaacggtggttcacaaccatctgtaatggaatccaattccctcttctggtgtgcatgaaaacagatcactcatacataaaataaatatataaataaatcctaaaaagttgtttgtttgaattgaaaatttaattgaaactcctttaagtcataagtacagcccatagagagaatgtgaacttcacaaaaccataactgcagttcacagagagacagagaatcttattttcctgctccttttatggtgtccctttataaaatacctcagtttcttgtatgacaatttttcccaatagtcaaatcttagcaaagctag

SEQ ID NO: 672 - DNA, 6574 bp, Mus musculus
gtggactatatggatgaaaatgaagaatatttccaacgtcaagcctcccacagacagtcacggagaagatttagaaagatcaaccagaaaggtgaaagacaaacaattatcgacacagtggacccttaccctgtgggcaagccacctttacctagaggctaccatacgctccctgcagacttcacaaaactgcacctcactgacagcctgcacccacaggtgacccacgtgtcctccagccattcaggatgtagcatcaccagcgactctgggagcagcagtctttctgacatttaccaggccacggagagcgaggccggtgacatggacctgagtggactgccagagacggcggttgactctgaggatgacgatgatgaggaagacatcgagagagcatcagaccctctgatgagcagggacatcgtgagggactgcctggagaaggacccgatagacaggactgacgatgacatcgaacaactactggaatttatgcaccagctgccggcctttgccaatatgacgatgtcagtaagacgggagctctgtgccgtgatggtgtttgcagtggtggaaagagctggaaccattgtgttaaacgacggagaagagctggattcctggtcagtgattctcaatggttccgtggaggtgacatatccggatgggaaagcagaaattctgtgcatgggaaacagctttggtgtttcgcccaccatggacaaagaatacatgaaaggagtcatgaggaccaaggtggatgactgccagcaagattactgccgtattttgaaccaagtagaaaagaacatgcaaaaagttgaggaggaaggagagattgtaatggtgaaggaacaccgagaacttgatcggactggaacaaggaagggccacatcgtcatcaagggcacctcagagaggctgaccatgcatttggtggaagagcattctgtagtggatccaacattcatagaagacttcctgttgacataccggactttcctttccagcccgatggaagtgggcaagaagttattggagtggttcaatgacccgagcctcagggataaggtgacgcgggtagtattactgtgggtgaataatcacttcaatgactttgaaggggatcctgcaatgactcgatttctggaagaatttgaaaataatctggaaagagagaaaatgggtggacatctaaggctgttgaacattgcatgtgcagctaaagccaaacgaagactgatgacgttaacaaagccttcccgggaagcccctctgcccttcatcttactgggaggctctgaaaagggctttggcatcttcgtggacagcgttgactcgtgtagcaaagccactgaagcaggcttgaagcgcggggatcagatattagaagtgaatggtcaaaattttgaaaatatccaactttcaaaggcaatggaaattctcagaaataacacacacctgtccatcactgtgaaaaccaacttatttgtatttaaagaacttctgacgagattgtctgaagagaaaagaaacggtgcccctcacctccctaaaatcggggacatcaagaaggccagccgctactccataccggatctcgccgtagacgtagaacaggtgataggcctcgagaaggtcaacaagaaaagcaaagccaacaccgtgggaggaagaaacaagctgaagaaaatactcgacaagacccggatcagcatcttacctcagaaaccatacaatgatattgggattggtcagtctcaagatgatagcatcgtaggactgaggcagaccaagcacatcccagctgccctgcctgtcagtggaacgctgtcctccagtaaccctgacttgctgcagtcacaccaccggattctggacttcagcactactcctgacttgccagatcaggtactgagagttttcaaggctgaccaacaaagcaggtacatcatgatcagcaaggacaccaccgcaaaggaagtggtcatccaggccatcagagagtttgctgtcactgccaccccagagcagtattccctctgtgaggtctcagtcacaccagagggagttatcaaacaacgccgactcccagatcagctttccaagcttgccgacaggatacaactgagtggaaggtattatctgaaaaacaacatggaaacagaaacgctttgctcagatgaagatgcccaggagctgctgcgagagagccaaatctccctccttcagctcagcaccgtggaggttgccacgcagctctccatgaggaactttgaactcttccgcaacattgagcctactgaatacatagatgatttatttaaactcaaatcaaaaaccagctgtgccaacctgaagaaatttgaggaagtcattaaccaggaaacattttgggtggcttctgaaatcctgcgggaaacaaaccagctgaagaggatgaagatcattaagcatttcatcaagattgccttgcactgcagggaatgcaagaattttaactccatgtttgcaatcatcagtggcctaaacctggcaccggtggcaagactacgaaccacctgggaaaagcttcccaataaatatgaaaagctgttccaggacctgcaagacctgtttgatccttccagaaacatggcaaagtaccgcaatgtcctgagtggccagaacttacagcctcctgtcattcccctgttccctgtcatcaagaaggacctcacgtttctccatgagggaaatgactcaaaagtagacggactggtcaactttgagaagctgaggatgattgcaaaagaaatccgtcacgttggccgaatggcatcagtcaacatggaccctgcccttatgttcaggactcggtccctgagtcagggcagtgcaaacgccacagtgctggatgttgctcagacaggcgggcataaaaagcgggtacgccgtagttccttcctcaatgccaaaaagctgtatgaagatgcccagatggctcggaaagtgaagcaatacctgtccaacctggagctggagatggatgaggagagtcttcagacactgtcactgcagtgtgaaccagcaaccagcacattgcccaagaatcctggagacaaaaagcctgtcaagtctgagacctccccagtggctccacgtgcagggccccagcagaaagtacagcctcagcagccgctggcacagccacaacctccacataaagtcagccagggactgcaggtgcccgctgtgtccctctatccttcacgaaagaaggtgccggtgaaggatctgcctccttttggcataaactctccacaagctttgaagaaaatcctgtccttgtctgaagaagggagtttggagcgtcacaggaagcaagcagaagatacaatatcaaatgcgtcctctcagctctcatcgccccccacctcacctcagagctctccaaggaaaggttatgcactggctctcagtggcaccgtggataatttctcagattcaggtcacagtgagatttcttcacgatccagtattgtcagcaattcttcttttgactcggtgccagtctctctgcatgatgaacggcgccagaggcattctgtcagcattgtggagagcaacctaggtgtgggcaggatggagcggcggaccctgatggagcctgatcaatacagcttagggtcgtatgccccagtgtctgaaagccgaggcctgtatgccgcagcgacggtcatctcttctcctagcacagaggagctttcccatgaccaaggggaccgtgcttccctcgatgctgctgacagcggtcgtgggagctggacatcatgctcaagtggttcccatgacaacatacagaccattcagcaccagagaagctgggaaacactgccatttgggcacactcactttgactattcaggggatgctgcaagtatatgggcctccggtggccatatggaccaaatgatgttttctgatcatagcacaaaatataacagacagaatcaaagtagagagagtcttgaacaagcccaatcccgggccagctgggcgtcttccacgggctactggggagaagactcagaaggcgacacgggcactatcaagcgaaggggtgggaaggatgtctccgctgaggcagagagcagcagcatggtgcccgtgactacagaggaagccaaacctgtccctatgcctgcccacatagctgtgacgccgagcactaccaagggactcatcgcacggaaggaaggcaggtaccgggagccgcctcccacacctccaggctacgtgggcatccccattgccgatttcccagaagggccttgccacccggccaggaagcccccggattacaacgtggccctgcagcggtcccgcatggtggcacggcccactgaggccccggcaccgggccagacgccgcctgcagccgcagccagccggccgggcagcaagccacagtggcacaagcccagcgacgcagacccacgcctcgcgcccttccagccgcagggcttcgcaggagcggaggaggacgaagatgaacaagtgtctgctgtttgaggcccaggctccttgatccacagtgagccacccaaaggagagcacaagaagacgtcccaagccttggagccttggcacgcacatctgaggatggtggaccagtttgcctccttccctgccttaaagcagcatggggcttcttctccccttcttcctttcccctttgcatgtgaaatactgtgaagaaattgccctggcactttgcagacttgttgcttgaaatgcacagcccagcagcccctgagctgctgcctgccacgtcacgcagtatcattccaaattccaagatcgtcacaaggcgattccctctggcggcccttctccatgcctggaaggagattccaatcttcctcttagatttcaatccagtcctagccctcgatctcatttggaagatgagaaaagctagcctttgaactacccggggtctcgaacccaccaaggaagacaaagactgatatgaaatcctttgagtacagtgcttgtccacttgtttacaatatcctttaaaaaaaaataagtttaaagattgtgttcagagagtaaatgttatatccattttatgattacagtattattttgaaccttaagtaggattgccagcctgggtttctgaaaaaccaaatatgccggacagggtttggccgcaccaagggaagacctgggcagtgaccctgtcttcccatgtccttctggccttgcccgtgaagtgccctatcccagaagcatcaaacgttagccaattacttaaataccaagactcctcacctgccccttccccagtgggtgaggctctaatgtaaaacagtttgcacatggccaggggagggaactaggacttgtgtgtcctgtctgagccttatgaggcaggatggtgttatttaagagtgtgtcctgctcaattacaatggatggcaacccctgtttttaagttatgtttgtttgtttttttgtttttgggttttttgtttttttgtttttttttttttagttttgttaatttagggttttagagctttttgtttttattttttaaaagaaacatttataactggatagcattgcagtgaggcagcttggggtgttggagcgaatgccagctgtttgtactgctctttcaagacagcctccccttgttggattggcaccagagagtatgtctttaaacatgattaaaggtcacaaacatggttaaatacgccagcctttgcaaaatggttagtcaccaaaggctgacctgtaagtggctttggggacgctgcatatggagaaggccaagtgtagcgcccgtctgctcatagctgctgctagccctagaatgactgaaaatgaccccgccggtctattcttgtgttgtttttgcacagactccggaaaagtgaaggctgccaatccgagtagtactcagatgtgaggggctgctgatcttggatttttccattaaattcagctgatcatattgatcagtagataaacgtaaatagcttcaaattttaaaggtcgaattgcagtgttttttcactgtgtcaaacaatgtcagtgctttatttaataattctcttctatgtcatggcgtttgtctacttgtgtatcacattgtcacttacgcatttgtaattttccatgtaatatgcattattgccagttttactctataggctatggacctcatgtgcatatagaaagacaaacctctagctctaccacaaattgcacagatgttatctaagcattaagtaattgtagaacataggactgctaatctcagttcgctctgtgatgtcaagtgcagaatgtacaattaactggtgatttcctcatgcttttgataccacttgtacctgtatgtcttttagaaagacattggtggagtctgtatcccttttgtatttttaatacaataattgtacatattggttatatttttgttgaagatggtagaaatgtactatgtttatgcttctacatccagtttgtacaagctggagaataaataaatataacataaagccttgtc

SEQ ID NO: 673 - protein, 1502 aa, Mus musculus
VDYMDENEEYFQRQASHRQSRRRFRKINQKGERQTIIDTVDPYPVGKPPLPRGYHTLPADFTKLHLTDSLHPQVTHVSSSHSGCSITSDSGSSSLSDIYQATESEAGDMDLSGLPETAVDSEDDDDEEDIERASDPLMSRDIVRDCLEKDPIDRTDDDIEQLLEFMHQLPAFANMTMSVRRELCAVMVFAVVERAGTIVLNDGEELDSWSVILNGSVEVTYPDGKAEILCMGNSFGVSPTMDKEYMKGVMRTKVDDCQQDYCRILNQVEKNMQKVEEEGEIVMVKEHRELDRTGTRKGHIVIKGTSLTMHLVEEHSVVDPTFIEDFLLYTFLSSPMEVGKKLLEWFNDPSLRDKVTRVVLLWVNNHFNDFEGDPAMTRFLEEFENNLEREKMGGHLRLLNIACAAKAKRRLMTLTKPSREAPLPFILLGGSEKGFGIFVDSVDSCSKATEAGLKRGDQIVNGQNFENIQLSKAMEILRNNTHLSITVKTNLFVFKELLTRLSEEKRNGAPHLPKIGDIKKASRYSIPDLAVDVEQVIGLEKVNKKSKANTVGGRNKLKKILDKTRISILPQKPYNDIGIGQSQDDSIVGLRQTKHIPAALPVSGTLSSSNPDLLQSHHRILDFSTTPDLPDQVLRVFKADQQSRYIMISKDTTAKEVVIQAIREFAVTATPEQYSLCEVSVTPEGVIKQRRLPDQLSKLADRIQLSGRYYLKNNMETLCSDEDAQELLRESQISLLQLSTVEVATQLSMRNFELFRNIEPTEYIDDLFKLKSKTSCANLKKFEEVINQETFWVASEILRETNQLKRMKIIKHFIKIALHCRECKNFNSMFAIISQLAPVARLRTTWEKLPNKYEKLFQDLQDLFDPSRNMAKYRNVLSGQNLQPPVIPLFPVIKKDLTFLHEGNDSKVDGLVNFEKLRMIAKEIRHVGRMASVNMDPALMFRTRSLSQGSANATVLDVAQTGGHKKRVRRSSFLNAKKLYEDAQMARKVKQYLSNLELEMDEESLQTLSLQCEPATSTLPKNPGDKKPVKSETSPVAPRAGPQQKVQPQQPLAQPQPPHKVSQGLQVPAVSLYPSRKKVPVKDLPPFGINSPQALKKILSLSEEGSLERHRKQAEDTISNASSQLSSPPTSPQSSPRKGYALSGTVDNFSDSGHSEISSRSSIVSNSSFDSVPVSLHDERRQRHSVSIVESNLGVGRMERRTLMEPDQYSLGSYAPVSESRGAAATVISSPSTEELSHDQGDRASLDAADSGRGSWTSCSSGSHDNIQTIQHQRSWETLPFGHTHFDYSGDAASIWASGGHMDQMMFSDHSTKYNRQNQSRESLEQAQSRASWASSTGYWGEDSEGDTGTIKRRGGKDVSAEAESSSMVPVTTEEAKPVPMPAHIAVTPSTTKGLIARKEGRYREPPPTPPGYVGIPIADFPEGPCHPARKPPDYNVQRSRMVARPTEAPAPGQTPPAAAASRPGSKPQWHKPSDADPRLAPFQPQGFAGAEEDEDEQVSAV
